(19) United States
(12) Patent Application Publication
(10) Pub. No.: US 2023/0340073 A1
(43) Pub. Date: Oct. 26, 2023

(54) RECOMBINANT FACTOR VIII VARIANTS

(71) Applicant: Codexis, Inc., Redwood City, CA (US)

(72) Inventors: Jeremiah Dallas Heredia, Sunnyvale, CA (US); Nikki D. Kruse, San Carlos, CA (US); Aksiniya Lyubenova Petkova, Sunnyvale, CA (US); Marcus Rohovie, Redwood City, CA (US); Adam P. Silverman, San Carlos, CA (US)

(21) Appl. No.: 18/150,761

(22) Filed: Jan. 5, 2023

Related U.S. Application Data
(60) Provisional application No. 63/297,690, filed on Jan. 7, 2022.
(60) Provisional application No. 63/478,454, filed on Jan. 4, 2023.

(51) Int. Cl. C07K 14/755; C12N 15/63; A61P 7/04

(52) U.S. Cl. CPC C07K 14/755; C12N 15/63; A61P 7/04

(57) ABSTRACT

The present disclosure provides recombinant factor VIII polypeptides, polynucleotides encoding the recombinant factor VIII polypeptides, and compositions thereof, wherein the recombinant factor VIII polypeptides have been engineered to provide improved expression, activity/potency, clotting activity/potency, serum/plasma stability, and/or reduced immunogenicity. The present disclosure also relates to the use of the compositions comprising the recombinant factor VIII polypeptides or polynucleotides encoding the recombinant factor VIII polypeptides for therapeutic purposes.

### CROSS-REFERENCE TO RELATED APPLICATIONS

[0001] This application claims the benefit under 35 U.S.C. § 119(e) of U.S. Provisional Application No. 63/297,690, filed Jan. 7, 2022, and U.S. Provisional Application No. 63/478,454, filed Jan. 4, 2023, the contents of which are incorporated by reference herein in their entireties.

### REFERENCE TO SEQUENCE LISTING, TABLE OR COMPUTER PROGRAM

[0002] The Sequence Listing submitted concurrently herewith with a file name of “CX7-224US2_ST26.xml,” a creation date of Jan. 5, 2023, and a size of 11.4 megabytes, is part of the specification and is incorporated by reference herein.

### TECHNICAL FIELD

[0003] The present disclosure provides recombinant factor VIII polypeptide variants and compositions thereof. The recombinant factor VIII polypeptides have been engineered to have improved properties, such as improved expression, thermostability, serum stability, plasma stability, stability under basic conditions, reduced immunogenicity, improved cofactor potency, and improved blood clotting. The present disclosure also relates to the use of the compositions comprising the recombinant factor VIII polypeptides for therapeutic purposes.

### BACKGROUND

[0004] Human factor VIII (“FVIII”), also known as clotting factor VIII or anti-hemophilic factor, is a protein cofactor that functions as a necessary part of the blood coagulation pathway which in response to injury initiates a chain of enzymatic and chemical reactions that results in a blood clot. Factor VIII directly supports Factor IX as a cofactor, improving its enzymatic activity by 10⁵-fold (see e.g., Mazurkiewicz-Pisarek et al., Acta Biochimica Polonica, 2016, 63.1:11-16). Hemophilia A, also referred to as haemophilia A, is an X-linked genetic deficiency in factor VIII that results in increased bleeding and lack of blood clots. There are three generally recognized forms of hemophilia A. Patients who have mild hemophilia A have excessive bleeding after trauma or surgery but are otherwise healthy. Patients who have moderate hemophilia A also suffer from joint and muscle bleeding after mild trauma. Patients who have severe hemophilia A suffer from spontaneous joint and muscle bleeding even without trauma. All patients with hemophilia A require treatment, but patients with the severe form and some patients with the moderate form require regular and frequent infusions of factor VIII to prevent excessive blood loss and death (see, e.g., Peters et al., Nature Reviews Drug Discovery, 2018, 17(7):493-508). This disease is estimated to affect 1 in 5,000 males, but also occurs in females. Treatment is generally supportive and there is no cure, thus there remains a need for a safe and effective treatment.

### SUMMARY

[0005] The present disclosure provides recombinant factor VIII polypeptide variants and compositions thereof. The recombinant factor VIII polypeptide variants have been engineered to have improved properties, including increased activity, thermostability, serum stability, plasma stability, reduced immunogenicity, and/or improved blood clotting. The disclosure also relates to the use of the recombinant factor VIII polypeptides for therapeutic purposes.

[0006] In one aspect, the present disclosure provides a recombinant factor VIII polypeptide, or abiologically active fragment thereof, comprising an amino acid sequence having at least 70%, 75%, 80%, 81%, 82%, 83%, 84%, 85%, 86%, 87%, 88%, 89%, 90%, 91%, 92%, 93%, 94%, 95%, 96%, 97%, 98%, or 99% or more sequence identity to a reference sequence corresponding to residues 20-1457 of SEQ ID NO: 2, 252, 504, 706, 840, 1200, 1514, or 2072, or to a reference sequence corresponding to SEQ ID NO: 2, 252, 504, 706, 840, 1200, 1514, or 2072, wherein the amino acid sequence comprises one or more substitutions relative to the reference sequence corresponding to residues 20-1457 of SEQ ID NO: 2, 252, 504, 706, 840, 1200, 1514, or 2072, or relative to the reference sequence corresponding to SEQ ID NO: 2, 252, 504, 706, 840, 1200, 1514, or 2072.

[0007] In some embodiments, the recombinant factor VIII polypeptide comprises an amino acid sequence having at least 70%, 75%, 80%, 81%, 82%, 83%, 84%, 85%, 86%, 87%, 88%, 89%, 90%, 91%, 92%, 93%, 94%, 95%, 96%, 97%, 98%, or 99% or more sequence identity to the reference sequence corresponding to residues 20-1457 of SEQ ID NO: 2 or to the reference sequence corresponding to SEQ ID NO: 2, wherein the amino acid sequence comprises one or more substitutions relative to the reference sequence corresponding to residues 20-1457 of SEQ ID NO: 2, or relative to the reference sequence corresponding to SEQ ID NO: 2.

[0008] In some embodiments, the recombinant factor VIII polypeptide comprises an amino acid sequence having at least 70%, 75%, 80%, 81%, 82%, 83%, 84%, 85%, 86%, 87%, 88%, 89%, 90%, 91%, 92%, 93%, 94%, 95%, 96%, 97%, 98%, or 99% or more sequence identity to the reference sequence corresponding to residues 20-1457 of SEQ ID NO: 252, 504, 706, 840, 1200, 1514, or 2072, or to the reference sequence corresponding to SEQ ID NO: 252, 504, 706, 840, 1200, 1514, or 2072, wherein the amino acid sequence comprises one or more substitutions relative to the reference sequence corresponding to residues 20-1457 of SEQ ID NO: 2, or relative to the reference sequence corresponding to SEQ ID NO: 2.

[0009] In some embodiments, the amino acid sequence of the recombinant factor VIII polypeptide comprises at least a substitution at amino acid position 13, 14, 15, 16, 17, 18, 19, 20, 21, 24, 37, 56, 57, 58, 59, 61, 63, 64, 65, 85, 96, 104, 110, 119, 127, 132, 158, 160, 164, 167, 168, 171, 175, 178, 186, 187, 205, 210, 211, 212, 215, 225, 246, 257, 260, 265, 281, 292, 294, 301, 303, 304, 306, 308, 310, 311, 312, 318, 320, 321, 325, 328, 332, 334, 335, 344, 346, 347, 349, 351, 353, 354, 355, 356, 358, 359, 362, 370, 387, 388, 390, 392, 393, 397, 407, 428, 429, 433, 435, 436, 481, 487, 488, 489, 491, 498, 499, 503, 514, 527, 533, 534, 535, 536, 538, 543, 550, 551, 555, 558, 569, 580, 581, 584, 610, 611, 612, 613, 614, 615, 616, 617, 618, 619, 620, 621, 622, 643, 646, 650, 665, 667, 676, 680, 681, 682, 683, 684, 686, 693, 696, 698, 700, 706, 707, 708, 712, 716, 724, 726, 729, 731, 732, 734, 735, 736, 737, 738, 739, 740, 744, 746, 747, 748, 749, 750, 751, 752, 753, 754, 755, 756, 757, 759, 770, 773, 775, 785, 786, 787, 790, 791, 792, 793, 794, 795, 797, 798, 799, 800, 801, 802, 805, 806, 807, 808, 809, 810, 811, 812, 815, 816, 817, 818, 819, 821, 822, 824, 825, 826, 828, 830, 831, 836, 837, 838, 839, 840, 841, 844, 866, 873, 879, 892, 896, 897, 903, 907, 914, 916, 917, 918, 919, 921, 922, 923, 924, 926, 929, 938, 939, 945, 948, 951, 968, 999, 1037, 1040, 1041, 1042, 1043, 1049, 1050, 1051, 1053, 1054, 1076, 1078, 1080, 1084, 1088, 1089, 1092, 1093, 1094, 1095, 1098, 1099, 1100, 1101, 1104, 1108, 1109, 1113, 1114, 1116, 1127, 1129, 1138, 1145, 1148, 1151, 1156, 1158, 1160, 1186, 1192, 1193, 1194, 1205, 1210, 1218, 1220, 1221, 1222, 1224, 1229, 1245, 1248, 1250, 1259, 1264, 1269, 1270, 1274, 1281, 1283, 1292, 1297, 1339, 1352, 1373, 1377, 1378, 1380, 1389, 1414, 1422, 1427, 1428, 1439, 1440, 1442, or 1452, or combinations thereof, wherein the amino acid positions are relative to the reference sequence corresponding to SEQ ID NO: 2.

[0010] In some embodiments, the amino acid sequence of the recombinant factor VIII polypeptide comprises at least a substitution or amino acid residue 13G/Y, 14G/M/V, 15G/S, 16A/D/G/P/V, 17S/V, 18L/R, 19G, 20L, 21M, 24V, 37H, 56E/P, 57A/L/S/T/V, 58K, 59D/G/L/M/Q/R/S/V/W, 61Q/S, 63C/E/F/G/H/I/K/L/M/N/Q/R/S/T/W/Y, 64D/G, 65A, 85Q, 96I/L/R/V/W, 104S, 110H, 119G/V, 127V, 132P/R, 158G, 160E/T, 164E, 167G/H/R, 168G/R, 171A/D/E/F/H/K/N/M/P/Q/R/S/T/V/W/Y, 175A/G/H, 178C/M/Q/V/W, 186A, 187C/G, 205R, 210P, 211G/K/P/Q/R, 212A/F/G/K/L/M/N/P/R/S/V/Y, 215E/P/S, 225R, 246D, 257I, 260E/K/T, 265R/S/W, 281A/S, 292D, 294G, 301K/M, 303G/T, 304A/E/G, 306A/D/G/P/S/T, 308P, 310G/V, 311E/G, 312L, 318C/G/K/M/Q/R/T/V, 320G/I/L/P/Q/R/S/T/V, 321Y, 325Y, 328G/Q/S, 332A/F/G/H/N/P/Q/R/T/V/W/Y, 334G, 335E/P, 344A/E/L, 346R/V, 347N, 349G, 351S, 353S, 354R, 355C, 356L/N, 358K/S, 359E/G, 362E/G/N/P/T/V/W, 370A, 387A/G/I/L/Q/R/S/T/V/W, 388A/P, 390A/E/G/L/M/P/S/T/V, 392A, 393A/F/G/H/M/Q/R/W/Y, 397G/N, 407V, 428F, 429L/S, 433A/G, 435Q, 436D/G, 481V, 487N, 488G, 489E/F/Q/R, 491E, 498A, 499C/L, 503S, 514L, 527A, 533R/V/Y, 534F/I/L/M, 535C/G/N, 536A/G/K/L/M/P/R/W, 538V, 543G/L/P/W, 550G, 551W, 555E/G/R/T, 558A/E/G/L/P/Q/R/S/T/V/W, 569T, 580S/Y, 581K/V, 584A, 610H/K/L/R/S/T, 611D/E, 612G/S/T, 613S, 614A/F/H/I/N/T, 615D/N, 616D/E/G/Q/W, 617D/E/G/N, 618C/E/G/P/Y, 619E, 620N/P, 621K/M/R/T/W, 622D, 643N, 646I, 650M, 665G, 667I, 676Q, 680L/R, 681A/C/E/F/G/L/N/R/Q/S/T/W, 682R, 683W, 684G/K, 686W, 693T, 696E, 698D/S/W/Y, 700A/E/Q/T/V, 706A/G/M/Y, 707H, 708A/K/T/V, 712G/L/M/Q/S/T/Y, 716K/L/W, 724I, 726A/L, 729T, 731I/L/R, 732C/D/E/G/L/R/W/K/M/Q/S/T/V/Y, 734I/R/S, 735D/S/V, 736F/G, 737F/G/K/L/M/N/S/V, 738A/D/E/F/H/K/N/P/R/S/T, 739G/P/R, 740G, 744A/R, 746P, 747D, 748F/G/K/N/S/V, 749A/C/D/F/G/I/K/L/M/P/Q/R/S/T/V/Y, 750A/D/G/K/M/N/P/Q/R/S/T/V/W, 751A/D/E/Y, 752D/E/F/G/L/M/Q/R/S/V, 753D, 754W, 755G/L/P/Q/S/Y, 756G/P/R/T, 757A/G/K/T, 759S, 770W, 773H, 775E/G/K/N/P/S/V, 785V, 786C/D/L, 787W, 790A/G/I/M/P/W, 791M/T, 792H/W/Y, 793G, 794R, 795C/N/S/T, 797C/G/P/Q/T/W/Y, 798C/R/T, 799A/E/G/M/P/Q/R/S/V, 800C/G/I/L/M/N/P/Q/R/T/V/W/Y, 801A/G/I/R, 802S/V, 805C/G/H/K/L/M/P/Q/R/S/V/W, 806E/G/R/S, 807C/L/P/R, 808K/S, 809A/C/G/I/K/L/N/Q/R/S/T/V/W, 810V, 811F, 812G/I/V, 815I, 816V/W, 817A/D, 818A/E/G/P/S/V/W, 819V, 821Q, 822S/T, 824W, 825L, 826G, 828K, 830M/V, 831W, 836G/R/V/W, 837G, 838G/T, 839A/G/K/P, 840G, 841W, 844H, 866A, 873L/Q/T, 879Q, 892T, 896L/V, 897G/K/R, 903E, 907D, 914V, 916C/E/I/K/L/M/Q/T, 917G, 918M/S, 919G, 921R/W, 922W, 923M, 924I/M/P/Q/W, 926T/V, 929A/Q/V, 938R/V, 939E/S, 945K, 948S, 951V, 968A/P, 999R, 1037H/M/N/P, 1040E, 1041G/H/N, 1042A/E/T, 1043E/R, 1049G/W, 1050E/P/Q/S/T, 1051E/H/K/R/S/W, 1053A/R, 1054C, 1076G/S, 1078S, 1080G/V, 1084L/N, 1088G/S, 1089F/S, 1092G, 1093A/E/G/M/N/P/Q/R/S/T/V/W/Y, 1094S, 1095G, 1098G, 1099G, 1100I/S, 1101G, 1104C/E, 1108M/S/V/W, 1109G, 1113F, 1114A/M, 1116A/G/I/L/R, 1127L/V, 1129P, 1138Q, 1145R, 1148A/C/E/L/M/N/Q/R/S, 1151S, 1156D/G/N/R, 1158N, 1160R, 1186E, 1192D, 1193A/E/G/I/L, 1194P, 1205L, 1210M/T/V/W, 1218A/G/L/M/P, 1220D/E/L/T, 1221G/S/T/V, 1222F, 1224P, 1229D, 1245R, 1248A/C/D/E/F/G/H/I/K/M/P/Q/R/S/T/W/Y, 1250A/P/S/T, 1259T, 1264L/R/W, 1269F, 1270V, 1274N/V, 1281H/K/P/Q/R/S, 1283E/H/L/S/T, 1292Y, 1297A, 1339C, 1352E, 1373S, 1377A/C/D/E/G/H/I/M/P/R/S/V/T/Y, 1378A/C/D/E, 1380A/G/W, 1389W, 1414A/C/D/E/G/H/N/P/T/W, 1422I, 1427Y, 1428G, 1439A/E/H/L/S/T, 1440A/C/E/G/S/T, 1442T, or 1452L, or combinations thereof, wherein the amino acid positions are relative to the reference sequence corresponding to SEQ ID NO: 2.

[0011] In some embodiments, the amino acid sequence of the recombinant factor VIII polypeptide comprises at least a substitution at amino acid position 63, 171, 212, 260, 306, 317, 320, 332, 387, 390, 393, 534, 558, 681, 732, 738, 749, 750, 775, 1148, 1248, 1377, or 1439, or combinations thereof, wherein the amino acid positions are relative to the reference sequence corresponding to SEQ ID NO: 2.

[0012] In some embodiments, the amino acid sequence of the recombinant factor VIII polypeptide comprises at least a substitution or amino acid residue 63C/E/F/G/H/I/K/L/M/N/Q/R/S/T/W/Y, 171A/D/E/F/H/K/N/M/P/Q/R/S/T/V/W/Y, 212A/F/G/L/K/M/N/P/R/S/V/Y, 260E/K/T, 306A/D/G/P/S/T, 318C/G/K/L/M/Q/R/T/V, 320G/I/L/P/Q/R/S/T/V, 332A/F/G/H/N/P/Q/R/T/V/W/Y, 387A/G/I/L/Q/R/S/T/V/W, 390A/E/G/L/M/P/S/T/V, 393A/F/G/H/M/Q/R/W/Y, 499C/L, 534I/F/L/M, 558A/E/G/L/P/Q/R/S/T/V/W, 681A/C/E/F/G/L/N/R/Q/S/T/W, 700A/E/Q/T/V, 732C/D/E/G/L/R/W/K/M/Q/S/T/V/Y, 738A/D/E/F/H/K/N/P/R/S/T/Y, 749A/C/D/F/G/I/K/L/M/P/Q/R/S/T/V/Y, 750A/D/G/K/M/N/P/Q/R/S/T/V/W, 752D/E/F/G/L/M/Q/R/S/V, 775E/G/K/N/P/S/V, 800C/G/I/L/M/N/P/Q/R/T/V/W/Y, 805C/G/H/K/L/M/P/Q/R/S/V/W, 809A/C/G/I/K/L/N/Q/R/S/T/V/W, 1093A/E/G/M/N/P/Q/R/S/T/V/W/Y, 1148A/C/E/L/M/N/Q/R/S, 1248A/C/D/E/F/G/H/I/K/M/P/Q/R/S/T/W/Y, 1377A/C/D/E/G/H/I/M/P/R/S/V/T/Y, 1414A/C/D/E/G/H/N/P/T/W, or 1439A/E/H/L/S/T, or combinations thereof, wherein the amino acid positions are relative to the reference sequence corresponding to SEQ ID NO: 2.

[0013] In some embodiments, the amino acid sequence of the recombinant factor VIII polypeptide comprises at least a substitution or substitution set at amino acid position(s) 1148, 85/708/1148, 798, 706, 171, 335, 63, 344, 428, 879, 59, 429, 205, 1264, 797, 1248, 873, 792, 708, 57, 96, 362, 1292, 346, 433, 65, 795, 684/798, 353, 332, 1259, 356, 436, 1245, 1145, 716, 56, 773, 734, 358, 729, 665, 359, 61, 1250, 726, 37/96/171/429/708/799/1148, 171/429/732/1148, 96/171, 171/919/1151, 171/792/797/799/1148, 171/569/1148, 96/171/429/792/797/799, 171/429/708/1422, 171/429, 321/362/732/797/799, 171/1100, 708/1148/1186, 429/724/732/1148, 171/362/795/797/799, 171/429/732, 96/171/643/797/799, 171/792/797/799, 503, 171/732, 1148/1193, 96/171/362/429/732/795/797, 334, 732, 351, 1377, 999, 306, 349, 257, 646, 435, or 58, wherein the positions are relative to the reference sequence corresponding to SEQ ID NO: 2.

[0014] In some embodiments, the amino acid sequence of the recombinant factor VIII polypeptide comprises at least a substitution or substitution set forth in Tables 4.1, 4.2, 5.1, 5.2, 6.1, 6.2, 7.1, 7.2, 8.1, 8.2, 9.1, 9.2, 10.1, 10.2, 11.1, and 15.1, wherein the amino acid positions are relative to the reference sequence corresponding to SEQ ID NO: 2.

[0015] In some embodiments, the recombinant factor VIII polypeptide comprises an amino acid sequence having at least 70%, 75%, 80%, 81%, 82%, 83%, 84%, 85%, 86%, 87%, 88%, 89%, 90%, 91%, 92%, 93%, 94%, 95%, 96%, 97%, 98%, or 99% or more sequence identity to the reference sequence corresponding to residues 20-1457 of SEQ ID NO: 252, 504, 706, 840, 1200, 1514, or 2072, or to the reference sequence corresponding to SEQ ID NO: 252, 504, 706, 840, 1200, 1514, or 2072.

[0016] In some embodiments, the recombinant factor VIII polypeptide comprises an amino acid sequence having at least 70%, 75%, 80%, 81%, 82%, 83%, 84%, 85%, 86%, 87%, 88%, 89%, 90%, 91%, 92%, 93%, 94%, 95%, 96%, 97%, 98%, or 99% or more sequence identity to a reference sequence corresponding to residues 20-1457 of an even-numbered SEQ ID NO. of SEQ ID NOs. 4-2346 and 2360-2870, or to a reference sequence corresponding to an even-numbered SEQ ID NO. of SEQ ID NOs. 4-2346 and 2350-2870.

[0017] In some embodiments, the recombinant factor VIII polypeptide comprises an amino acid sequence having at least 70%, 75%, 80%, 81%, 82%, 83%, 84%, 85%, 86%, 87%, 88%, 89%, 90%, 91%, 92%, 93%, 94%, 95%, 96%, 97%, 98%, or 99% or more sequence identity to the reference sequence corresponding to residues 20-1457 of SEQ ID NO: 252, 504, 706, 840, 1200, 1514, or 2072, or to the reference sequence corresponding to SEQ ID NO: 252, 504, 706, 840, 1200, 1514, or 2072, wherein the amino acid sequence comprises one or more substitutions relative to the reference sequence corresponding to residues 20-1457 of SEQ ID NO: 252, 504, 706, 840, 1200, 1514, or 2072, or relative to the reference sequence corresponding to SEQ ID NO: 252, 504, 706, 840, 1200, 1514, or 2072.

[0018] In some embodiments of the foregoing, the amino acid sequence of the recombinant factor VIII polypeptide comprises at least a substitution at amino acid position 13, 14, 15, 16, 17, 18, 19, 20, 21, 24, 37, 56, 57, 58, 59, 61, 63, 64, 65, 85, 96, 104, 110, 119, 127, 132, 158, 160, 164, 167, 168, 171, 175, 178, 186, 187, 205, 210, 211, 212, 215, 225, 246, 257, 260, 265, 281, 292, 294, 301, 303, 304, 306, 308, 310, 311, 312, 318, 320, 321, 325, 328, 332, 334, 335, 344, 346, 347, 349, 351, 353, 354, 355, 356, 358, 359, 362, 370, 387, 388, 390, 392, 393, 397, 407, 428, 429, 433, 435, 436, 481, 487, 488, 489, 491, 498, 499, 503, 514, 527, 533, 534, 535, 536, 538, 543, 550, 551, 555, 558, 569, 580, 581, 584, 610, 611, 612, 613, 614, 615, 616, 617, 618, 619, 620, 621, 622, 643, 646, 650, 665, 667, 676, 680, 681, 682, 683, 684, 686, 693, 696, 698, 700, 706, 707, 708, 712, 716, 724, 726, 729, 731, 732, 734, 735, 736, 737, 738, 739, 740, 744, 746, 747, 748, 749, 750, 751, 752, 753, 754, 755, 756, 757, 759, 770, 773, 775, 785, 786, 787, 790, 791, 792, 793, 794, 795, 797, 798, 799, 800, 801, 802, 805, 806, 807, 808, 809, 810, 811, 812, 815, 816, 817, 818, 819, 821, 822, 824, 825, 826, 828, 830, 831, 836, 837, 838, 839, 840, 841, 844, 866, 873, 879, 892, 896, 897, 903, 907, 914, 916, 917, 918, 919, 921, 922, 923, 924, 926, 929, 938, 939, 945, 948, 951, 968, 999, 1037, 1040, 1041, 1042, 1043, 1049, 1050, 1051, 1053, 1054, 1076, 1078, 1080, 1084, 1088, 1089, 1092, 1093, 1094, 1095, 1098, 1099, 1100, 1101, 1104, 1108, 1109, 1113, 1114, 1116, 1127, 1129, 1138, 1145, 1148, 1151, 1156, 1158, 1160, 1186, 1192, 1193, 1194, 1205, 1210, 1218, 1220, 1221, 1222, 1224, 1229, 1245, 1248, 1250, 1259, 1264, 1269, 1270, 1274, 1281, 1283, 1292, 1297, 1339, 1352, 1373, 1377, 1378, 1380, 1389, 1414, 1422, 1427, 1428, 1439, 1440, 1442, or 1452, or combinations thereof, wherein the amino acid positions are relative to the reference sequence corresponding to SEQ ID NO: 252, 504, 706, 840, 1200, 1514, or 2072.

[0019] In some embodiments, the amino acid sequence of the recombinant factor VIII polypeptide comprises at least a substitution or an amino acid residue 13G/Y, 14G/M/V, 15G/S, 16A/D/G/P/V, 17S/V, 18L/R, 19G, 20L, 21M, 24V, 37H, 56E/P, 57A/L/S/T/V, 58K, 59D/G/L/M/Q/R/S/V/W, 61Q/S, 63C/E/F/G/H/I/K/L/M/N/Q/R/S/T/W/Y, 64D/G, 65A, 85Q, 96I/L/R/V/W, 104S, 110H, 119G/V, 127V, 132P/R, 158G, 160E/T, 164E, 167G/H/R, 168G/R, 171A/D/E/F/H/K/N/M/P/Q/R/S/T/V/W/Y, 175A/G/H, 178C/M/Q/V/W, 186A, 187C/G, 205R, 210P, 211G/K/P/Q/R, 212A/F/G/L/K/M/N/P/R/S/V/Y, 215E/P/S, 225R, 246D, 257I, 260E/K/T, 265R/S/W, 281A/S, 292D, 294G, 301K/M, 303G/T, 304A/E/G, 306A/D/G/P/S/T, 308P, 310G/V, 311E/G, 312L, 318C/G/K/L/M/Q/R/T/V, 320G/I/L/P/Q/R/S/T/V, 321Y, 325Y, 328G/Q/S, 332A/F/G/H/N/P/Q/R/T/V/W/Y, 334G, 335E/P, 344A/E/L, 346R/V, 347N, 349G, 351S, 353S, 354R, 355C, 356L/N, 358K/S, 359E/G, 362E/G/N/P/T/V/W, 370A, 387A/G/I/L/Q/R/S/T/V/W, 388A/P, 390A/E/G/L/M/P/S/T/V, 392A, 393A/F/G/H/M/Q/R/W/Y, 397G/N, 407V, 428F, 429L/S, 433A/G, 435Q, 436D/G, 481V, 487N, 488G, 489E/F/Q/R, 491E, 498A, 499C/L, 503S, 514L, 527A, 533R/V/Y, 534I/F/L/M, 535C/G/N, 536A/G/K/L/M/P/R/W, 538V, 543G/L/P/W, 550G, 551W, 555E/G/R/T, 558A/E/G/L/P/Q/R/S/T/V/W, 569T, 580S/Y, 581K/V, 584A, 610H/K/L/R/S/T, 611D/E, 612G/S/T, 613S, 614A/F/H/I/N/T, 615D/N, 616D/E/G/Q/W, 617D/E/G/N, 618C/E/G/P/Y, 619E, 620N/P, 621K/M/R/T/W, 622D, 643N, 646I, 650M, 665G, 667I, 676Q, 680L/R, 681A/C/E/F/G/L/N/R/Q/S/T/W, 682R, 683W, 684G/K, 686W, 693T, 696E, 698D/S/W/Y, 700A/E/Q/T/V, 706A/G/M/Y, 707H, 708A/K/T/V, 712G/L/M/Q/S/T/Y, 716K/L/W, 724I, 726A/L, 729T, 731I/L/R, 732C/D/E/G/L/R/W/K/M/Q/S/T/V/Y, 734I/R/S, 735D/S/V, 736F/G, 737F/G/K/L/M/N/S/V, 738A/D/E/F/H/K/N/P/R/S/T/Y, 739G/P/R, 740G, 744A/R, 746P, 747D, 748F/G/K/N/S/V, 749A/C/D/F/G/I/K/L/M/P/Q/R/S/T/V/Y, 750A/D/G/K/M/N/P/Q/R/S/T/V/W, 751A/D/E/Y, 752D/E/F/G/L/M/Q/R/S/V, 753D, 754W, 755G/L/P/Q/S/Y, 756G/P/R/T, 757A/G/K/T, 759S, 770W, 773H, 775E/G/K/N/P/S/V, 785V, 786C/D/L, 787W, 790A/G/I/M/P/W, 791M/T, 792H/W/Y, 793G, 794R, 795C/N/S/T, 797C/G/P/Q/T/W/Y, 798C/R/T, 799A/E/G/M/P/Q/R/S/V, 800C/G/I/L/M/N/P/Q/R/T/V/W/Y, 801A/G/I/R, 802S/V, 805C/G/H/K/L/M/P/Q/R/S/V/W, 806E/G/R/S, 807C/L/P/R, 808K/S, 809A/C/G/I/K/L/N/Q/R/S/T/V/W, 810V, 811F, 812G/I/V, 815I, 816V/W, 817A/D, 818A/E/G/P/S/V/W, 819V, 821Q, 822S/T, 824W, 825L, 826G, 828K, 830M/V, 831W, 836G/R/V/W, 837G, 838G/T, 839A/G/K/P, 840G, 841W, 844H, 866A, 873L/Q/T, 879Q, 892T, 896L/V, 897G/K/R, 903E, 907D, 914V, 916C/E/I/K/L/M/Q/T, 917G, 918M/S, 919G, 921R/W, 922W, 923M, 924I/M/P/Q/W, 926T/V, 929A/Q/V, 938R/V, 939E/S, 945K, 948S, 951V, 968A/P, 999R, 1037H/M/N/P, 1040E, 1041G/H/N, 1042A/E/T, 1043E/R, 1049G/W, 1050E/P/Q/S/T, 1051E/H/K/R/S/W, 1053A/R, 1054C, 1076G/S, 1078S, 1080G/V, 1084L/N, 1088G/S, 1089F/S, 1092G, 1093A/E/G/M/N/P/Q/R/S/T/V/W/Y, 1094S, 1095G, 1098G, 1099G, 1100I/S, 1101G, 1104C/E, 1108M/S/V/W, 1109G, 1113F, 1114A/M, 1116A/G/I/L/R, 1127L/V, 1129P, 1138Q, 1145R, 1148A/C/E/L/M/N/Q/R/S, 1151S, 1156D/G/N/R, 1158N, 1160R, 1186E, 1192D, 1193A/E/G/I/L, 1194P, 1205L, 1210M/T/V/W, 1218A/G/L/M/P, 1220D/E/L/T, 1221G/S/T/V, 1222F, 1224P, 1229D, 1245R, 1248A/C/D/E/F/G/H/I/K/M/P/Q/R/S/T/W/Y, 1250A/P/S/T, 1259T, 1264L/R/W, 1269F, 1270V, 1274N/V, 1281H/K/P/Q/R/S, 1283E/H/L/S/T, 1292Y, 1297A, 1339C, 1352E, 1373S, 1377A/C/D/E/G/H/I/M/P/R/S/V/T/Y, 1378A/C/D/E, 1380A/G/W, 1389W, 1414A/C/D/E/G/H/N/P/T/W, 1422I, 1427Y, 1428G, 1439A/E/H/L/S/T, 1440A/C/E/G/S/T, 1442T, or 1452L, or combinations thereof, wherein the amino acid positions are relative to the reference sequence corresponding to SEQ ID NO: 252, 504, 706, 840, 1200, 1514, or 2072.

[0020] In some embodiments, the amino acid sequence of the recombinant factor VIII polypeptide comprises at least a substitution at amino acid position 63, 171, 212, 260, 306, 317, 320, 332, 387, 390, 393, 534, 558, 681, 732, 738, 749, 750, 775, 1148, 1248, 1377, or 1439, or combinations thereof, wherein the amino acid positions are relative to the reference sequence corresponding to SEQ ID NO: 252, 504, 706, 840, 1200, 1514, or 2072.

[0021] In some embodiments, the amino acid sequence of the recombinant factor VIII polypeptide comprises at least a substitution or amino acid residue 63C/E/F/G/H/I/K/L/M/N/Q/R/S/T/W/Y, 171A/D/E/F/H/K/N/M/P/Q/R/S/T/V/W/Y, 212A/F/G/L/K/M/N/P/R/S/V/Y, 260E/K/T, 306A/D/G/P/S/T, 318C/G/K/L/M/Q/R/T/V, 320G/I/L/P/Q/R/S/T/V, 332A/F/G/H/N/P/Q/R/T/V/W/Y, 387A/G/I/L/Q/R/S/T/V/W, 390A/E/G/L/M/P/S/T/V, 393A/F/G/H/M/Q/R/W/Y, 499C/L, 534I/F/L/M, 558A/E/G/L/P/Q/R/S/T/V/W, 681A/C/E/F/G/L/N/R/Q/S/T/W, 700A/E/Q/T/V, 732C/D/E/G/L/R/W/K/M/Q/S/T/V/Y, 738A/D/E/F/H/K/N/P/R/S/T/Y, 749A/C/D/F/G/I/K/L/M/P/Q/R/S/T/V/Y, 750A/D/G/K/M/N/P/Q/R/S/T/V/W, 752D/E/F/G/L/M/Q/R/S/V, 775E/G/K/N/P/S/V, 800C/G/I/L/M/N/P/Q/R/T/V/W/Y, 805C/G/H/K/L/M/P/Q/R/S/V/W, 809A/C/G/I/K/L/N/Q/R/S/T/V/W, 1093A/E/G/M/N/P/Q/R/S/T/V/W/Y, 1148A/C/E/L/M/N/Q/R/S, 1248A/C/D/E/F/G/H/I/K/M/P/Q/R/S/T/W/Y, 1377A/C/D/E/G/H/I/M/P/R/S/V/T/Y, 1414A/C/D/E/G/H/N/P/T/W, or 1439A/E/H/L/S/T, or combinations thereof, wherein the amino acid positions are relative to the reference sequence corresponding to SEQ ID NO: 252, 504, 706, 840, 1200, 1514, or 2072.

[0022] In some embodiments, the recombinant factor VIII comprises an amino acid sequence having at least 70%, 75%, 80%, 81%, 82%, 83%, 84%, 85%, 86%, 87%, 88%, 89%, 90%, 91%, 92%, 93%, 94%, 95%, 96%, 97%, 98%, or 99% or more sequence identity to the reference sequence corresponding to residues 20-1457 of SEQ ID NO: 252, or to the reference sequence corresponding to SEQ ID NO: 252, wherein the amino acid sequence comprises one or more substitutions relative to the reference sequence corresponding to residues 20-1457 of SEQ ID NO: 252, or relative to the reference sequence corresponding to SEQ ID NO: 252.

[0023] In some embodiments, the amino acid sequence of the recombinant factor VIII polypeptide comprises at least a substitution or substitution set at amino acid position(s) 1380, 388, 1043, 610, 1274, 1220, 1442, 1193, 621, 1054, 755, 1041, 748, 1049, 1221, 1051, 612, 1037, 616, 387, 489, 750, 1224, 618, 1050, 1053, 896, 897, 749, 260, 481, 613, 756, 63, 265, 752, 1218, 1378, 614, 1440, 1439, 1205, 1222, 1389, 1269, 390, 397/1218, 757, 1373, 346, 63/1248, 349, 306/355/1422, 1422, 306/346/708, 1148, 171/346/1248, 63/797/799/1248/1422, 171/799, 362, 1248, 171/306/346/999/1248, 171/1148, 734/799/1248/1422, 63/732, 63/171/306/346/732, 171, 171/1422, 63/362/732/799/1248, 999/1148/1422, 346/349, 306/349, 63/171/1148/1151, 306, 344/349/354/1250, 1250, 63/306/344/349/354/503/1248, 59/63/332/349/503/706/708, 63/306/344/349/354/706/1248, 59/63, 332/706/708/1248/1250, 503, 59/63/349/354, 59/349/708, 59/306/344/1248, 344/1248/1250, 708, 63/344/349, 59, 63/344/349/354, 706, 59/306/770, 63/347/354/1248, or 354/503, wherein the amino acid positions are relative to the reference sequence corresponding to SEQ ID NO: 252.

[0024] In some embodiments, the recombinant factor VIII polypeptide comprises an amino acid sequence having at least 70%, 75%, 80%, 81%, 82%, 83%, 84%, 85%, 86%, 87%, 88%, 89%, 90%, 91%, 92%, 93%, 94%, 95%, 96%, 97%, 98%, or 99% or more sequence identity to the reference sequence corresponding to residues 20-1457 of SEQ ID NO: 504, or to the reference sequence corresponding to SEQ ID NO: 504, wherein the amino acid sequence comprises one or more substitutions relative to the reference sequence corresponding to residues 20-1457 of SEQ ID NO: 504, or relative to the reference sequence corresponding to SEQ ID NO: 504.

[0025] In some embodiments, the amino acid sequence of the recombinant factor VIII polypeptide comprises at least a substitution or substitution set at amino acid position(s) 750, 1051, 260, 756, 1193, 332, 897, 387, 1037, 306/749, 1270, 489, 487, 488, 903, 171/1248/1440, 260/1148/1378, 171/260/387/750/1248, 171/260, 171/260/387/750/1051/1148, 171, 750/1051/1148, 171/260/756, 171/1248, 171/1148, 59, 1440, 332/750/1248, 756/1248, 1248, 171/387/1248/1440, 750/1440, 59/171/750, 171/1193/1248, 750/1148/1193/1440, 1148, 171/387/1051, 748, 306, 306/387/390/749/1220, 390, 306/390/1037, 306/612/749, 387/390/749, 63/390/503/749, 1220, 63/306, 749, 306/390/749/1037, 306/749/1220, 306/387/390/612/749/1037, or 328, wherein the amino acid positions are relative to the reference sequence corresponding to SEQ ID NO: 504.

[0026] In some embodiments, the recombinant factor VIII polypeptide comprises an amino acid sequence having at least 70%, 75%, 80%, 81%, 82%, 83%, 84%, 85%, 86%, 87%, 88%, 89%, 90%, 91%, 92%, 93%, 94%, 95%, 96%, 97%, 98%, or 99% or more sequence identity to the reference sequence corresponding to residues 20-1457 of SEQ ID NO: 706, or to the reference sequence corresponding to SEQ ID NO: 706, wherein the amino acid sequence comprises one or more substitutions relative to the reference sequence corresponding to residues 20-1457 of SEQ ID NO: 706, or relative to the reference sequence corresponding to SEQ ID NO: 706.

[0027] In some embodiments, the amino acid sequence of the recombinant factor VIII polypeptide comprises at least a substitution or substitution set at amino acid position(s) 1051, 1221, 1218, 387, 749/1218, 332, 897, 696, 816, 824, 826, 393, 825, 698, 332/387/390/1148, 328/387/749, 749, 306/328/332/390/1051/1193/1218, 63/306/332/1051/1148, 63/306/332/387/1051, 387/390/1051, 186/306/328/332/390/749/1051/1148/1193, 387/390/756/1051, 306/390/1051, 306/332/390/749, 306/387/390/1148, 306/328/332/387/390/749/1051/1148/1193, 332/387/390/749/1148, 387/390/749, 306/387/749/1051/1148, 387/749, 306/945/1051/1193/1221, 306/390/749/1051, 63/306/332/390, 306/387/390/749/1148/1193/1221, 306/332/387/390/749/1218, 63/306/332/390/1051/1148/1193/1218, 924, 755, 752, 751, 923, 797, 754, 793, 753, 922, 896, 938, 775, 732, 810, 747, 393/407, 819, 787, 802, 811, 392, or 397, wherein the amino acid positions are relative to the reference sequence corresponding to SEQ ID NO: 706.

[0028] In some embodiments, the recombinant factor VIII polypeptide comprises an amino acid sequence having at least 70%, 75%, 80%, 81%, 82%, 83%, 84%, 85%, 86%, 87%, 88%, 89%, 90%, 91%, 92%, 93%, 94%, 95%, 96%, 97%, 98%, or 99% or more sequence identity to the reference sequence corresponding to residues 20-1457 of SEQ ID NO: 840, or to the reference sequence corresponding to SEQ ID NO: 840, wherein the amino acid sequence comprises one or more substitutions relative to the reference sequence corresponding to residues 20-1457 of SEQ ID NOs: 840, or relative to the reference sequence corresponding to SEQ ID NO: 840.

[0029] In some embodiments, the amino acid sequence of the recombinant factor VIII polypeptide comprises at least a substitution or substitution set at amino acid position(s) 620, 491, 1229, 615, 1283, 822, 328, 212, 818, 555/684, 828, 550, 830, 839, 13, 14, 17, 836, 1210, 1281, 64, 682, 318, 20, 21, 325, 533, 19, 817, 831, 225, 1156, 393/747, 753, 393/732/751, 63/797, 622, 617, 907, 1040, 611, 488, 1192, 1194, 619, 16, 802, 211, 555, 536, 527, 841, 320, 837, 558, 914, 312, 681, 838, 15, 1427, 18, 683, 24, 534, 840, 1160, 551, 393, 393/747/752/811/819/923/1148, 393/751/775, 63/393/732/775/1148, 393/732/1148, 775/1148, 393/752/753/775/793/797, 393/923, 393/923/1148, 393/747/751, 393/747/753/775/1148, 752/923/1051, 63/775, 63/393/752/775/793/1051/1053, 752/753/775/793/819, 63/1051, 63/747/752/753/775/811/819/923/1051, 393/752/787, 751, 63/1148, 63/747/752/753/819/923/1148, 1148, 747/752/753/793/811, 63, 797/1148, 751/752/753/1051, 63/732/1051, 752/797/815/923/1051/1148, or 747/753, wherein the amino acid positions are relative to the reference sequence corresponding to SEQ ID NO: 840.

[0030] In some embodiments, the recombinant factor VIII polypeptide of comprises an amino acid sequence having at least 70%, 75%, 80%, 81%, 82%, 83%, 84%, 85%, 86%, 87%, 88%, 89%, 90%, 91%, 92%, 93%, 94%, 95%, 96%, 97%, 98%, or 99% or more sequence identity to the reference sequence corresponding to residues 20-1457 of SEQ ID NO: 1200, or to the reference sequence corresponding to SEQ ID NO: 1200, wherein the amino acid sequence comprises one or more substitutions relative to the reference sequence corresponding to residues 20-1457 of SEQ ID NOs: 1200, or relative to the reference sequence corresponding to SEQ ID NO: 1200.

[0031] In some embodiments, the amino acid sequence of the recombinant factor VIII polypeptide comprises at least a substitution or substitution set at amino acid position(s) 681, 622, 617, 558, 536, 211, 320, 839, 797, 533, 751, 303, 951, 164, 818, 807, 799, 735, 794, 926, 755, 921, 801, 1094, 968, 929, 924, 698, 168, 581, 916, 1428, 805, 1114, 311, 737, 693, 809, 757, 1099, 676, 740, 791, 211/536/622/681, 536/558, 211/536/555/617/732, 211/681/732, 211/536/555, 555, 211/536, 211/212, 211/536/617/681/732, 211/536/558/617/681, 555/732, 536/555/558/617/732, 536/617/681/732, 536/555, 536/622/681, 732, 212/320/533/617/681, 211/312/533/534/617/619/681/839, 212, 211/212/320/619/681/839, 797/839, 212/312/320/533/534/617/681, 558/619/681, 320/558/681, 212/320/534/619/681/797/839, 320/558/619/732/839, 211/212/312/534/558/619/681/732/839, 320/534/558/619/732/797, 558/617/619/681, 211/534/558/611/681, 211/320/617/619/681, 558/617/681/797, 320/534/619/732, 211/619/681, 211/212/534/558/619/732/839, 212/320/619/681/797/839, 212/320/611/839, 320/558/619/681, 312/533/617/681/797/839, 558/611/681, 312, 211/320/558/619/681/732/797/839, 320/558/732/797, 533/558/611/619/716/732/839, 312/681, 320/534/619/681, 211/320/533/536/619, 558/617/681/839, 212/320/534/558/681, 533/534/681/839, 212/534/619/681, 617/619/681, 211/212/320/558/617/681, 212/534/558/681/797, 212/320/534, 211/312/619, 212/312/619/839, 210/212/320/558/681, 212/312/534/681/797/839, 211/320/558/839, 294, 759, 538, or 1109, wherein the amino acid positions are relative to the reference sequence corresponding to SEQ ID NO: 1200.

[0032] In some embodiments, the recombinant factor VIII polypeptide comprises an amino acid sequence having at least 70%, 75%, 80%, 81%, 82%, 83%, 84%, 85%, 86%, 87%, 88%, 89%, 90%, 91%, 92%, 93%, 94%, 95%, 96%, 97%, 98%, or 99% or more sequence identity to the reference sequence corresponding to residues 20-1457 of SEQ ID NO: 1514, or to the reference sequence corresponding to SEQ ID NO: 1514, wherein the amino acid sequence comprises one or more substitutions relative to the reference sequence corresponding to residues 20-1457 of SEQ ID NOs: 1514, or to the reference sequence corresponding to SEQ ID NO: 1514.

[0033] In some embodiments, the amino acid sequence of the recombinant factor VIII polypeptide comprises at least a substitution or substitution set at amino acid position(s) 1042, 1041, 1051, 1283, 1281, 916, 187, 215, 178, 1050, 1210, 104, 615, 610, 536, 618, 621, 614, 110, 301, 1078, 812, 786, 127, 175, 1093, 1088, 650, 535, 806, 738, 700, 132, 1076, 1084, 498, 756, 1108, 746, 160, 543, 310, 584, 918, 1452, 790, 292, 800, 167, 892, 304, 1116, 752, 281, 917, 712, 1080, 806/1352, 1095, 744, 1098, 948, 119, 785, 1113, 667, 158, 580, 707, 731, 1100, 1089, 1092, 939, 1104, 736, 1297, 1127, 686, 1129, 1138, 786/821, 680, 1101, 808, 739, 308, 536/555/619/732/799/805, 555/619/801, 555/619/799, 619/799/801/805, 536/555/619/732/799, 799/805, 801, 246/619/799/801, 536/555/619, 619/839, 619/799/805, 536/801/805, 555/619/799/805, 619/801/805, 555/619, 536/619/801, 801/805, 536/619/799/805, 555/619/732/799/801/805, 749, 616, 611, 370/614, 1156, 1158, 555/681/737/799, 536/619/809/1109, 536/555/619/737/799/809/839/916/921, 916/1109, 536/619/681/799/916/1109, 555/619/681/807/1109, 555/619/681/737/799, 619/681/799/916/1109, 619/681, 555/921, 619/681/916, 555/619/681/799, 555, 732, 619/799, 619, 681, 555/916, 839, or 799, wherein the amino acid positions are relative to the reference sequence corresponding to SEQ ID NO: 1514.

[0034] In some embodiments, the recombinant factor VIII polypeptide comprises an amino acid sequence having at least 70%, 75%, 80%, 81%, 82%, 83%, 84%, 85%, 86%, 87%, 88%, 89%, 90%, 91%, 92%, 93%, 94%, 95%, 96%, 97%, 98%, or 99% or more sequence identity to the reference sequence corresponding to residues 20-1457 of SEQ ID NO: 2072, or to the reference sequence corresponding to SEQ ID NO: 2072, wherein the amino acid sequence comprises one or more substitutions relative to the reference sequence corresponding to residues 20-1457 of SEQ ID NO: 2072, or relative to the reference sequence corresponding to SEQ ID NO: 2072.

[0035] In some embodiments, the amino acid sequence of the recombinant factor VIII polypeptide comprises at least a substitution or substitution set at amino acid position(s) 167, 167/738/1076/1093, 167/738/752/800/805/808/809/1116, 167/800/809/1076, 167/318, 167/318/800/805/808/809, 167/318/681, 167/318/681/700/805/808/809/1076/1116, 167/318/700, 167, 167/738/1076/1093, 167/738/752/800/805/808/809/1116, 167/800/809/1076, 167/318, 167/318/800/805/808/809, 167/318/681, 167/318/681/700/805/808/809/1076/1116, 167/318/700, 167/318/700/1076, 167/318/700/738/739/1076, 167/681/738/800/808/809, 167/178/700/752/1093, 167/700, 167/700/738/739/1093, 167/700/738/752/1093, 167/700/738/752/805/808/809/1093/1116, 808/809, 1076, 738, 738/808/809, 738/1076, 738/739, 738/739/809, 738/739/809/1093/1116, 738/739/1093, 738/739/752/1093, 738/739/799/800/1093, 738/739/1116, 738/800, 738/1093, 738/752, 738/752/1093, 738/752/799, 738/799/809/1093, 738/799/1093, 739, 739/800/809, 800, 800/805/809, 809, 809/1093, 809/1093/1116, 809/1116, 318, 318/1076, 318/1076/1116, 318/739/805/808/809/1076, 318/499/700/738/809, 318/1093, 318/752/1093, 318/1116, 318/543/739, 318/543/681/752/1116, 318/543/1093, 318/700/738/1093/1414, 681, 681/738, 681/738/739/1093, 681/738/739/752/799/800/809/1116/1339, 681/738/739/1116, 681/738/800, 681/800/805/809, 681/809/1093, 681/752/1093, 681/752/1093, 681/700, 681/700/738/739/1093/1116, 681/700/809, 681/700/1093, 681/700/752/808/809/1093/1116, 681/700/752/1093, 681/700/844, 681/700/805/809, 1093, 1093/1116, 752, 752/1076, 752/800/809, 752/800/1093, 752/809, 752/866, 752/1093, 752/1116, 178/318/739/752/809/1076/1116, 178/318/800/809, 178/318/681/800/808/809/1076, 178/681, 178/681/738/1116, 178/752/809, 178/700/800/805/808/809, 178/805/809/866, 1116, 543, 543/738/739/809, 543/738/809/1093, 543/739/1093, 543/800/1093/1116, 543/809/1093, 543/809/1093/1116, 543/681/738/739/752/809/1093, 543/681/738/739/752/1093, 543/681/739/752/800/805/809/1093, 543/681/700/738/739/800/1093/1116, 543/681/700/738/739/805/808/809, 543/681/700/752, 543/681/700/752/809/1093, 543/1093, 543/700, 543/700/738/739/752/800/1093/1116, 543/700/809, 543/700/1093, 543/700/752, 543/700/752/800/1093, 543/700/752/809/1116, 543/700/752/1093, 700, 700/738/739/800/1093, 700/738/739/799/1093, 700/738/800/1093, 700/738/1116, 700/809, 700/809/1093, 700/1093, 700/1093/1116, 700/752, 700/752/808/809/1093/1116, 700/752/809/1093, 700/752/799/1116, 700/752/805/809/1093, 700/799/800, 700/1116, 700/805/808/809/1076, 514/543/681/805/808/809, 805/808/809, or 805/809/1116, wherein the amino acid positions are relative to the reference sequence corresponding to SEQ ID NO: 2072.

[0036] In some embodiments, the recombinant factor VIII polypeptide comprises an amino acid sequence having at least one substitution set forth in Tables 4.1, 4.2, 5.1, 5.2, 6.1, 6.2, 7.1, 7.2, 8.1, 8.2, 9.1, 9.2, 10.1, 10.2, 11.1, and 15.1, wherein the amino acid positions are relative to the reference sequence corresponding to SEQ ID NO: 2, 252, 504, 706, 840, 1200, 1514, or 2072.

[0037] In some embodiments, the recombinant factor VIII polypeptide comprises an amino acid sequence having at least a substitution or substitution set of a variant set forth in Tables 4.1, 4.2, 5.1, 5.2, 6.1, 6.2, 7.1, 7.2, 8.1, 8.2, 9.1, 9.2, 10.1, 10.2, 11.1, and 15.1, wherein the amino acid positions are relative to the reference sequence corresponding to SEQ ID NO: 2, 252, 504, 706, 840, 1200, 1514, or 2072.

[0038] In some embodiments, the recombinant factor VIII polypeptide comprises an amino acid sequence comprising residues 20-1457 of the sequence of an even numbered SEQ ID NO. set forth in Tables 4.1, 4.2, 5.1, 5.2, 6.1, 6.2, 7.1, 7.2, 8.1, 8.2, 9.1, 9.2, 10.1, 10.2, 11.1, and 15.1, or comprising the sequence of an even numbered SEQ ID NO. set forth in Tables 4.1, 4.2, 5.1, 5.2, 6.1, 6.2, 7.1, 7.2, 8.1, 8.2, 9.1, 9.2, 10.1, 10.2, 11.1, and 15.1.

[0039] In some embodiments, the recombinant factor VIII polypeptide comprises an amino acid sequence comprising residues 20-1457 of an even-numbered SEQ ID NO. of SEQ ID NOs: 4-2346 and 2360-2870, or comprising an even-numbered SEQ ID NO. of SEQ ID NOs: 4-2346 and 2350-2870. In some embodiments, the amino acid sequence of the recombinant factor VIII polypeptide optionally includes 1, 2, 3, 4, 5, 6, 7, 8, 9, or up to 10 amino acid substitutions. In some embodiments, the amino acid sequence of the recombinant factor VIII polypeptide optionally includes 1, 2, 3, 4, or 5 amino acid substitutions.

[0040] In some embodiments, the recombinant factor VIII polypeptide comprises an amino acid sequence comprising residues 20-1457 of SEQ ID NO: 252, 504, 706, 840, 1200, 1514, or 2072, or comprising SEQ ID NO: 252, 504, 706, 840, 1200, 1514, or 2072. In some embodiments, the amino acid sequence of the recombinant factor VIII polypeptide optionally includes 1, 2, 3, 4, 5, 6, 7, 8, 9, or up to 10 amino acid substitutions. In some embodiments, the amino acid sequence of the recombinant factor VIII polypeptide optionally includes 1, 2, 3, 4, or 5 amino acid substitutions.

[0041] In the embodiments herein, the recombinant factor VIII polypeptide has clotting activity. In some embodiments, the recombinant factor VIII polypeptide displays an improved property as compared to a reference factor VIII polypeptide. In some embodiments, the reference factor VIII polypeptide has a sequence corresponding to residues 20-1457 of SEQ ID NO: 2, 252, 504, 706, 840, 1200, 1514, or 2072, or a sequence corresponding to SEQ ID NO: 2, 252, 504, 706, 840, 1200, 1514, or 2072. In some embodiments, the reference factor VIII polypeptide has the sequence corresponding to residues 20-1457 of SEQ ID NO: 2, or the sequence corresponding to SEQ ID NO: 2.

[0042] In some embodiments, the recombinant factor VIII polypeptide described herein exhibits at least one improved property selected from: i) increased activity/potency; ii) increased clotting activity/potency; iii) increased stability to plasma or serum; iv) increased thermostability; v) reduced immunogenicity; vi) increased expression and/or secretion from cells that are transfected with an expression vector; vii) increased transduction and/or secretion from cells that are transduced with a gene therapy vector (e.g., AAV, mRNA, or lipid nanoparticle), or a combination of any of i), ii), iii), iv), v), vi), and vii), as compared to reference factor VIII polypeptide having a sequence corresponding to residues 20-1457 of SEQ ID NO: 2, 252, 504, 706, 840, 1200, 1514, or 2072, or having a sequence corresponding to SEQ ID NO: 2, 252, 504, 706, 840, 1200, 1514, or 2072. In some embodiments, the reference factor VIII polypeptide has the sequence corresponding to residues 20-1457 of SEQ ID NO: 2, or has the sequence corresponding to SEQ ID NO: 2.

[0043] In some embodiments, the recombinant factor VIII polypeptide comprises a “deimmunized” recombinant factor VIII polypeptide, such as provided in Tables 12-1 to 12-8 and 15-2.

[0044] In some further embodiments, the recombinant factor VIII is purified. In a further aspect, the present disclosure also provides functional or biologically active fragments of the recombinant factor VIII polypeptides disclosed herein.

[0045] In another aspect, the present disclosure further provides a recombinant polynucleotide encoding at least one recombinant factor VIII polypeptide, or a biologically active fragment thereof, described herein. In some embodiments, the polynucleotide is DNA, RNA, or mRNA.

[0046] In some embodiments, the recombinant polynucleotide comprises a polynucleotide sequence having at least 70%, 75%, 80%, 81%, 82%, 83%, 84%, 85%, 86%, 87%, 88%, 89%, 90%, 91%, 92%, 93%, 94%, 95%, 96%, 97%, 98%, or 99% or more sequence identity to a reference polynucleotide sequence corresponding to nucleotide residues 58-4371 of an odd-numbered SEQ ID NO. of SEQ ID NOs: 1-2345 and 2359-2869, or to a reference polynucleotide sequence corresponding to an odd-numbered SEQ ID NO. of SEQ ID NOs: 1-2345 and 2349-2869, wherein the recombinant polynucleotide encodes a recombinant factor VIII polypeptide.

[0047] In some embodiments, the recombinant polynucleotide comprises a polynucleotide sequence codon-optimized for expression in a host cell. In some embodiments, the recombinant polynucleotide comprises a polynucleotide sequence codon-optimized for expression in a mammalian cell, particularly a human cell.

[0048] In some embodiments, the recombinant polynucleotide comprises a polynucleotide sequence comprising nucleotide residues 58-4371 of an odd-numbered SEQ ID NO. of SEQ ID NOs: 1-2345 and 2359-2869, or comprising an odd-numbered SEQ ID NO. of SEQ ID NOs: 1-2345 and 2349-2869.

[0049] In some embodiments, the recombinant polynucleotide comprises a polynucleotide sequence comprising nucleotide residues 58-4371 of SEQ ID NO: 1, 251, 503, 705, 839, 1199, 1513, or 2071, or comprising SEQ ID NO: 1, 251, 503, 705, 839, 1199, 1513, or 2071.

[0050] In a further aspect, the present disclosure provides expression vectors comprising the recombinant polynucleotide encoding a recombinant factor VIII polypeptide as described herein. In some embodiments, the recombinant polynucleotide is operably linked to one or more control sequences. In some embodiments, the control sequence comprises a promoter. In some further embodiments, the promoter is a heterologous promoter.

[0051] In another aspect, the present disclosure provides a host cell comprising a recombinant polynucleotide encoding a recombinant factor VIII polypeptide. In some embodiments, the host cell is an eukaryotic cell or prokaryotic cell. In some embodiments, the host cell is a mammalian cell, particularly a human cell, such as a cultured human cell. In some embodiments, the host cell is a human stem cell.

[0052] In a further aspect, the present disclosure provides methods of producing a recombinant factor VIII polypeptide described herein, comprising culturing a host cell comprising a recombinant polynucleotide encoding a recombinant factor VIII polypeptide disclosed herein, under conditions such that the recombinant factor VIII polypeptide is produced. In some embodiments, the method further comprises the step of recovering the expressed recombinant factor VIII polypeptide, such as from the media or cells. In some embodiments, the method further comprises the step of purifying the expressed recombinant factor VIII polypeptide.

[0053] In another aspect, the present disclosure provides compositions comprising at least one recombinant factor VIII polypeptide described herein. In some embodiments, the recombinant factor VIII polypeptides are provided as a pharmaceutical composition. In some embodiments, the pharmaceutical compositions comprises a recombinant factor VIII polypeptide, and a pharmaceutically acceptable carrier and/or excipient. In some embodiments, the pharmaceutical composition is suitable for parenteral injection or infusion, particularly for administration to a human subject.

[0054] In some embodiments, the pharmaceutical compositions comprise at least one recombinant polynucleotide encoding a recombinant factor VIII polypeptide, particularly for use in gene therapy. In some embodiments, a composition for gene therapy comprises a recombinant polynucleotide encoding at least one of the recombinant factor VIII polypeptide described herein. In some embodiments, the gene therapy composition comprises a viral vector comprising a recombinant polynucleotide encoding the recombinant factor VIII polypeptide described herein.

[0055] In some embodiments, a gene therapy composition comprises a recombinant polynucleotide encoding at least one recombinant factor VIII polypeptides described herein, wherein the polynucleotide is formulated in liposomes, cationic polymers, or with dendrimers or attached to a cell penetrating peptide. In some embodiments, the recombinant polynucleotide of the gene therapy composition is provided as an expression vector for expression in mammalian cells.

[0056] In another aspect, the recombinant factor VIII polypeptides and the corresponding recombinant polynucleotides encoding the recombinant factor VIII polypeptides are useful in therapeutic applications for treating conditions or diseases characterized by a deficiency in factor VIII. In some embodiments, a method for treating and/or preventing symptoms of a deficiency in factor VIII in a subject comprises administering to a subject having a deficiency in factor VIII an effective amount of a recombinant factor VIII polypeptide or a pharmaceutical composition comprising the recombinant factor VIII polypeptide. In some embodiments, a method for treating and/or preventing symptoms of deficiency in factor VIII in a subject comprises providing to a subject having a deficiency in factor VIII a gene therapy composition comprising a recombinant polynucleotide encoding a recombinant factor VIII polypeptide described herein.

[0057] In a further aspect, the present disclosure also provides use of a recombinant factor VIII polypeptide, or a pharmaceutical thereof, or a gene therapy composition comprising a recombinant polynucleotide encoding the recombinant factor VIII polypeptide, for the treatment of a deficiency in factor VIII in a subject. In some embodiments, use of the recombinant factor VIII polypeptide, or a gene therapy composition comprising a recombinant polynucleotide encoding the recombinant factor VIII polypeptide, is for the preparation of a medicament for treating a deficiency in factor VIII in a subject. In some embodiments, the method or use is for treating hemophilia A in a subject.

### BRIEF DESCRIPTION OF THE DRAWINGS

[0058] FIG. 1 shows percentage of 50 donors whose peripheral blood mononuclear cells (PBMCs) generated a CD4 T-cell response when incubated with peptides of recombinant factor VIII in a T-cell assay for examining immuogenicity.

[0059] FIG. 2 shows the results of a study in which recombinant factor VIII polypeptides were expressed using either Expi293F or HepG2 cultures and assessed for activity using a chromogenic assay (BIOPHEN™ FVIII:C, Aniara), before or after incubation with Hemophilia A patient plasma (George King Bio-Medical, Inc.). Activities are shown relative to SEQ ID NO: 1514.

[0060] FIG. 3 shows the results of a study in which truncated recombinant factor VIII polypeptides were expressed using either Expi293F cultures and assessed for activity using a chromogenic assay (BIOPHEN™ FVIII:C, Aniara). Activities are shown relative to SEQ ID NO: 2 on the left axis. Numbers of amino acids removed relative to SEQ ID NO: 2 are shown on the right axis.

[0061] FIG. 4 shows expression of recombinant factor VIII polypeptide variants in Expi293F cells as measured by ELISA.

[0062] FIG. 5 shows expression of recombinant factor VIII polypeptide variants in HepG2 cells as measured by ELISA.

[0063] FIG. 6 shows activity of recombinant factor VIII polypeptide variants expressed in Expi293F cells as measured by chromogenic assay of the conditioned media, before normalization with protein concentration determined by ELISA.

[0064] FIG. 7 shows activity of recombinant factor VIII polypeptide variants expressed in HepG2 cells as measured by chromogenic assay of the conditioned media, before normalization with protein concentration determined by ELISA.

[0065] FIG. 8 shows activity of recombinant factor VIII polypeptide variants expressed in Expi293F cells as measured by chromogenic assay of the conditioned media, after normalization with protein concentration determined by ELISA.

[0066] FIG. 9 shows activity of recombinant factor VIII polypeptide variants expressed in HepG2 cells as measured by chromogenic assay of the conditioned media, after normalization with protein concentration determined by ELISA.

[0067] FIG. 10 shows clotting activity measured using activated partial thromboplastin time assay of condition media of Expi293F cells expressing recombinant factor VIII polypeptide variants.

[0068] FIG. 11 shows residual activity as measured using a chromogenic assay of recombinant factor VIII polypeptide variants following exposure of the recombinant factor VIII polypeptide variants to plasma obtained from a Hemophilia A patient for different time periods.

### DESCRIPTION OF THE INVENTION

[0069] The present disclosure relates to recombinant factor VIII polypeptide (FVIII) variants and compositions thereof. The recombinant factor VIII polypeptide variants have been engineered to exhibit improved properties, such as improved activity, including blood clotting activity, improved cofactor potency, improved expression, increased thermostability, increased serum stability, increased plasma stability, and/or reduced immunogenicity. The present disclosure also provides use of the compositions comprising the recombinant factor VIII polypeptide variants or the polynucleotides encoding the recombinant factor VIII polypeptide variants for therapeutic applications.

[0070] It is to be understood that both the foregoing general description, including the drawings, and the following detailed description are exemplary and explanatory only and are not restrictive of this disclosure.

### Abbreviations and Definitions

[0071] Unless defined otherwise, all technical and scientific terms used herein generally have the same meaning as commonly understood by one of ordinary skill in the art to which this invention pertains. Generally, the nomenclature used herein and the laboratory procedures of cell culture, molecular genetics, microbiology, biochemistry, organic chemistry, analytical chemistry and nucleic acid chemistry described below are those well-known and commonly employed in the art. Such techniques are well-known and described in numerous texts and reference works well known to those of skill in the art. Standard techniques, or modifications thereof, are used for chemical syntheses and chemical analyses.

[0072] Although any suitable methods and materials similar or equivalent to those described herein find use in the practice of the present invention, some methods and materials are described herein. It is to be understood that this invention is not limited to the particular methodology, protocols, and reagents described, as these may vary, depending upon the context they are used by those of skill in the art. Accordingly, the terms defined immediately below are more fully described by reference to the application as a whole.

[0073] Also, as used herein, the singular “a”, “an,” and “the” include the plural references, unless the context clearly indicates otherwise.

[0074] Numeric ranges are inclusive of the numbers defining the range. Thus, every numerical range disclosed herein is intended to encompass every narrower numerical range that falls within such broader numerical range, as if such narrower numerical ranges were all expressly written herein. It is also intended that every maximum (or minimum) numerical limitation disclosed herein includes every lower (or higher) numerical limitation, as if such lower (or higher) numerical limitations were expressly written herein.

[0075] The term “about” means an acceptable error for a particular value. In some instances “about” means within 0.05%, 0.5%, 1.0%, or 2.0%, of a given value range. In some instances, “about” means within 1, 2, 3, or 4 standard deviations of a given value.

[0076] As used herein, the term “comprising” and its cognates are used in their inclusive sense (i.e., equivalent to the term “including” and its corresponding cognates).

[0077] It is also to be understood that where descriptions of various embodiments use the term “comprising,” those skilled in the art would understand that in some specific instances, an embodiment can be alternatively described using language “consisting essentially of” or “consisting of.”

[0078] Furthermore, the headings provided herein are not limitations of the various aspects or embodiments of the invention which can be had by reference to the application as a whole. Accordingly, the terms defined immediately below are more fully defined by reference to the application as a whole. Nonetheless, in order to facilitate understanding of the invention, a number of terms are defined below.

[0079] “ATCC” refers to the American Type Culture Collection whose biorepository collection includes genes and strains.

[0080] “NCBI” refers to National Center for Biological Information and the sequence databases provided therein.

[0081] 1 “Protein,” “polypeptide,” and “peptide” are used interchangeably herein to denote a polymer of at least two amino acids covalently linked by an amide bond, regardless of length or post-translational modification (e.g., glycosylation or phosphorylation).

[0082] “Mature protein” or “mature polypeptide” refers to the final processed biological protein or polypeptide or product.

[0083] “Pro-protein,” “pro-polypeptide,” or “pro-peptide” refers to a precursor protein, polypeptide, or peptide that is processed by post-translational modification, to form a biologically active protein, polypeptide, or peptide. In some embodiments, the post translational modification is a cleavage reaction to form the protein, polypeptide, or peptide.

[0084] “Pre-pro-protein,” “pre-pro-polypeptide,” or “pre-pro-peptide” refers to a precursor protein, polypeptide, or peptide that includes a signal sequence or signal peptide, and which can be processed by posttranslational modification, in particular a cleavage reaction, to generate a pro-protein, pro-polypeptide, or pro-peptide. Generally, a cleavage reaction removes a signal sequence or signal peptide to generate a pro-protein, pro-polypeptide, or pro-peptide.

[0085] “Full-length” in context of a protein or polypeptide refers to the protein or polypeptide which is not processed to alter the amino acid sequence of the entire protein or polypeptide. For example, a full-length protein is the entire protein encoded in the corresponding mRNA.

[0086] “Amino acids” are referred to herein by either their commonly known three-letter symbols or by the one-letter symbols recommended by IUPAC-IUB Biochemical Nomenclature Commission. The abbreviations used for the genetically encoded amino acids are conventional and are as follows: alanine (Ala or A), arginine (Arg or R), asparagine (Asn or N), aspartate (Asp or D), cysteine (Cys or C), glutamate (Glu or E), glutamine (Gln or Q), glycine (Gly or G), histidine (His or H), isoleucine (Ile or I), leucine (Leu or L), lysine (Lys or K), methionine (Met or M), phenylalanine (Phe or F), proline (Pro or P), serine (Ser or S), threonine (Thr or T), tryptophan (Trp or W), tyrosine (Tyr or Y), and valine (Val or V). When the three-letter abbreviations are used, unless specifically preceded by an “L” or a “D” or clear from the context in which the abbreviation is used, the amino acid may be in either the L- or D-configuration about α-carbon (C_{α}). For example, whereas “Ala” designates alanine without specifying the configuration about the α-carbon, “D-Ala” and “L-Ala” designate D-alanine and L-alanine, respectively. When polypeptide sequences are presented as a string of one-letter or three-letter abbreviations (or mixtures thereof), the sequences are presented in the amino (N) to carboxy (C) direction in accordance with common convention.

[0087] “Polynucleotide” is used herein to denote a polymer comprising at least two nucleotides where the nucleotides are either deoxyribonucleotides or ribonucleotides, or mixtures of deoxyribonucleotides and ribonucleotides. In some embodiments, the abbreviations used for the genetically encoding nucleosides are conventional and are as follow: adenosine (A); guanosine (G); cytidine (C); thymidine (T); and uridine (U). Unless specifically delineated, the abbreviated nucleosides may be either ribonucleosides or 2′-deoxyribonucleosides. The nucleosides may be specified as being either ribonucleosides or 2′-deoxyribonucleosides on an individual basis or on an aggregate basis. When nucleic acid sequences are presented as a string of one-letter abbreviations, the sequences are presented in the 5′ to 3′ direction in accordance with common convention, and the phosphates are not indicated. The term “DNA” refers to deoxyribonucleic acid. The term “RNA” refers to ribonucleic acid.

[0088] “Engineered,” “recombinant,” “non-naturally occurring,” and “variant,” when used with reference to a cell, a polynucleotide or a polypeptide refer to a material or a material corresponding to the natural or native form of the material that has been modified in a manner that would not otherwise exist in nature or is identical thereto but produced or derived from synthetic materials and/or by manipulation using recombinant techniques.

[0089] “Wild-type” and “naturally-occurring” refer to the form found in nature. For example, a wild-type polypeptide or polynucleotide sequence is a sequence present in an organism that can be isolated from a source in nature and which has not been intentionally modified by human manipulation.

[0090] “Coding sequence” refers to that part of a nucleic acid (e.g., a gene) that encodes an amino acid sequence of a protein or polypeptide.

[0091] 1 “Percent (%) sequence identity” is used herein to refer to comparisons among polynucleotides and polypeptides, and are determined by comparing two optimally aligned sequences over a comparison window, wherein the portion of the polynucleotide or polypeptide sequence in the comparison window may comprise additions or deletions (i.e., gaps) as compared to the reference sequence for optimal alignment of the two sequences. The percentage may be calculated by determining the number of positions at which the identical nucleic acid base or amino acid residue occurs in both sequences to yield the number of matched positions, dividing the number of matched positions by the total number of positions in the window of comparison and multiplying the result by 100 to yield the percentage of sequence identity. Alternatively, the percentage may be calculated by determining the number of positions at which either the identical nucleic acid base or amino acid residue occurs in both sequences or a nucleic acid base or amino acid residue is aligned with a gap to yield the number of matched positions, dividing the number of matched positions by the total number of positions in the window of comparison and multiplying the result by 100 to yield the percentage of sequence identity. Those of skill in the art appreciate that there are many established algorithms available to align two sequences. Optimal alignment of sequences for comparison can be conducted, e.g., by the local homology algorithm of Smith and Waterman (Smith and Waterman, Adv. Appl. Math., 1981, 2:482), by the homology alignment algorithm of Needleman and Wunsch (Needleman and Wunsch, J. Mol. Biol., 1970, 48:443), by the search for similarity method of Pearson and Lipman (Pearson and Lipman, Proc. Natl. Acad. Sci. USA, 1988, 85:2444), by computerized implementations of these algorithms (e.g., GAP, BESTFIT, FASTA, and TFASTA in the GCG Wisconsin Software Package), or by visual inspection, as known in the art. Examples of algorithms that are suitable for determining percent sequence identity and sequence similarity include, but are not limited to the BLAST and BLAST 2.0 algorithms, which are described by Altschul et al. (See, Altschul et al., J. Mol. Biol., 1990, 215:403-410; and Altschul et al., 1977, Nucleic Acids Res., 1977, 3389-3402, respectively). Software for performing BLAST analyses is publicly available through the National Center for Biotechnology Information website. This algorithm involves first identifying high scoring sequence pairs (HSPs) by identifying short words of length W in the query sequence, which either match or satisfy some positive-valued threshold score T when aligned with a word of the same length in a database sequence. T is referred to as, the neighborhood word score threshold (See, Altschul et al., supra). These initial neighborhood word hits act as seeds for initiating searches to find longer HSPs containing them. The word hits are then extended in both directions along each sequence for as far as the cumulative alignment score can be increased. Cumulative scores are calculated using, for nucleotide sequences, the parameters M (reward score for a pair of matching residues; always >0) and N (penalty score for mismatching residues; always <0). For amino acid sequences, a scoring matrix is used to calculate the cumulative score. Extension of the word hits in each direction are halted when: the cumulative alignment score falls off by the quantity X from its maximum achieved value; the cumulative score goes to zero or below, due to the accumulation of one or more negative-scoring residue alignments; or the end of either sequence is reached. The BLAST algorithm parameters W, T, and X determine the sensitivity and speed of the alignment. The BLASTN program (for nucleotide sequences) uses as defaults a wordlength (W) of 11, an expectation (E) of 10, M=5, N=−4, and a comparison of both strands. For amino acid sequences, the BLASTP program uses as defaults a wordlength (W) of 3, an expectation (E) of 10, and the BLOSUM62 scoring matrix (See, Henikoff and Henikoff, Proc. Natl. Acad. Sci. USA, 1989, 89:10915). Exemplary determination of sequence alignment and % sequence identity can employ the BESTFIT or GAP programs in the GCG Wisconsin Software package (Accelrys, Madison WI), using default parameters provided.

[0092] “Reference sequence” refers to a defined sequence used as a basis for a sequence comparison. A reference sequence may be a subset of a larger sequence, for example, a segment of a full-length gene or polypeptide sequence. Generally, a reference sequence is at least 20 nucleotide or amino acid residues in length, at least 25 residues in length, at least 50 residues in length, at least 100 residues in length or the full length of the nucleic acid or polypeptide. Since two polynucleotides or polypeptides may each (1) comprise a sequence (i.e., a portion of the complete sequence) that is similar between the two sequences, and (2) may further comprise a sequence that is divergent between the two sequences, sequence comparisons between two (or more) polynucleotides or polypeptide are typically performed by comparing sequences of the two polynucleotides or polypeptides over a “comparison window” to identify and compare local regions of sequence similarity. In some embodiments, a “reference sequence” can be based on a primary amino acid sequence, where the reference sequence is a sequence that can have one or more changes in the primary sequence. “Comparison window” refers to a conceptual segment of at least about 20 contiguous nucleotide positions or amino acids residues wherein a sequence may be compared to a reference sequence of at least 20 contiguous nucleotides or amino acids and wherein the portion of the sequence in the comparison window may comprise additions or deletions (i.e., gaps) of 20 percent or less as compared to the reference sequence (which does not comprise additions or deletions) for optimal alignment of the two sequences. The comparison window can be longer than 20 contiguous residues, and includes, optionally 30, 40, 50, 100, or longer windows.

[0093] “Corresponding to”, “reference to” or “relative to” when used in the context of the numbering of a given amino acid or polynucleotide sequence refers to the numbering of the residues of a specified reference sequence when the given amino acid or polynucleotide sequence is compared to the reference sequence. In other words, the residue number or residue position of a given polymer is designated with respect to the reference sequence rather than by the actual numerical position of the residue within the given amino acid or polynucleotide sequence. For example, a given amino acid sequence, such as that of a recombinant factor VIII polypeptide, can be aligned to a reference sequence by introducing gaps to optimize residue matches between the two sequences. In these cases, although the gaps are present, the numbering of the residue in the given amino acid or polynucleotide sequence is made with respect to the reference sequence to which it has been aligned.

[0094] “Mutation” refers to the alteration of a nucleic acid sequence. In some embodiments, mutations result in changes to the encoded polypeptide sequence (i.e., as compared to the original sequence without the mutation). In some embodiments, the mutation comprises a substitution, such that a different amino acid is produced. In some alternative embodiments, the mutation comprises an addition, such that an amino acid is added (e.g., insertion) to the original polypeptide sequence. In some further embodiments, the mutation comprises a deletion, such that an amino acid is deleted from the original polypeptide sequence. Any number of mutations may be present in a given sequence.

[0095] “Amino acid difference” or “residue difference” refers to a difference in the amino acid residue at a position of a polypeptide sequence relative to the amino acid residue at a corresponding position in a reference sequence. The positions of amino acid differences generally are referred to herein as “Xn,” where n refers to the corresponding position in the reference sequence upon which the residue difference is based. For example, a “residue difference at position X59 as compared to SEQ ID NO: 2” refers to a difference of the amino acid residue at the polypeptide position corresponding to position 59 of SEQ ID NO: 2. Thus, if the reference polypeptide of SEQ ID NO: 2 has a phenylalanine at position 59, then a “residue difference at position X59 as compared to SEQ ID NO: 2” an amino acid substitution of any residue other than phenylalanine at the position of the polypeptide corresponding to position 59 of SEQ ID NO: 2. In some instances herein, the specific amino acid residue difference at a position is indicated as “XnY” where “Xn” specified the corresponding position as described above, and “Y” is the single letter identifier of the amino acid found in the engineered polypeptide (i.e., the different residue than in the reference polypeptide). In some instances (e.g., as shown in in Tables 4.1, 4.2, 5.1, 5.2, 6.1, 6.2, 7.1, 7.2, 8.1, 8.2, 9.1, 9.2, 10.1, 10.2, 11.1, and 15.1), the present disclosure also provides specific amino acid differences denoted by the conventional notation “AnB”, where A is the single letter identifier of the residue in the reference sequence, “n” is the number of the residue position in the reference sequence, and B is the single letter identifier of the residue substitution in the sequence of the engineered polypeptide. In some embodiments, the amino acid difference, e.g., a substitution, is denoted by the abbreviation “nB,” without the identifier for the residue in the reference sequence. In some embodiments, the phrase “an amino acid residue nB” denotes the presence of the amino residue in the engineered polypeptide, which may or may not be a substitution in context of a reference polypeptide.

[0096] In some instances, a polypeptide of the present disclosure can include one or more amino acid residue differences relative to a reference sequence, which is indicated by a list of the specified positions where residue differences are present relative to the reference sequence, as described below. In some embodiments, where more than one amino acid can be used in a specific residue position of a polypeptide, the various amino acid residues that can be used are separated by a “/” (e.g., X61Q/X61S or X61Q/S or 61Q/S).

[0097] “Amino acid substitution set” and “substitution set” refer to a group of amino acid substitutions within a polypeptide sequence. In some embodiments, substitution sets comprise 2, 3, 4, 5, 6, 7, 8, 9, 10, 11, 12, 13, 14, 15, or more amino acid substitutions. In some embodiments, a substitution set refers to the set of amino acid substitutions that is present in any of the variant polypeptides listed in any of the Tables in the Examples. In substitution sets, the individual substitutions are separated by a semicolon (“;”; e.g., Q96R;L171P or abbreviated 96R;171P) or slash (“/”; e.g., Q96R/L171P or abbreviated 96R/171P). In some embodiments, the “substitution” comprises the deletion of an amino acid, and can be denoted by “−” symbol.

[0098] “Conservative amino acid substitution” refers to a substitution of a residue with a different residue having a similar side chain, and thus typically involves substitution of the amino acid in the polypeptide with amino acids within the same or similar defined class of amino acids. By way of example and not limitation, an amino acid with an aliphatic side chain may be substituted with another aliphatic amino acid (e.g., alanine, valine, leucine, and isoleucine); an amino acid with hydroxyl side chain is substituted with another amino acid with a hydroxyl side chain (e.g., serine and threonine); an amino acids having aromatic side chains is substituted with another amino acid having an aromatic side chain (e.g., phenylalanine, tyrosine, tryptophan, and histidine); an amino acid with a basic side chain is substituted with another amino acid with a basis side chain (e.g., lysine and arginine); an amino acid with an acidic side chain is substituted with another amino acid with an acidic side chain (e.g., aspartic acid or glutamic acid); and/or a hydrophobic or hydrophilic amino acid is replaced with another hydrophobic or hydrophilic amino acid, respectively.

[0099] “Non-conservative substitution” refers to substitution of an amino acid in the polypeptide with an amino acid with significantly differing side chain properties. Non-conservative substitutions may use amino acids between, rather than within, the defined groups and affects (a) the structure of the peptide backbone in the area of the substitution (e.g., proline for glycine) (b) the charge or hydrophobicity, or (c) the bulk of the side chain. By way of example and not limitation, an exemplary non-conservative substitution can be an acidic amino acid substituted with a basic or aliphatic amino acid; an aromatic amino acid substituted with a small amino acid; and a hydrophilic amino acid substituted with a hydrophobic amino acid.

[0100] “Deletion” refers to modification to the polypeptide by removal of one or more amino acids from the reference polypeptide. Deletions can comprise removal of 1 or more amino acids, 2 or more amino acids, 5 or more amino acids, 10 or more amino acids, 15 or more amino acids, or 20 or more amino acids, up to 10% of the total number of amino acids, or up to 20% of the total number of amino acids making up the reference polypeptide while retaining activity and/or retaining the improved properties of an engineered polypeptide. Deletions can be directed to the internal portions and/or terminal portions of the polypeptide. In various embodiments, the deletion can comprise a continuous segment or can be discontinuous.

[0101] “Insertion” refers to modification to the polypeptide by addition of one or more amino acids from the reference polypeptide. Insertions can be in the internal portions of the polypeptide, or to the carboxy or amino terminus. Insertions as used herein include fusion proteins as is known in the art. The insertion can be a contiguous segment of amino acids or separated by one or more of the amino acids in the naturally occurring polypeptide.

[0102] “Functional fragment” or a “biologically active fragment” used interchangeably herein refers to a polypeptide that has an amino-terminal and/or carboxy-terminal deletion(s) and/or internal deletions, but where the remaining amino acid sequence is identical to the corresponding positions in the sequence to which it is being compared (e.g., a full-length recombinant factor VIII of the present disclosure) and that retains substantially all of the activity of the full-length polypeptide. In some embodiments, “functional fragment” or a “biologically active fragment” encompasses recombinant factor VIII processed into polypeptides by natural biological processes, such as cleavage into polypeptide fragments that form dimers and activated trimers.

[0103] “Isolated polypeptide” refers to a polypeptide which is substantially separated from other contaminants that naturally accompany it (e.g., protein, lipids, and polynucleotides). The term embraces polypeptides which have been removed or purified from their naturally-occurring environment or expression system (e.g., host cell or in vitro synthesis). The recombinant factor VIII polypeptides may be present within a cell, present in the cellular medium, or prepared in various forms, such as lysates or isolated preparations. As such, in some embodiments, the recombinant factor VIII polypeptides can be an isolated polypeptide.

[0104] “Substantially pure polypeptide” refers to a composition in which the polypeptide species is the predominant species present (i.e., on a molar or weight basis it is more abundant than any other individual macromolecular species in the composition), and is generally a substantially purified composition when the object species comprises at least about 50 percent of the macromolecular species present by mole or % weight. Generally, a substantially pure factor VIII composition comprises about 60% or more, about 70% or more, about 80% or more, about 90% or more, about 95% or more, and about 98% or more of all macromolecular species by mole or % weight present in the composition. In some embodiments, the object species is purified to essential homogeneity (i.e., contaminant species cannot be detected in the composition by conventional detection methods) wherein the composition consists essentially of a single macromolecular species. Solvent species, small molecules (<500 Daltons), and elemental ion species are not considered macromolecular species. In some embodiments, the isolated recombinant factor VIII polypeptides are substantially pure polypeptide compositions.

[0105] “Improved protein property” refers to a recombinant factor VIII polypeptide that exhibits an improvement in any protein property as compared to a reference factor VIII polypeptide and/or as a wild-type factor VIII polypeptide or another recombinant factor VIII polypeptide. Improved properties include, but are not limited to, such properties as increased gene expression, increased protein production, increased thermoactivity, increased thermostability, increased activity at various pH levels, increased stability, increased cofactor potency, increased specific activity, increased resistance to substrate and/or product inhibition, increased chemical stability, improved solvent stability, increased tolerance to acidic, neutral, or basic pH, increased tolerance to proteolytic activity (i.e., reduced sensitivity to proteolysis), reduced aggregation, increased solubility, reduced immunogenicity, increased secretion from polypeptide producing cells, etc.

[0106] “Increased activity”, “increased cofactor potency”, or “enhanced activity” refers to an improved property of the recombinant factor VIII polypeptides, which can be represented by an increase in specific activity (e.g., product produced/time/weight protein in combination with factor IX (FIX)) or an increase in percent conversion of the substrate to the product (e.g., percent conversion of starting amount of substrate to product in a specified time period using a specified amount of factor VIII in combination with FIX) as compared to the reference factor VIII polypeptide. Exemplary methods to determine protein activity are provided in the Examples. Any property relating to protein activity may be affected. Improvements in protein activity can be from about 1.1 fold the protein activity of the corresponding wild-type protein or a parent protein or polypeptide, to as much as 2-fold, 5-fold, 10-fold, 20-fold, 25-fold, 50-fold, 75-fold, 100-fold, 150-fold, 200-fold or more activity than the naturally occurring factor VIII or another recombinant factor VIII from which the factor VIII polypeptides were derived (e.g., B-domain deleted factor VIII).

[0107] “Improved tolerance to basic pH” means that a recombinant factor VIII according to the invention will have increased stability (e.g., higher retained activity at >pH 7 after exposure to basic pH for a specified period of time (1 hour, up to 24 hours)) as compared to a reference factor VIII or another recombinant factor VIII polypeptide.

[0108] “Physiological pH” as used herein means the pH range generally found in a subject's (e.g., human) blood. In some embodiments, “physiological pH” is about pH 7 to about 7.4.

[0109] “Basic pH” (e.g., used with reference to improved stability to basic pH conditions or increased tolerance to basic pH) means a pH range >pH 7, e.g., about 7 to 11.

[0110] “Acidic pH” (e.g., used with reference to improved stability to acidic pH conditions or increased tolerance to acidic pH) means a pH range of pH 7>, e.g., about 1.5 to 4.5.

[0111] “Deimmunized” as used herein, refers to the manipulation of a protein sequence to create a variant that is predicted to be not as immunogenic as the wild-type or reference protein. In some embodiments, the predicted deimmunization is complete, in that the variant protein is predicted to not stimulate an immune response in patients to whom the variant protein is administered. This response can be measured by various methods including but not limited to, the presence or abundance of anti-drug antibodies, the presence or abundance of neutralizing antibodies, the presence of an anaphylactic response, peptide presentation on major histocompatibility complex-II (MHC-II) proteins, or the prevalence or intensity of cytokine release upon administration of the protein. In some embodiments, the variant protein is less immunogenic than the wild-type or reference protein. In some embodiments, deimmunization involves modifications to subsequences of proteins (e.g., epitopes) that are recognized by human leukocyte antigen (HLA) receptors. In some embodiments, these epitopes are removed by changing their amino acid sequences to produce a deimmunized variant protein in which such subsequences are no longer recognized by the HLA receptors. In some other embodiments, these epitopes retain binding affinity to HLA receptors, but are not presented. In some embodiments, the deimmunized protein shows lower levels of response in biochemical and cell-biological predictors of human immunological responses including dendritic-cell T-cell activation assays, or (HLA) peptide binding assays. In some embodiments, these epitopes are removed by changing their amino acid sequence to produce a deimmunized variant protein in which the epitopes are no longer recognized by T-cell receptors. In still other embodiments the deimmunized protein induces anergy in its corresponding T-cells, activates T regulatory cells, or results in clonal deletion of recognizing B-cells. In some embodiments, a total immunogenicity score (TIS) reflects the overall predicted immunogenicity of the variant (i.e., a higher score indicates a higher level of predicted immunogenicity).

[0112] “Hybridization stringency” relates to hybridization conditions, such as washing conditions, in the hybridization of nucleic acids. Generally, hybridization reactions are performed under conditions of lower stringency, followed by washes of varying but higher stringency (see, e.g., Sambrook et al., Molecular Cloning: A Laboratory Manual, Cold Spring Harbor Laboratory Press, 2001). The term “moderately stringent hybridization” refers to conditions that permit target-DNA to bind a complementary nucleic acid that has about 60% identity, preferably about 75% identity, about 85% identity to the target DNA, with greater than about 90% identity to target-polynucleotide. Exemplary moderately stringent conditions are conditions equivalent to hybridization in 50% formamide, 5×Denhart's solution, 5×SSPE, 0.2% SDS at 42° C., followed by washing in 0.2×SSPE, 0.2% SDS, at 42° C. “High stringency hybridization” refers generally to conditions that are about 10° C. or less from the thermal melting temperature Tₘ as determined under the solution condition for a defined polynucleotide sequence. In some embodiments, a high stringency condition refers to conditions that permit hybridization of only those nucleic acid sequences that form stable hybrids in 0.018M NaCl at 65° C. (i.e., if a hybrid is not stable in 0.018M NaCl at 65° C., it will not be stable under high stringency conditions, as contemplated herein). High stringency conditions can be provided, for example, by hybridization in conditions equivalent to 50% formamide, 5×Denhart's solution, 5×SSPE, 0.2% SDS at 42° C., followed by washing in 0.1×SSPE, and 0.1% SDS at 65° C. Another high stringency condition is hybridizing in conditions equivalent to hybridizing in 5×SSC containing 0.1% (w:v) SDS at 65° C. and washing in 0.1×SSC containing 0.1% SDS at 65° C. Other high stringency hybridization conditions, as well as moderately stringent conditions, are described in the references cited herein.

[0113] “Codon optimized” refers to changes in the codons of the polynucleotide encoding a protein such that the encoded protein is more efficiently expressed in the organism and/or cells of interest. Although the genetic code is degenerate in that most amino acids are represented by several codons, called “synonyms” or “synonymous” codons, it is well known that codon usage by particular organisms is nonrandom and biased towards particular codon triplets. This codon usage bias may be higher in reference to a given gene, genes of common function or ancestral origin, highly expressed proteins versus low copy number proteins, and the aggregate protein coding regions of an organism's genome. In some embodiments, the polynucleotides encoding the factor VIII polypeptides may be codon optimized for optimal production from the host organism(s) and/or cell type(s) selected for expression, accounting for GC content, cryptic splice sites, transcription termination signals, motifs that may affect RNA stability, and nucleic acid secondary structures, as well as any other factors of interest.

[0114] “Control sequence” refers herein to include all components, which are necessary or advantageous for the expression of a polynucleotide and/or polypeptide of the present application. Each control sequence may be native or foreign to the nucleic acid sequence encoding the polypeptide. Such control sequences include, but are not limited to, a leader, polyadenylation sequence, pro-peptide sequence, promoter sequence, signal peptide sequence, initiation sequence and transcription terminator. In some instances, at a minimum the control sequences include a promoter, and transcriptional and translational stop signals.

[0115] “Operably linked” is defined herein as a configuration in which a control sequence is appropriately placed (i.e., in a functional relationship) at a position relative to a polynucleotide of interest such that the control sequence directs or regulates the expression of the polynucleotide and/or polypeptide of interest.

[0116] “Promoter sequence” refers to a nucleic acid sequence that is recognized by a host cell for expression of a polynucleotide of interest, such as a coding sequence. The promoter sequence contains transcriptional control sequences, which mediate the expression of a polynucleotide of interest. The promoter may be any nucleic acid sequence which shows transcriptional activity in the host cell of choice including mutant, truncated, and hybrid promoters, and may be obtained from genes encoding extracellular or intracellular polypeptides either homologous or heterologous to the host cell.

[0117] “Heterologous” or “recombinant” refers to the relationship between two or more nucleic acid or protein sequences (e.g., a promoter sequence, signal peptide, terminator sequence, etc.) that are derived from different sources and are not associated in nature.

[0118] “Suitable reaction conditions” refers to those conditions in the reaction solution (e.g., ranges of protein loading, temperature, pH, buffers, co-solvents, etc.) under which a factor VIII polypeptide of the present disclosure is capable of acting as a cofactor for factor IX to convert a substrate to the desired product compound. Exemplary “suitable reaction conditions” are provided in the present application and illustrated in the Examples.

[0119] “Protein loading” refers to the concentration or amount of a component in a reaction mixture at the start of the reaction. “Substrate” in the context of a reaction process involving factor VIII refers to the compound or molecule acted on by the factor VIII-factor IX polypeptide complex.

[0120] “Product” in the context of an enzymatic conversion process refers to the compound or molecule resulting from the action of the factor VIII-factor IX polypeptide complex on a substrate.

[0121] “Culturing” as used herein refers to the growing of a population of microbial, mammalian, or other suitable cells under any suitable conditions (e.g., using a liquid, gel or solid medium).

[0122] “Vector” refers to a polynucleotide construct for introducing a polynucleotide sequence into a cell. In some embodiments, the vector is an expression vector having a polynucleotide of interest operably linked to a suitable control sequence capable of effecting the expression in a suitable host of the polypeptide encoded in the polynucleotide sequence of interest. In some embodiments, an “expression vector” has a promoter sequence operably linked to the polynucleotide sequence (e.g., transgene) to drive expression in a host cell, and in some embodiments, also comprises a transcription terminator sequence.

[0123] “Gene therapy vector” as used herein refers to vehicles or carriers suitable for delivery of polynucleotide sequences to cells. In some embodiments, the vectors encapsulate genes (e.g., therapeutic genes) or polynucleotide sequences for delivery to cells or tissues, including but not limited to adenovirus (AV), adeno-associated virus (AAV), lentivirus (LV), and non-viral vectors, such as liposomes. It is not intended that the present invention be limited to any specific gene therapy vector, as any vehicle suitable for a given setting finds use herein. The gene therapy vector may be designed to deliver genes to a specific species or host, or may find more general applicability.

[0124] “Expression” as used herein includes any step involved in the production of the polypeptide including, but not limited to, transcription, post-transcriptional modification, translation, and post-translational modification. In some embodiments, the term also encompasses secretion of the polypeptide from a cell.

[0125] “Produces” as used herein refers to the production of proteins and/or other compounds by cells. It is intended that the term encompass any step involved in the production of polypeptides including, but not limited to, transcription, post-transcriptional modification, translation, and post-translational modification. In some embodiments, the term also encompasses secretion of the polypeptide from a cell.

[0126] “Host cell” and “host strain” refer to suitable hosts for expression vectors comprising a polynucleotide provided herein (e.g., the polynucleotides encoding the recombinant factor VIII variants). In some embodiments, the host cells are prokaryotic or eukaryotic cells that have been transformed or transfected with vectors constructed using recombinant DNA techniques as known in the art.

[0127] “Analogue” as used herein means a polypeptide having more than 70% sequence identity but less than 100% sequence identity (e.g., more than 75%, 78%, 80%, 83%, 85%, 88%, 90%, 91%, 92%, 93%, 94%, 95%, 96%, 97%, 98%, 99% sequence identity) with a reference polypeptide. In some embodiments, “analogues” means polypeptides that contain one or more non-naturally occurring amino acid residues including, but not limited, to homoarginine, ornithine and norvaline, as well as naturally occurring amino acids. In some embodiments, analogues also include one or more D-amino acid residues and non-peptide linkages between two or more amino acid residues.

[0128] “Therapeutic” as used herein refers to a compound or composition having beneficial or desirable medical effects administered to a subject who shows signs or symptoms of a disease or condition or pathology.

[0129] “Pharmaceutical composition” as used herein refers to a composition suitable for pharmaceutical use in a mammalian subject (e.g., human) comprising a pharmaceutically effective amount of a recombinant factor VIII polypeptide and an acceptable carrier and/or excipient.

[0130] “Composition” and “formulation” encompass products comprising at least one recombinant factor VIII of the present disclosure, intended for any suitable use (e.g., pharmaceutical compositions, etc.).

[0131] “Gene therapy” refers to the delivery of a gene, polydeoxyribonucleotide, or polynucleotide sequence(s) with a gene therapy vector to cells or tissues for the modification of those cells or tissues for the treatment or prevention of a disease. Gene therapy may include replacing a mutated gene that causes disease with a healthy copy of the gene; inactivating, or “knocking out,” a mutated gene that is functioning improperly; or providing a functional copy of a gene sufficient to treat and/or prevent the disease or condition. In some embodiments, gene therapy is used in the treatment of disease in patients.

[0132] “mRNA therapy” refers to the delivery of an mRNA polyribonucleotide to cells or tissues for the modification of those cells or tissues for the treatment or prevention of a disease. In some embodiments, the mRNA polynucleotides for delivery to cells or tissue, are formulated, for instance, but not limited to, in liposomes. In some embodiments, mRNA therapy is used in the treatment of a disease in patients.

[0133] “Cell therapy” refers to the delivery of living cells that have been modified exogenously to patients to provide a missing gene for the treatment or prevention of a disease. The modified cells are then reintroduced into the body.

[0134] “Effective amount” means an amount sufficient to produce the desired result. One of general skill in the art may determine what the effective amount by using routine experimentation.

[0135] “Subject” encompasses mammals such as humans, non-human primates, livestock, companion animals, and laboratory animals (e.g., rodents and lagamorphs). It is intended that the term encompass females as well as males.

[0136] “Patient” means any subject that is being assessed for, treated for, or is experiencing disease. In some embodiment, the patient is a human patient.

[0137] “Infant” refers to a child in the period of the first month afterbirth to approximately one (1) year of age. As used herein, the term “newborn” refers to child in the period from birth to the 28th day of life. The term “premature infant” refers to an infant born after the twentieth completed week of gestation, yet before full term, generally weighing ˜500 to ˜2499 grams at birth. A “very low birth weight infant” is an infant weighing less than 1500 g at birth.

[0138] “Child” refers to a person who has not attained the legal age for consent to treatment or research procedures. In some embodiments, the term refers to a person between the time of birth and adolescence.

[0139] “Adult” refers to a person who has attained legal age for the relevant jurisdiction (e.g., 18 years of age in the United States). In some embodiments, the term refers to any fully grown, mature organism. In some embodiments, the term “young adult” refers to a person less than 18 years of age, but who has reached sexual maturity.

[0140] “Administration” and “administering” a composition mean providing a composition of the present invention to a subject (e.g., to a person suffering from the effects of deficiency in factor VIII, such as hemophilia A).

[0141] “Pharmaceutically acceptable” means a material that can be administered to a subject without causing any undesirable biological effects or interacting in a deleterious manner with any of the components in which it is contained and that possesses the desired biological activity.

[0142] “Excipient” refers to any pharmaceutically acceptable additive, carrier, diluent, adjuvant, or other ingredient, other than the active pharmaceutical ingredient (API; e.g., the recombinant factor VIII polypeptides of the present disclosure). Excipients are typically included for formulation and/or administration purposes.

[0143] “Carrier” when used in reference to a pharmaceutical composition means any of the standard pharmaceutical carrier, buffers, and excipients, such as stabilizers, preservatives, and adjuvants.

[0144] “Therapeutically effective amount” when used in reference to symptoms of disease/condition refers to the amount and/or concentration of a compound (e.g., recombinant factor VIII polypeptides) that ameliorates, attenuates, or eliminates one or more symptom of a disease/condition or prevents or delays the onset of symptom(s). A “therapeutically effective amount” when used in reference to a disease or condition refers to the amount and/or concentration of a composition (e.g., recombinant factor VIII polypeptides) that ameliorates, attenuates, or eliminates the disease/condition. In some embodiments, the term is use in reference to the amount of a composition that elicits the biological (e.g., medical) response by a tissue, system, or animal subject that is sought by the researcher, physician, veterinarian, or other clinician.

[0145] “Treating” or “treatment” of a disease, disorder, or syndrome, as used herein, includes (i) preventing the disease, disorder, or syndrome from occurring in a subject, i.e., causing the clinical symptoms of the disease, disorder, or syndrome not to develop in an animal that may be exposed to or predisposed to the disease, disorder, or syndrome but does not yet experience or display symptoms of the disease, disorder, or syndrome; (ii) inhibiting the disease, disorder, or syndrome, i.e., arresting its development; and (iii) relieving the disease, disorder, or syndrome, i.e., causing regression of the disease, disorder, or syndrome. As such, the terms “treating,” “treat” and “treatment” encompass preventative (e.g., prophylactic), as well as palliative treatment. As is known in the art, adjustments for systemic versus localized delivery, age, body weight, general health, sex, diet, time of administration, drug interaction and the severity of the condition may be necessary, and will be ascertainable by one of ordinary skill in the art.

### Recombinant Factor VIII Polypeptides

[0146] As discussed above, blood clotting factor VIII (FVIII) is the cofactor to the activated clotting factor IX (e.g., FIXa), which in its proteolytically activated form interacts with FIXa to form a tight noncovalent complex that binds to and activates factor X (FX). Hemophilia A is a deficiency in factor VIII caused by missing or defective FVIII protein. Treatment of hemophilia A patients may include enzyme replacement therapy with preparations of factor VIII protein. Standard enzyme replacement therapy uses recombinantly expressed forms of the wild-type human factor VIII or B-domain deleted form of human factor VIII (e.g., XYNTHA® antihemophilic factor (recombinant); Wyeth Pharmaceuticals LLC). It is known that intravenously administered FVIII circulates in the bloodstream and restores blood clotting functions. However, these drugs do not completely relieve patient symptoms, as additional doses are needed after trauma or before surgery. In addition, the protein is relatively unstable and is cleared from the bloodstream within days. Thus, issues remain with available enzyme replacement treatments. In addition, patients may develop an immune response (IgG and IgE antibodies targeting the administered drug), and suffer severe allergic (anaphylactic) reactions, severe infusion reactions, and even death.

[0147] The recombinant factor VIII polypeptides, or biologically active fragments thereof disclosed herein, are intended to provide more stable and efficacious proteins suitable for treatment of hemophilia A, yet with reduced side effects and improved outcomes, as compared to currently available treatments. In some embodiments, the recombinant factor VIII polypeptides are characterized by increased stability in blood (pH 7.4), which the enzyme encounters upon introduction into the bloodstream and where the enzyme is active during therapy. The recombinant factor VIII polypeptides also display, among other properties, improved clotting function, and in some embodiments, reduced predicted immunogenicity (deimmunized).

[0148] The recombinant factor VIII polypeptides of the present disclosure are derived from a recombinant factor VIII with a deletion of the B-domain (SEQ ID NO: 2; see, e.g., US Patent Publication. No. 2017/0360900), where the B-domain deleted factor VIII is based on the naturally occurring factor VIII amino acid sequence. In brief, for purposes of explanation and not limitation, the factor VIII polypeptide is composed of five domains within the polypeptide: the signal peptide, the A1 domain, the A2 domain, the B domain, and the Light Chain domain. The recombinant factor VIII with a deletion of the B-domain represented by SEQ ID NO: 2 has identical signal peptide, A1, A2, and Light Chain domains to the wild-type human factor VIII, but has reduced the B domain to fourteen residues. In some embodiments, in the present disclosure, when a particular factor VIII variant is referred to by reference to amino acid differences in particular amino acids residues in the sequence of a B-domain deleted factor VIII or reference factor VIII polypeptide, it is to be understood that variants of another factor VIII polypeptide modified in the equivalent position(s) (as determined from the optional amino acid sequence alignment between the respective amino acid sequences) are encompassed herein.

[0149] Furthermore, the present disclosure also provides biologically active fragments of the recombinant factor VIII polypeptides variants disclosed herein. It is understood that factor VIII is biologically processed into polypeptide fragments. By way of example and not limitation, a factor VIII with the B-domain deletion may be processed by removal of signal sequence (e.g., amino acid residues 1-19) to yield a processed factor VIII (e.g., amino acid residues of about 20-1457). The factor VIII may next be processed to produce a polypeptide encoding dimerized human factor VIII (or variant thereof), the cleavage or cleavages occurring between residues 760 to 773 of SEQ ID NO: 2 and the polypeptide being devoid of some or all of an amino acid sequence corresponding to amino acids 760 to 773 of SEQ ID NO: 2. The factor VIII may be further processed to produce a polypeptide encoding trimerized human factor VIII (or variant thereof), the additional cleavage occurring between residues 391 and 392 of SEQ ID NO: 2 and the polypeptide being devoid of some or all of an amino acid sequence corresponding to amino acids 760 to 773 of SEQ ID NO: 2. Recombinant factor VIII polypeptide variants may or may not be processed the same as the B-domain deleted factor VIII having the naturally occurring sequences.

[0150] Accordingly, a reference to “biologically active” or “functionally active” fragment of the recombinant factor VIII polypeptide herein is meant to include the polypeptides formed by natural biological processing upon expression in a mammalian cell or patient, or upon administration of the recombinant factor VIII polypeptide to a patient, whether the “biologically active” or “functionally active” fragments are products from processing similar to the B-domain deleted factor VIII having the naturally occurring sequence or fragments that are the result of processing different from that of the B-domain deleted factor VIII having the naturally occurring sequence.

[0151] In one aspect, the present disclosure provides a recombinant factor VIII polypeptide, or a biologically active fragment thereof, comprising an amino acid sequence having at least 70%, 75%, 80%, 81%, 82%, 83%, 84%, 85%, 86%, 87%, 88%, 89%, 90%, 91%, 92%, 93%, 94%, 95%, 96%, 97%, 98%, or 99% sequence identity to a reference sequence corresponding to residues 20-1457 of SEQ ID NO: 2, 252, 504, 706, 840, 1200, 1514, or 2072, or to a reference sequence corresponding to SEQ ID NO: 2, 252, 504, 706, 840, 1200, 1514, or 2072, wherein the amino acid sequence comprises one or more substitutions relative to the reference sequence.

[0152] In some embodiments, the recombinant factor VIII polypeptide, or a biologically active fragment thereof, comprises an amino acid sequence having at least 70%, 75%, 80%, 81%, 82%, 83%, 84%, 85%, 86%, 87%, 88%, 89%, 90%, 91%, 92%, 93%, 94%, 95%, 96%, 97%, 98%, or 99% or more sequence identity to a reference sequence corresponding to residues 20-1457 of SEQ ID NO: 2, 252, 504, 706, 840, 1200, 1514, or 2072, or to a reference sequence corresponding to SEQ ID NO: 2, 252, 504, 706, 840, 1200, 1514, or 2072, wherein the amino acid sequence comprises one or more substitutions relative to the reference sequence corresponding to residues 20-1457 of SEQ ID NO: 2, 252, 504, 706, 840, 1200, 1514, or 2072, or relative to the reference sequence corresponding to SEQ ID NO: 2, 252, 504, 706, 840, 1200, 1514, or 2072.

[0153] In some embodiments, the recombinant factor VIII polypeptide, or a biologically active fragment thereof, comprises an amino acid sequence having at least 70%, 75%, 80%, 81%, 82%, 83%, 84%, 85%, 86%, 87%, 88%, 89%, 90%, 91%, 92%, 93%, 94%, 95%, 96%, 97%, 98%, or 99% or more sequence identity to the reference sequence corresponding to residues 20-1457 of SEQ ID NO: 2 or to the reference sequence corresponding to SEQ ID NO: 2, wherein the amino acid sequence comprises one or more substitutions relative to the reference sequence corresponding to residues 20-1457 of SEQ ID NO: 2, or relative to the reference sequence corresponding to SEQ ID NO: 2.

[0154] In some embodiments, the recombinant factor VIII polypeptide, or biologically active fragment thereof, comprises an amino acid sequence having at least 70%, 75%, 80%, 81%, 82%, 83%, 84%, 85%, 86%, 87%, 88%, 89%, 90%, 91%, 92%, 93%, 94%, 95%, 96%, 97%, 98%, or 99% or more sequence identity to the reference sequence corresponding to residues 20-1457 of SEQ ID NO: 252, 504, 706, 840, 1200, 1514, or 2072, or to the reference sequence corresponding to SEQ ID NO: 2, 252, 504, 706, 840, 1200, 1514, or 2072, wherein the amino acid sequence comprises one or more substitutions relative to the reference sequence corresponding to residues 20-1457 of SEQ ID NO: 2, or relative to the reference sequence corresponding to SEQ ID NO: 2.

[0155] In some embodiments, the recombinant factor VIII polypeptide, or biologically active fragment thereof, comprises an amino acid sequence having at least 70%, 75%, 80%, 81%, 82%, 83%, 84%, 85%, 86%, 87%, 88%, 89%, 90%, 91%, 92%, 93%, 94%, 95%, 96%, 97%, 98%, or 99% or more sequence identity to a reference sequence corresponding to residues 20-1457 of an even-numbered SEQ ID NO. of SEQ ID NOs. 4-2346 and 2360-2870, or to a reference sequence corresponding to an even-numbered SEQ ID NO. of SEQ ID NOs. 4-2346 and 2350-2870, wherein the amino acid sequence comprises one or more substitutions relative to the reference sequence corresponding to residues 20-1457 of SEQ ID NO: 2 or relative to the reference sequence corresponding to SEQ ID NO: 2.

[0156] In some embodiments, the amino acid sequence of the recombinant factor VIII polypeptide comprises at least a substitution at amino acid position 13, 14, 15, 16, 17, 18, 19, 20, 21, 24, 37, 56, 57, 58, 59, 61, 63, 64, 65, 85, 96, 104, 110, 119, 127, 132, 158, 160, 164, 167, 168, 171, 175, 178, 186, 187, 205, 210, 211, 212, 215, 225, 246, 257, 260, 265, 281, 292, 294, 301, 303, 304, 306, 308, 310, 311, 312, 318, 320, 321, 325, 328, 332, 334, 335, 344, 346, 347, 349, 351, 353, 354, 355, 356, 358, 359, 362, 370, 387, 388, 390, 392, 393, 397, 407, 428, 429, 433, 435, 436, 481, 487, 488, 489, 491, 498, 499, 503, 514, 527, 533, 534, 535, 536, 538, 543, 550, 551, 555, 558, 569, 580, 581, 584, 610, 611, 612, 613, 614, 615, 616, 617, 618, 619, 620, 621, 622, 643, 646, 650, 665, 667, 676, 680, 681, 682, 683, 684, 686, 693, 696, 698, 700, 706, 707, 708, 712, 716, 724, 726, 729, 731, 732, 734, 735, 736, 737, 738, 739, 740, 744, 746, 747, 748, 749, 750, 751, 752, 753, 754, 755, 756, 757, 759, 770, 773, 775, 785, 786, 787, 790, 791, 792, 793, 794, 795, 797, 798, 799, 800, 801, 802, 805, 806, 807, 808, 809, 810, 811, 812, 815, 816, 817, 818, 819, 821, 822, 824, 825, 826, 828, 830, 831, 836, 837, 838, 839, 840, 841, 844, 866, 873, 879, 892, 896, 897, 903, 907, 914, 916, 917, 918, 919, 921, 922, 923, 924, 926, 929, 938, 939, 945, 948, 951, 968, 999, 1037, 1040, 1041, 1042, 1043, 1049, 1050, 1051, 1053, 1054, 1076, 1078, 1080, 1084, 1088, 1089, 1092, 1093, 1094, 1095, 1098, 1099, 1100, 1101, 1104, 1108, 1109, 1113, 1114, 1116, 1127, 1129, 1138, 1145, 1148, 1151, 1156, 1158, 1160, 1186, 1192, 1193, 1194, 1205, 1210, 1218, 1220, 1221, 1222, 1224, 1229, 1245, 1248, 1250, 1259, 1264, 1269, 1270, 1274, 1281, 1283, 1292, 1297, 1339, 1352, 1373, 1377, 1378, 1380, 1389, 1414, 1422, 1427, 1428, 1439, 1440, 1442, or 1452, or combinations thereof, wherein the amino acid positions are relative to the reference sequence corresponding to SEQ ID NO: 2.

[0157] In some embodiments, the amino acid sequence of the recombinant factor VIII polypeptide comprises at least a substitution or amino acid residue 13G/Y, 14G/M/V, 15G/S, 16A/D/G/P/V, 17S/V, 18L/R, 19G, 20L, 21M, 24V, 37H, 56E/P, 57A/L/S/T/V, 58K, 59D/G/L/M/Q/R/S/V/W, 61Q/S, 63C/E/F/G/H/I/K/L/M/N/Q/R/S/T/W/Y, 64D/G, 65A, 85Q, 96I/L/R/V/W, 104S, 110H, 119G/V, 127V, 132P/R, 158G, 160E/T, 164E, 167G/H/R, 168G/R, 171A/D/E/F/H/K/N/M/P/Q/R/S/T/V/W/Y, 175A/G/H, 178C/M/Q/V/W, 186A, 187C/G, 205R, 210P, 211G/K/P/Q/R, 212A/F/G/K/L/M/N/P/R/S/V/Y, 215E/P/S, 225R, 246D, 257I, 260E/K/T, 265R/S/W, 281A/S, 292D, 294G, 301K/M, 303G/T, 304A/E/G, 306A/D/G/P/S/T, 308P, 310G/V, 311E/G, 312L, 318C/G/K/M/Q/R/T/V, 320G/I/L/P/Q/R/S/T/V, 321Y, 325Y, 328G/Q/S, 332A/F/G/H/N/P/Q/R/T/V/W/Y, 334G, 335E/P, 344A/E/L, 346R/V, 347N, 349G, 351S, 353S, 354R, 355C, 356L/N, 358K/S, 359E/G, 362E/G/N/P/T/V/W, 370A, 387A/G/I/L/Q/R/S/T/V/W, 388A/P, 390A/E/G/L/M/P/S/T/V, 392A, 393A/F/G/H/M/Q/R/W/Y, 397G/N, 407V, 428F, 429L/S, 433A/G, 435Q, 436D/G, 481V, 487N, 488G, 489E/F/Q/R, 491E, 498A, 499C/L, 503S, 514L, 527A, 533R/V/Y, 534F/I/L/M, 535C/G/N, 536A/G/K/L/M/P/R/W, 538V, 543G/L/P/W, 550G, 551W, 555E/G/R/T, 558A/E/G/L/P/Q/R/S/T/V/W, 569T, 580S/Y, 581K/V, 584A, 610H/K/L/R/S/T, 611D/E, 612G/S/T, 613S, 614A/F/H/I/N/T, 615D/N, 616D/E/G/Q/W, 617D/E/G/N, 618C/E/G/P/Y, 619E, 620N/P, 621K/M/R/T/W, 622D, 643N, 646I, 650M, 665G, 667I, 676Q, 680L/R, 681A/C/E/F/G/L/N/R/Q/S/T/W, 682R, 683W, 684G/K, 686W, 693T, 696E, 698D/S/W/Y, 700A/E/Q/T/V, 706A/G/M/Y, 707H, 708A/K/T/V, 712G/L/M/Q/S/T/Y, 716K/L/W, 724I, 726A/L, 729T, 731I/L/R, 732C/D/E/G/L/R/W/K/M/Q/S/T/V/Y, 734I/R/S, 735D/S/V, 736F/G, 737F/G/K/L/M/N/S/V, 738A/D/E/F/H/K/N/P/R/S/T, 739G/P/R, 740G, 744A/R, 746P, 747D, 748F/G/K/N/S/V, 749A/C/D/F/G/I/K/L/M/P/Q/R/S/T/V/Y, 750A/D/G/K/M/N/P/Q/R/S/T/V/W, 751A/D/E/Y, 752D/E/F/G/L/M/Q/R/S/V, 753D, 754W, 755G/L/P/Q/S/Y, 756G/P/R/T, 757A/G/K/T, 759S, 770W, 773H, 775E/G/K/N/P/S/V, 785V, 786C/D/L, 787W, 790A/G/I/M/P/W, 791M/T, 792H/W/Y, 793G, 794R, 795C/N/S/T, 797C/G/P/Q/T/W/Y, 798C/R/T, 799A/E/G/M/P/Q/R/S/V, 800C/G/I/L/M/N/P/Q/R/T/V/W/Y, 801A/G/I/R, 802S/V, 805C/G/H/K/L/M/P/Q/R/S/V/W, 806E/G/R/S, 807C/L/P/R, 808K/S, 809A/C/G/I/K/L/N/Q/R/S/T/V/W, 810V, 811F, 812G/I/V, 815I, 816V/W, 817A/D, 818A/E/G/P/S/V/W, 819V, 821Q, 822S/T, 824W, 825L, 826G, 828K, 830M/V, 831W, 836G/R/V/W, 837G, 838G/T, 839A/G/K/P, 840G, 841W, 844H, 866A, 873L/Q/T, 879Q, 892T, 896L/V, 897G/K/R, 903E, 907D, 914V, 916C/E/I/K/L/M/Q/T, 917G, 918M/S, 919G, 921R/W, 922W, 923M, 924I/M/P/Q/W, 926T/V, 929A/Q/V, 938R/V, 939E/S, 945K, 948S, 951V, 968A/P, 999R, 1037H/M/N/P, 1040E, 1041G/H/N, 1042A/E/T, 1043E/R, 1049G/W, 1050E/P/Q/S/T, 1051E/H/K/R/S/W, 1053A/R, 1054C, 1076G/S, 1078S, 1080G/V, 1084L/N, 1088G/S, 1089F/S, 1092G, 1093A/E/G/M/N/P/Q/R/S/T/V/W/Y, 1094S, 1095G, 1098G, 1099G, 1100I/S, 1101G, 1104C/E, 1108M/S/V/W, 1109G, 1113F, 1114A/M, 1116A/G/I/L/R, 1127L/V, 1129P, 1138Q, 1145R, 1148A/C/E/L/M/N/Q/R/S, 1151S, 1156D/G/N/R, 1158N, 1160R, 1186E, 1192D, 1193A/E/G/I/L, 1194P, 1205L, 1210M/T/V/W, 1218A/G/L/M/P, 1220D/E/L/T, 1221G/S/T/V, 1222F, 1224P, 1229D, 1245R, 1248A/C/D/E/F/G/H/I/K/M/P/Q/R/S/T/W/Y, 1250A/P/S/T, 1259T, 1264L/R/W, 1269F, 1270V, 1274N/V, 1281H/K/P/Q/R/S, 1283E/H/L/S/T, 1292Y, 1297A, 1339C, 1352E, 1373S, 1377A/C/D/E/G/H/I/M/P/R/S/V/T/Y, 1378A/C/D/E, 1380A/G/W, 1389W, 1414A/C/D/E/G/H/N/P/T/W, 1422I, 1427Y, 1428G, 1439A/E/H/L/S/T, 1440A/C/E/G/S/T, 1442T, or 1452L, or combinations thereof, wherein the amino acid positions are relative to the reference sequence corresponding to SEQ ID NO: 2.

[0158] In some embodiments, the amino acid sequence of the recombinant factor VIII polypeptide comprises at least a substitution L13G/Y, L14G/M/V, R15G/S, F16A/D/G/P/V, C17S/V, F18L/R, S19G, A20L, T21M, Y24V, Q37H, S56E/P, F57A/L/S/T/V, P58K, F59D/G/L/M/Q/R/S/V/W, T61Q/S, V63C/E/F/G/H/I/K/L/M/N/Q/R/S/T/W/Y, V64D/G, Y65A, P85Q, Q96I/L/R/V/W, V104S, M110H, A119G/V, A127V, E132P/R, Q158G, L160E/T, G164E, A167G/H/R, S168G/R, L171A/D/E/F/H/K/N/M/P/Q/R/S/T/V/W/Y, Y175A/G/H, L178C/M/Q/V/W, D186A, L187C/G, K205R, T210P, L211G/K/P/Q/R, H212A/F/G/L/K/M/N/P/R/S/V/Y, I215E/P/S, K225R, A246D, V257I, S260E/K/T, T265R/S/W, T281A/S, G292D, T294G, R301K/M, A303G/T, S304A/E/G, E306A/D/G/P/S/T, S308P, I310G/V, T311E/G, F312L, L318C/G/K/M/Q/R/T/V, M320G/I/L/P/Q/R/S/T/V, D321Y, F325Y, F328G/Q/S, S332A/F/G/H/N/P/Q/R/T/V/W/Y, H334G, Q335E/P, K344A/E/L, D346R/V, S347N, P349G, E351S, Q353S, L354R, R355C, M356L/N, N358K/S, N359E/G, A362E/G/N/P/T/V/W, T370A, F387A/G/I/L/Q/R/S/T/V/W, 1388A/P, I390A/E/G/L/M/P/S/T/V, S392A, V393A/F/G/H/M/Q/R/W/Y, H397G/N, A407V, S428F, Q429L/S, N433A/G, P435Q, Q436D/G, L481V, Q487N, A488G, S489E/F/Q/R, P491E, G498A, 1499C/L, R503S, V514L, I527A, T533R/V/Y, V534I/F/L/M, T535C/G/N, V536A/G/K/L/M/P/R/W, D538V, S543G/L/P/W, R550G, Y551W, F555E/G/R/T, M558A/E/G/L/P/Q/R/S/T/V/W, P569T, Q580S/Y, R581K/V, Q584A, I610H/K/L/R/S/T, Q611D/E, R612G/S/T, F613S, L614A/F/H/I/N/T, P615D/N, N616D/E/G/Q/W, P617D/E/G/N, A618C/E/G/P/Y, G619E, V620N/P, Q621K/M/R/T/W, L622D, S643N, L646I, L650M, T665G, F667I, T676Q, K680L/R, M681A/C/E/F/G/L/N/R/Q/S/T/W, V682R, Y683W, E684G/K, T686W, S693T, T696E, F698D/S/W/Y, S700A/E/Q/T/V, L706A/G/M/Y, W707H, I708A/K/T/V, H712G/L/M/Q/S/T/Y, F716K/L/W, L724I, K726A/L, S729T, D731I/L/R, K732C/D/E/G/L/R/W/K/M/Q/S/T/V/Y, T734I/R/S, G735D/SN, D736F/G, Y737F/G/K/L/M/N/S/V, Y738A/D/E/F/H/K/N/P/R/S/T, E739G/P/R, D740G, D744A/R, A746P, A747D, Y748F/G/K/N/S/V, L749A/C/D/F/G/I/K/L/M/P/Q/R/S/T/V/Y, L750A/D/G/K/M/N/P/Q/R/S/T/V/W, A751A/D/E/Y, K752D/E/F/G/L/M/Q/R/S/V, N753D, N754W, A755G/L/P/Q/S/Y, I756G/P/R/T, E757A/G/K/T, R759S, R770W, R773H, I775E/G/K/N/P/S/V, E785V, E786C/D/L, I787W, D790A/G/I/M/P/W, D791M/T, T792H/W/Y, I793G, S794R, Y795C/N/S/T, M797C/G/P/Q/T/W/Y, K798C/R/T, K799A/E/G/M/P/Q/R/S/V, E800C/G/I/L/M/N/P/Q/R/T/V/W/Y, D801A/G/I/R, F802SN, Y805C/G/H/K/L/M/P/Q/R/SN/W, D806E/G/R/S, E807C/L/P/R, D808K/S, E809A/C/G/I/K/L/N/Q/R/S/T/V/W, N810V, Q811F, S812G/I/V, S815I, F816V/W, Q817A/D, K818A/E/G/P/S/V/W, K819V, R821Q, H822S/T, F824W, I825L, A826G, V828K, R830M/V, L831W, M836G/R/V/W, S837G, S838G/T, S839A/G/K/P, P840G, H841W, R844H, G866A, Y873L/Q/T, E879Q, V892T, 1896L/V, M897G/K/R, Q903E, P907D, L914V, S916C/E/I/K/L/M/Q/T, Y917G, E918M/S, E919G, Q921R/W, R922W, Q923M, G924I/M/P/Q/W, E926T/V, K929A/Q/V, K938R/V, T939E/S, Q945K, M948S, T951V, L968A/P, Q999R, F1037H/M/N/P, N1040E, Y1041G/H/N, R1042A/E/T, F1043E/R, Y1049G/W, I1050E/P/Q/S/T, M1051E/H/K/R/S/W, T1053A/R, L1054C, E1076G/S, I1078S, S1080G/V, S1084L/N, F1088G/S, T1089F/S, K1092G, K1093A/E/G/M/N/P/Q/R/S/T/V/W/Y, E1094S, E1095G, M1098G, A1099G, L1100I/S, Y1101G, Y1104C/E, F1108M/S/V/W, E1109G, M1113F, L1114A/M, S1116A/G/I/L/R, I1127L/V, E1129P, L1138Q, K1145R, T1148A/C/E/L/M/N/Q/R/S, G1151S, H1156D/G/N/R, R1158N, F1160R, A1186E, P1192D, F1193A/E/G/I/L, S1194P, I1205L, K1210M/T/V/W, F1218A/G/L/M/P, S1220D/E/L/T, L1221G/S/T/V, Y1222F, S1224P, M1229D, T1245R, L1248A/C/D/E/F/G/H/I/K/M/P/Q/R/S/T/W/Y, V1250A/P/S/T, G1259T, I1264L/R/W, I1269F, I1270V, I1274N/V, Y1281H/K/P/Q/R/S, I1283E/H/L/S/T, M1292Y, N1297A, G1339C, K1352E, V1373S, L1377A/C/D/E/G/H/I/M/P/R/S/V/T/Y, T1378A/C/D/E, M1380A/G/W, S1389W, 51414A/C/D/E/G/H/N/P/T/W, L1422I, L1427Y, T1428G, V1439A/E/H/L/S/T, H1440A/C/E/G/S/T, I1442T, or E1452L, or combinations thereof, wherein the amino acid positions are relative to the reference sequence corresponding to SEQ ID NO: 2.

[0159] In some embodiments, the amino acid sequence of the recombinant factor VIII polypeptide comprises at least a substitution at amino acid position 63, 171, 212, 260, 306, 317, 320, 332, 387, 390, 393, 534, 558, 681, 732, 738, 749, 750, 775, 1148, 1248, 1377, or 1439, or combinations thereof, wherein the amino acid positions are relative to the reference sequence corresponding to SEQ ID NO: 2.

[0160] In some embodiments, the amino acid sequence of the recombinant factor VIII polypeptide comprises at least a substitution or amino acid residue 63C/E/F/G/H/I/K/L/M/N/Q/R/S/T/W/Y, 171A/D/E/F/H/K/N/M/P/Q/R/S/T/V/W/Y, 212A/F/G/L/K/M/N/P/R/S/V/Y, 260E/K/T, 306A/D/G/P/S/T, 318C/G/K/L/M/Q/R/T/V, 320G/I/L/P/Q/R/S/T/V, 332A/F/G/H/N/P/Q/R/T/V/W/Y, 387A/G/I/L/Q/R/S/T/V/W, 390A/E/G/L/M/P/S/T/V, 393A/F/G/H/M/Q/R/W/Y, 499C/L, 534I/F/L/M, 558A/E/G/L/P/Q/R/S/T/V/W, 681A/C/E/F/G/L/N/R/Q/S/T/W, 700A/E/Q/T/V, 732C/D/E/G/L/R/W/K/M/Q/S/T/V/Y, 738A/D/E/F/H/K/N/P/R/S/T/Y, 749A/C/D/F/G/I/K/L/M/P/Q/R/S/T/V/Y, 750A/D/G/K/M/N/P/Q/R/S/T/V/W, 752D/E/F/G/L/M/Q/R/S/V, 775E/G/K/N/P/S/V, 800C/G/I/L/M/N/P/Q/R/T/V/W/Y, 805C/G/H/K/L/M/P/Q/R/S/V/W, 809A/C/G/I/K/L/N/Q/R/S/T/V/W, 1093A/E/G/M/N/P/Q/R/S/T/V/W/Y, 1148A/C/E/L/M/N/Q/R/S, 1248A/C/D/E/F/G/H/I/K/M/P/Q/R/S/T/W/Y, 1377A/C/D/E/G/H/I/M/P/R/S/V/T/Y, 1414A/C/D/E/G/H/N/P/T/W, or 1439A/E/H/L/S/T, or combinations thereof, wherein the amino acid positions are relative to the reference sequence corresponding to SEQ ID NO: 2.

[0161] In some embodiments, the amino acid sequence of the recombinant factor VIII polypeptide comprises at least a substitution or amino acid residue 63Q, 171P, 212A, 260T, 306G, 317G, 320R, 332P, 387I, 390A, 393G, 534I, 558W, 681G, 732W, 7338E, 749F, 750D, 775G, 1148N, 1248D, 1377D, or 1439E, or combinations thereof, wherein the amino acid positions are relative to the reference sequence corresponding to SEQ ID NO: 2.

[0162] In some embodiments, the amino acid sequence of the recombinant factor VIII polypeptide comprises at least a substitution V63Q, L171P, H212A, S260T, E306G, L317G, M320R, S332P, F387I, 1390A, V393G, V534I, M558W, M681G, K732W, Y738E, L749F, L750D, 1775G, T1148N, L1248D, L1377D, or V1439E, or combinations thereof, wherein the amino acid positions are relative to the reference sequence corresponding to SEQ ID NO:2.

[0163] In some embodiments, the amino acid sequence of the recombinant factor VIII polypeptide comprises at least a substitution at position 1377. In some embodiments, the amino acid sequence of the recombinant factor VIII polypeptide comprises at least a substitution 1377D.

[0164] In some embodiments, the amino acid sequence of the recombinant factor VIII polypeptide comprises at least a substitution or substitution set at position 1439 or 1377/1439. In some embodiments, the amino acid sequence of the recombinant factor VIII polypeptide comprises at least a substitution or substitution set 1439E or 1377D/1439E.

[0165] In some embodiments, the amino acid sequence of the recombinant factor VIII polypeptide comprises at least a substitution or substitution set at position(s) 171, 260, 387, 750, 1248 or 171/260/387/750/1248. In some embodiments, the amino acid sequence of the recombinant factor VIII polypeptide comprises at least a substitution or substitution set 171P, 260T, 387I, 750D, 1248D or 171P/260T/387I/750D/1248D.

[0166] In some embodiments, the amino acid sequence of the recombinant factor VIII polypeptide comprises at least a substitution or substitution set at position(s) 306, 332, 390, 749 or 306/332/390/749. In some embodiments, the amino acid sequence of the recombinant factor VIII polypeptide comprises at least a substitution or substitution set 306G, 332P, 390A, 749F or 306G/332P/390A/749F.

[0167] In some embodiments, the amino acid sequence of the recombinant factor VIII polypeptide comprises at least a substitution or substitution set at position(s) 63, 393, 732, 775, 1148 or 63/393/732/775/1148. In some embodiments, the amino acid sequence of the recombinant factor VIII polypeptide comprises at least a substitution or substitution set 63Q, 393G, 732W, 775G, 1148N or 63Q/393G/732W/775G/1148N.

[0168] In some embodiments, the amino acid sequence of the recombinant factor VIII polypeptide comprises at least a substitution or substitution set at position(s) 212, 320, 534, 558, 681, or 212/320/534/558/681. In some embodiments, the amino acid sequence of the recombinant factor VIII polypeptide comprises at least a substitution or substitution set 212A, 320R, 534I, 558W, 681G, or 212A/320R/534I/558W/681G.

[0169] In some embodiments, the amino acid sequence of the recombinant factor VIII polypeptide comprises at least a substitution or substitution set at position(s) 317, 738, or 317/738. In some embodiments, the amino acid sequence of the recombinant factor VIII polypeptide comprises at least a substitution or substitution set 317G, 738E, or 317G/738E.

[0170] In some embodiments, the amino acid sequence of the recombinant factor VIII polypeptide comprises at least a substitution or substitution set at amino acid position(s) 1148, 85/708/1148, 798, 706, 171, 335, 63, 344, 428, 879, 59, 429, 205, 1264, 797, 1248, 873, 792, 708, 57, 96, 362, 1292, 346, 433, 65, 795, 684/798, 353, 332, 1259, 356, 436, 1245, 1145, 716, 56, 773, 734, 358, 729, 665, 359, 61, 1250, 726, 37/96/171/429/708/799/1148, 171/429/732/1148, 96/171, 171/919/1151, 171/792/797/799/1148, 171/569/1148, 96/171/429/792/797/799, 171/429/708/1422, 171/429, 321/362/732/797/799, 171/1100, 708/1148/1186, 429/724/732/1148, 171/362/795/797/799, 171/429/732, 96/171/643/797/799, 171/792/797/799, 503, 171/732, 1148/1193, 96/171/362/429/732/795/797, 334, 732, 351, 1377, 999, 306, 349, 257, 646, 435, or 58, wherein the positions are relative to the reference sequence corresponding to SEQ ID NO: 2.

[0171] In some embodiments, the amino acid sequence of the recombinant factor VIII polypeptide comprises at least a substitution or substitution set 1148N, 85Q/708T/1148N, 798T, 706G, 706A, 171Q, 335E, 63R, 344A, 428F, 879Q, 59L, 429S, 205R, 1264W, 797P, 1248S, 1264R, 873T, 792Y, 708K, 344L, 57V, 96L, 362W, 63G, 873L, 1292Y, 1148Q, 346V, 797G, 706Y, 1248R, 433A, 65A, 59W, 873Q, 795C, 684K/798R, 57L, 353S, 332Q, 708A, 1259T, 63M, 356L, 1248G, 1248P, 436G, 57A, 59S, 1245R, 59R, 96W, 797Y, 1145R, 436D, 716L, 56E, 773H, 734I, 358S, 335P, 59Q, 729T, 716K, 665G, 362T, 57T, 359G, 61S, 1250A, 362V, 359E, 716W, 332W, 708V, 63H, 797C, 61Q, 356N, 1250S, 798C, 433G, 795N, 96I, 56P, 63N, 792W, 1264L, 1250P, 332P, 59V, 726L, 37H/96R/171P/429L/708T/799R/1148N, 171P, 171P/429L/732R/1148N, 96R/171P, 171P/919G/1151S, 171P/792Y/797Q/799R/1148N, 171P/569T/1148N, 96R/171P/429L/792Y/797T/799R, 171P/429L/708T/1422I, 171P/429L, 321Y/362P/732E/797T/799R, 171P/1100I, 708T/1148N/1186E, 429L/724I/732E/1148N, 171P/362E/795T/797Q/799M, 171P/429L/732E, 96R/171P/643N/797T/799R, 171P/792Y/797T/799M, 503S, 171P/732E, 1148N/1193L, 96R/171P/362E/429L/732R/795T/797Q, 726A, 59M, 734R, 362N, 334G, 732G, 63Q, 351S, 1377D, 795S, 358K, 999R, 1250T, 306G, 349G, 1377G, 332F, 1377E, 257I, 646I, 346R, 435Q, 96V, 1377R, 1377S, 59G, 171M, 792H, 1248D, 306S, 706M, 171H, 1377A, 1377V, 734S, 1148R, 57S, 59D, 344E, 362G, or 58K, wherein the amino acid positions are relative to the reference sequence corresponding to SEQ ID NO: 2.

[0172] In some embodiments, the amino acid sequence of the recombinant factor VIII polypeptide comprises at least a substitution or substitution set T1148N, P85Q/1708T/T1148N, K798T, L706G, L706A, L171Q, Q335E, V63R, K344A, S428F, E879Q, F59L, Q429S, K205R, I1264W, M797P, L1248S, I1264R, Y873T, T792Y, I708K, K344L, F57V, Q96L, A362W, V63G, Y873L, M1292Y, T1148Q, D346V, M797G, L706Y, L1248R, N433A, Y65A, F59W, Y873Q, V795C, E684K/K798R, F57L, Q353S, S332Q, I708A, G1259T, V63M, M356L, L1248G, L1248P, Q436G, F57A, F59S, T1245R, F59R, Q96W, M797Y, K1145R, Q436D, F716L, S56E, R773H, T734I, N358S, Q335P, F59Q, S729T, F716K, T665G, A362T, F57T, N359G, T61S, V1250A, A362V, N359E, F716W, S332W, I708V, V63H, M797C, T61Q, M356N, V1250S, K798C, N433G, V795N, Q96I, S56P, V63N, T792W, I1264L, V1250P, S332P, F59V, K726L, Q37H/Q96R/L171P/Q429L/I708T/K799R/T1148N, L171P, L171P/Q429L/K732R/T1148N, Q96R/L171P, L171P/E919G/G1151S, L171P/T792Y/M797Q/K799R/T1148N, L171P/P569T/T1148N, Q96R/L171P/Q429L/T792Y/M797T/K799R, L171P/Q429L/I708T/L1422I, L171P/Q429L, D321Y/A362P/K732E/M797T/K799R, L171P/L1100I, I708T/T1148N/A1186E, Q429L/L724I/K732E/T1148N, L171P/A362E/V795T/M797Q/K799M, L171P/Q429L/K732E, Q96R/L171P/S643N/M797T/K799R, L171P/T792Y/M797T/K799M, R503S, L171P/K732E, T1148N/F1193L, Q96R/L171P/A362E/Q429L/K732R/V795T/M797Q, K726A, F59M, T734R, A362N, H334G, K732G, V63Q, E351S, L1377D, V795S, N358K, Q999R, V1250T, E306G, P349G, L1377G, S332F, L1377E, V257I, L646I, D346R, P435Q, Q96V, L1377R, L1377S, F59G, L171M, T792H, L1248D, E306S, L706M, L171H, L1377A, L1377V, T734S, T1148R, F57S, F59D, K344E, A362G, or P58K, wherein the amino acid positions are relative to the reference sequence corresponding to SEQ ID NO: 2.

[0173] In some embodiments, the amino acid sequence of the recombinant factor VIII polypeptide comprises at least a substitution or substitution set at amino acid position(s) 1377/1380, 388/1377, 1043/1377, 610/1377, 1274/1377, 1220/1377, 1377/1442, 1193/1377, 621/1377, 1054/1377, 755/1377, 1041/1377, 748/1377, 1049/1377, 1221/1377, 1051/1377, 612/1377, 1037/1377, 616/1377, 387/1377, 489/1377, 750/1377, 1224/1377, 618/1377, 1050/1377, 1053/1377, 896/1377, 897/1377, 749/1377, 260/1377, 481/1377, 613/1377, 756/1377, 63/1377, 265/1377, 752/1377, 1218/1377, 1377/1378, 614/1377, 1378/1377, 1440/1377, 1377/1440, 1377/1439, 1205/1377, 1222/1377, 1377/1389, 1269/1377, 390/1377, 397/1218/1377, 757/1377, 1373/1377, 346/1377, 63/1248/1377, 349/1377, 306/355/1377/1422, 1377/1422, 306/346/708/1377, 1148/1377, 171/346/1248/1377, 63/797/799/1248/1377/1422, 171/799/1377, 362/1377, 1248/1377, 171/306/346/999/1248/1377, 171/1148/1377, 734/799/1248/1377/1422, 63/732/1377, 63/171/306/346/732/1377, 171/1377, 171/1377/1422, 63/362/732/799/1248/1377, 999/1148/1377/1422, 346/349/1377, 306/349/1377, 63/171/1148/1377/1151, 306/1377, 344/349/354/1250/1377, 1250/1377, 63/306/344/349/354/503/1248/1377, 59/63/332/349/503/706/708/1377, 63/306/344/349/354/706/1248/1377, 59/63/1377, 332/706/708/1248/1250/1377, 503/1377, 59/63/349/354/1377, 59/349/708/1377, 59/306/344/1248/1377, 344/1248/1250/1377, 708/1377, 63/344/349/1377, 59/1377, 63/344/349/354/1377, 706/1377, 59/306/770/1377, 63/347/354/1248/1377, or 354/503/1377, wherein the amino acid positions are relative to the reference sequence corresponding to SEQ ID NO: 2.

[0174] In some embodiments, the amino acid sequence of the recombinant factor VIII polypeptide comprises at least a substitution or substitution set 1377D/1380W, 388A/1377D, 1043E/1377D, 1043R/1377D, 610R/1377D, 1274N/1377D, 1220T/1377D, 1377D/1442T, 1193L/1377D, 621T/1377D, 1054C/1377D, 755Q/1377D, 1041G/1377D, 748S/1377D, 1049G/1377D, 1221V/1377D, 1051E/1377D, 612G/1377D, 1037H1/1377D, 616E/1377D, 1041H/1377D, 387S/1377D, 489R/1377D, 621M/1377D, 489Q/1377D, 750G/1377D, 1224P/1377D, 618C/1377D, 616G/1377D, 612T/1377D, 1050Q/1377D, 1053A/1377D, 616W/1377D, 896V/1377D, 489F/1377D, 1050P/1377D, 897G/1377D, 749T/1377D, 1274V/1377D, 1220L/1377D, 260E/1377D, 481V/1377D, 613S/1377D, 387G/1377D, 621R/1377D, 756R/1377D, 63R/1377D, 265S/1377D, 1221T/1377D, 1377D/1380G, 752G/1377D, 748K/1377D, 755L/1377D, 1218A/1377D, 748N/1377D, 1377D/1378E, 614I/1377D, 749F/1377D, 387V/1377D, 750T/1377D, 1193G/1377D, 749V/1377D, 1378A/1377D, 750V/1377D, 387T/1377D, 387Q/1377D, 750A/1377D, 1037N/1377D, 1377D/1440A, 1051S/1377D, 1221G/1377D, 1377D/1378D, 1377D/1440S, 387R/1377D, 1193A/1377D, 387I/1377D, 1218M/1377D, 265W/1377D, 1377D/1440E, 1377D/1439L, 1377D/1440T, 612S/1377D, 1049W/1377D, 1221S/1377D, 1220D/1377D, 749G/1377D, 749S/1377D, 1218G/1377D, 1205L/1377D, 1222F/1377D, 1193E/1377D, 1050S/1377D, 1377D/1389W, 1377D/1439E, 260T/1377D, 1037P/1377D, 1051K/1377D, 1269F/1377D, 265R/1377D, 1051R/1377D, 1218L/1377D, 897R/1377D, 388P/1377D, 748G/1377D, 756P/1377D, 748F/1377D, 390A/1377D, 610L/1377D, 755G/1377D, 749R/1377D, 748V/1377D, 1377D/1380A, 1377D/1440C, 397N/F1218M/1377D, 1037M/1377D, 1218P/1377D, 757K/1377D, 1373S/1377D, 1377D/1440G, 1193I/1377D, 1377D/1439T, 750D/1377D, 390G/1377D, 756G/1377D, 1220E/1377D, 1377D/1378C, 618G/1377D, 346R/1377D, 63Q/1248D/1377D, 349G/1377D, 306G/355C/1377D/1422I, 1377D/1422I, 306G/346R/708T/1377D, 1148N/1377D, 171P/346R/1248D/1377D, 63Q/797T/799R/1248D/1377D/1422I, 171P/799R/1377D, 362P/1377D, 1248D/1377D, 63Q/1377D, 171P/306G/346R/999R/1248D/1377D, 171P/1148N/1377D, 734S/799R/1248D/1377D/1422I, 63Q/732E/1377D, 63Q/171P/306G/346R/732G/1377D, 171P/1377D, 171P/1377D/1422I, 63Q/362P/732G/799R/1248D/1377D, 999R/1148N/1377D/1422I, 346R/349G/1377D, 306G/349G/1377D, 63Q/171P/1148N/1377D/1151S, 306G/1377D, 344E/349G/354R/1250T/1377D, 63G/1377D, 1250T/1377D, 63R/306G/344E/349G/354R/503S/1248R/1377D, 59D/63S/332P/349G/503S/706M/708K/1377D, 63S/306G/344A/349G/354R/706M/1248R/1377D, 1248R/1377D, 59D/63G/1377D, 332P/706M/708K/1248R/1250T/1377D, 503S/1377D, 59D/63R/349G/354R/1377D, 59D/349G/708K/1377D, 59D/306G/344E/1248R/1377D, 344E/1248R/1250T/1377D, 708K/1377D, 63R/344E/349G/1377D, 59D/1377D, 63S/344A/349G/354R/1377D, 706M/1377D, 59D/306G/770W/1377D, 63G/347N/354R/1248R/1377D, or 354R/503S/1377D, wherein the amino acid positions are relative to the reference sequence corresponding to SEQ ID NO: 2.

[0175] In some embodiments, the amino acid sequence of the recombinant factor VIII polypeptide comprises at least a substitution or substitution set at amino acid position(s) 750/1377/1439, 1051/1377/1439, 260/1377/1439, 756/1377/1439, 1193/1377/1439, 332/1377/1439, 897/1377/1439, 387/1377/1439, 1037/1377/1439, 306/749/1377/1439, 1270/1377/1439, 489/1377/1439, 487/1377/1439, 488/1377/1439, 903/1377/1439, 171/1248/1377/1439/1440, 260/1148/1377/1378/1439, 171/260/387/750/1248/1377/1439, 171/260/1377/1439, 171/260/387/750/1051/1148/1377/1439, 171/1377/1439, 750/1051/1148/1377/1439, 171/260/756/1377/1439, 171/1248/1377/1439, 171/1148/1377/1439, 59/1377/1439, 1377/1439/1440, 332/750/1248/1377/1439, 756/1248/1377/1439, 1248/1377/1439, 171/387/1248/1377/1440/1439, 750/1377/1439/1440, 59/171/750/1377/1439, 171/1193/1248/1377/1439, 750/1148/1193/1377/1439/1440, 1148/1377/1439, 171/387/1051/1377/1439, 748/1377/1439, 306/1377/1439, 306/387/390/749/1220/1377/1439, 390/1377/1439, 306/390/1037/1377/1439, 306/612/749/1377/1439, 387/390/749/1377/1439, 63/390/503/749/1377/1439, 1220/1377/1439, 63/306/1377/1439, 749/1377/1439, 306/390/749/1037/1377/1439, 306/749/1220/1377/1439, 306/387/390/612/749/1037/1377/1439, or 328/1377/1439, wherein the amino acid positions are relative to the reference sequence corresponding to SEQ ID NO: 2.

[0176] In some embodiments, the amino acid sequence of the recombinant factor VIII polypeptide comprises at least a substitution or substitution set 750D/1377D/1439E, 1051K/1377D/1439E, 1051S/1377D/1439E, 260T/1377D/1439E, 756P/1377D/1439E, 1193A/1377D/1439E, 332P/1377D/1439E, 897R/1377D/1439E, 387Q/1377D/1439E, 1037N/1377D/1439E, 387R/1377D/1439E, 306G/749F/1377D/1439E, 1270V/1377D/1439E, 489E/1377D/1439E, 487N/1377D/1439E, 488G/1377D/1439E, 903E/1377D/1439E, 171P/1248D/1377D/1439E/1440T, 260T/1148N/1377D/1378D/1439E, 171P/260T/387I/750D/1248D/1377D/1439E, 171P/260T/1377D/1439E, 171P/260T/387I/750D/1051S/1148N/1377D/1439E, 171P/1377D/1439E, 750D/1051S/1148N/1377D/1439E, 171P/260T/756P/1377D/1439E, 171P/1248D/1377D/1439E, 171P/1148N/1377D/1439E, 387I/1377D/1439E, 59D/1377D/1439E, 1377D/1439E/1440S, 332P/750D/1248D/1377D/1439E, 756P/1248D/1377D/1439E, 1248D/1377D/1439E, 171P/387I/1248D/1377D/1440S/1439E, 750D/1377D/1439E/1440S, 59D/171P/750D/1377D/1439E, 171P/1193A/1248D/1377D/1439E, 750D/1148N/1193A/1377D/1439E/1440S, 1148N/1377D/1439E, 171P/387I I051K/1377D/1439E, 748G/1377D/1439E, 306G/1377D/1439E, 306G/387R/390A/749F/1220D/1377D/1439E, 390A/1377D/1439E, 306G/390A/1037N/1377D/1439E, 306G/612S/749F/1377D/1439E, 387V/390A/749F/1377D/1439E, 63S/390A/503S/749F/1377D/1439E, 387R/390A/749R/1377D/1439E, 1220D/1377D/1439E, 63S/306G/1377D/1439E, 749F/1377D/1439E, 306G/390A/749F/1037N/1377D/1439E, 387V/1377D/1439E, 306G/749F/1220D/1377D/1439E, 306G/387V/390A/612S/749F/1037N/1377D/1439E, or 328S/1377D/1439E wherein the amino acid positions are relative to the reference sequence corresponding to SEQ ID NO: 2.

[0177] In some embodiments, the amino acid sequence of the recombinant factor VIII polypeptide comprises at least a substitution or substitution set at amino acid position(s) 171/260/387/750/1051/1248/1377/1439, 171/260/387/750/1221/1248/1377/1439, 171/260/387/750/1218/1248/1377/1439, 171/260/387/750/1248/1377/1439, 171/260/387/749/750/1218/1248/1377/1439, 171/260/332/387/750/1248/1377/1439, 171/260/387/750/897/1248/1377/1439, 171/260/387/696/750/1248/1377/1439, 171/260/387/750/816/1248/1377/1439, 171/260/387/750/824/1248/1377/1439, 171/260/387/750/826/1248/1377/1439, 171/260/387/393/750/1248/1377/1439, 171/260/387/750/825/1248/1377/1439, 171/260/387/698/750/1248/1377/1439, 171/260/332/387/390/750/1148/1248/1377/1439, 171/260/328/387/749/750/1248/1377/1439, 171/260/387/749/750/1248/1377/1439, 171/260/306/328/332/387/390/750/1051/1193/1218/1248/1377/1439, 63/171/260/306/332/387/750/1051/1148/1248/1377/1439, 63/171/260/306/332/387/750/1051/1248/1377/1439, 171/260/387/390/750/1051/1248/1377/1439, 171/186/260/306/328/332/387/390/749/750/1051/1148/1193/1248/1377/1439, 171/260/387/390/750/756/1051/1248/1377/1439, 171/260/306/387/390/750/1051/1248/1377/1439, 171/260/306/332/387/390/749/750/1248/1377/1439, 171/260/306/387/390/750/1148/1248/1377/1439, 171/260/306/328/332/387/390/749/750/1051/1148/1193/1248/1377/1439, 171/260/332/387/390/749/750/1148/1248/1377/1439, 171/260/387/390/749/750/1248/1377/1439, 171/260/306/387/749/750/1051/1148/1248/1377/1439, 171/260/306/387/750/945/1051/1193/1221/1248/1377/1439, 171/260/306/387/390/749/750/1051/1248/1377/1439, 63/171/260/306/332/387/390/750/1248/1377/1439, 171/260/306/387/390/749/750/1148/1193/1221/1248/1377/1439, 171/260/306/332/387/390/749/750/1218/1248/1377/1439, 63/171/260/306/332/387/390/750/1051/1148/1193/1218/1248/1377/1439, 171/260/387/750/924/1248/1377/1439, 171/260/387/750/755/1248/1377/1439, 171/260/387/750/752/1248/1377/1439, 171/260/387/750/751/1248/1377/1439, 171/260/387/750/923/1248/1377/1439, 171/260/387/750/797/1248/1377/1439, 171/260/387/750/754/1248/1377/1439, 171/260/387/750/793/1248/1377/1439, 171/260/387/750/753/1248/1377/1439, 171/260/387/750/922/1248/1377/1439, 171/260/387/750/896/1248/1377/1439, 171/260/387/750/938/1248/1377/1439, 171/260/387/750/775/1248/1377/1439, 171/260/387/750/732/1248/1377/1439, 171/260/387/750/810/1248/1377/1439, 171/260/387/750/747/1248/1377/1439, 171/260/387/393/407/750/1248/1377/1439, 171/260/387/750/819/1248/1377/1439, 171/260/387/750/787/1248/1377/1439, 171/260/387/750/802/1248/1377/1439, 171/260/387/732/750/1248/1377/1439, 171/260/387/750/811/1248/1377/1439, 171/260/387/392/750/1248/1377/1439, or 171/260/387/397/750/1248/1377/1439, wherein the amino acid positions are relative to the reference sequence of SEQ ID NO: 2.

[0178] In some embodiments, the amino acid sequence of the recombinant factor VIII polypeptide comprises at least a substitution or substitution set 171P/260T/387I/750D/1051K/1248D/1377D/1439E, 171P/260T/387I/750D/1221G/1248D/1377D/1439E, 171P/260T/387I/750D/1218G/1248D/1377D/1439E, 171P/260T/387R/750D/1248D/1377D/1439E, 171P/260T/387I/750D/1051R/1248D/1377D/1439E, 171P/260T/387I/749F/750D/1218G/1248D/1377D/1439E, 171P/260T/387T/750D/1248D/1377D/1439E, 171P/260T/332P/387I/750D/1248D/1377D/1439E, 171P/260T/387I/750D/897K/1248D/1377D/1439E, 171P/260T/387I/696E/750D/1248D/1377D/1439E, 171P/260T/387I/750D/816W/1248D/1377D/1439E, 171P/260T/387I/750D/824W/1248D/1377D/1439E, 171P/260T/387I/750D/826G/1248D/1377D/1439E, 171P/260T/387I/393W/750D/1248D/1377D/1439E, 171P/260T/387I/750D/825L/1248D/1377D/1439E, 171P/260T/387I/750D/897R/1248D/1377D/1439E, 171P/260T/387I/750D/816V/1248D/1377D/1439E, 171P/260T/387I/698W/750D/1248D/1377D/1439E, 171P/260T/387I/393Q/750D/1248D/1377D/1439E, 171P/260T/332P/387R/390A/750D/1148N/1248D/1377D/1439E, 171P/260T/328S/387R/749F/750D/1248D/1377D/1439E, 171P/260T/387I/749F/750D/1248D/1377D/1439E, 171P/260T/306G/328S/332P/387I/390A/750D/1051R/1193A/1218G/1248D/1377D/1439E, 63Q/171P/260T/306G/332P/387I/750D/1051R/1148N/1248D/1377D/1439E, 63Q/171P/260T/306G/332P/387T/750D/1051K/1248D/1377D/1439E, 171P/260T/387T/390A/750D/1051R/1248D/1377D/1439E, 171P/186A/260T/306G/328S/332P/387I/390A/749F/750D/1051K/1148N/1193A/1248D/1377D/1439E, 171P/260T/387T/390A/750D/756P/1051R/1248D/1377D/1439E, 171P/260T/306G/387I/390A/750D/1051R/1248D/1377D/1439E, 171P/260T/306G/332P/387I/390A/749F/750D/1248D/1377D/1439E, 171P/260T/306G/387R/390A/750D/1148N/1248D/1377D/1439E, 171P/260T/306G/328S/332P/387T/390A/749F/750D/1051R/1148N/1193A/1248D/1377D/1439E, 171P/260T/332P/387R/390A/749F/750D/1148N/1248D/1377D/1439E, 171P/260T/387R/390A/749F/750D/1248D/1377D/1439E, 171P/260T/306G/387T/749F/750D/1051K/1148N/1248D/1377D/1439E, 171P/260T/387R/749F/750D/1248D/1377D/1439E, 171P/260T/306G/387I/750D/945K/1051R/1193A/1221G/1248D/1377D/1439E, 171P/260T/306G/387I/390A/749F/750D/1051K/1248D/1377D/1439E, 63Q/171P/260T/306G/332P/387I/390A/750D/1248D/1377D/1439E, 171P/260T/306G/387T/390A/749F/750D/1148N/1193A/1221G/1248D/1377D/1439E, 171P/260T/306G/332P/387R/390A/749F/750D/1218M/1248D/1377D/1439E, 63Q/171P/260T/306G/332P/387I/390A/750D/1051R/1148N/1193A/1218G/1248D/1377D/1439E, 171P/260T/387I/750D/924I/1248D/1377D/1439E, 171P/260T/387I/750D/755S/1248D/1377D/1439E, 171P/260T/387I/750D/752F/1248D/1377D/1439E, 171P/260T/387I/750D/S751Y/1248D/1377D/1439E, 171P/260T/387I/750D/923M/1248D/1377D/1439E, 171P/260T/387I/750D/797Y/1248D/1377D/1439E, 171P/260T/387I/750D/754W/1248D/1377D/1439E, 171P/260T/387I/750D/793G/1248D/1377D/1439E, 171P/260T/387I/750D/753D/1248D/1377D/1439E, 171P/260T/387I/750D/922W/1248D/1377D/1439E, 171P/260T/387I/750D/896L/1248D/1377D/1439E, 171P/260T/387I/750D/938R/1248D/1377D/1439E, 171P/260T/387I/750D/775G/1248D/1377D/1439E, 171P/260T/387I/750D/751E/1248D/1377D/1439E, 171P/260T/387I/750D/732W/1248D/1377D/1439E, 171P/260T/387I/750D/752G/1248D/1377D/1439E, 171P/260T/387I/750D/810V/1248D/1377D/1439E, 171P/260T/387I/750D/938V/1248D/1377D/1439E, 171P/260T/387I/750D/747D/1248D/1377D/1439E, 171P/260T/387I/750D/755G/1248D/1377D/1439E, 171P/260T/387I/393G/407V/750D/1248D/1377D/1439E, 171P/260T/387I/750D/797W/1248D/1377D/1439E, 171P/260T/387I/750D/819V/1248D/1377D/1439E, 171P/260T/387I/393G/750D/1248D/1377D/1439E, 171P/260T/387I/750D/787W/1248D/1377D/1439E, 171P/260T/387I/393R/750D/1248D/1377D/1439E, 171P/260T/387I/750D/802V/1248D/1377D/1439E, 171P/260T/387I/750D/775E/1248D/1377D/1439E, 171P/260T/387I/750D/924P/1248D/1377D/1439E, 171P/260T/387I/732G/750D/1248D/1377D/1439E, 171P/260T/387I/750D/811F/1248D/1377D/1439E, 171P/260T/387I/750D/802S/1248D/1377D/1439E, 171P/260T/387I/750D/752L/1248D/1377D/1439E, 171P/260T/387I/392A/750D/1248D/1377D/1439E, or 171P/260T/387I/397G/750D/1248D/1377D/1439E, wherein the amino acid positions are relative to the reference sequence corresponding to SEQ ID NO: 2.

[0179] In some embodiments, the amino acid sequence of the recombinant factor VIII polypeptide comprises at least a substitution or substitution set at amino acid position(s) 171/260/306/332/387/390/620/749/750/1248/1377/1439, 171/260/306/332/387/390/491/749/750/1248/1377/1439, 171/260/306/332/387/390/749/750/1229/1248/1377/1439, 171/260/306/332/387/390/615/749/750/1248/1377/1439, 171/260/306/332/387/390/749/750/1248/1283/1377/1439, 171/260/306/332/387/390/749/750/822/1248/1377/1439, 171/260/306/328/332/387/390/749/750/1248/1377/1439, 171/212/260/306/332/387/390/749/750/1248/1377/1439, 171/260/306/332/387/390/749/750/818/1248/1377/1439, 171/260/306/332/387/390/555/684/749/750/1248/1377/1439, 171/260/306/332/387/390/749/750/828/1248/1377/1439, 171/260/306/332/387/390/550/749/750/1248/1377/1439, 171/260/306/332/387/390/749/750/830/1248/1377/1439, 171/260/306/332/387/390/749/750/839/1248/1377/1439, 13/171/260/306/332/387/390/749/750/1248/1377/1439, 14/171/260/306/332/387/390/749/750/1248/1377/1439, 17/171/260/306/332/387/390/749/750/1248/1377/1439, 171/260/306/332/387/390/749/750/836/1248/1377/1439, 171/260/306/332/387/390/749/750/1210/1248/1377/1439, 171/260/306/332/387/390/749/750/1248/1281/1377/1439, 64/171/260/306/332/387/390/749/750/1248/1377/1439, 171/260/306/332/387/390/682/749/750/1248/1377/1439, 171/260/306/318/332/387/390/749/750/1248/1377/1439, 20/171/260/306/332/387/390/749/750/1248/1377/1439, 21/171/260/306/332/387/390/749/750/1248/1377/1439, 171/260/306/325/332/387/390/749/750/1248/1377/1439, 171/260/306/332/387/390/533/749/750/1248/1377/1439, 19/171/260/306/332/387/390/749/750/1248/1377/1439, 171/260/306/332/387/390/749/750/817/1248/1377/1439, 171/260/306/332/387/390/749/750/831/1248/1377/1439, 171/225/260/306/332/387/390/749/750/1248/1377/1439, 171/260/306/332/387/390/749/750/1156/1248/1377/1439, 171/260/306/332/387/390/393/747/749/750/1248/1377/1439, 171/260/306/332/387/390/749/750/753/1248/1377/1439, 171/260/306/332/387/390/393/732/749/750/751/1248/1377/1439, 63/171/260/306/332/387/390/749/750/797/1248/1377/1439, 171/260/306/332/387/390/622/749/750/1248/1377/1439, 171/260/306/332/387/390/617/749/750/1248/1377/1439, 171/260/306/332/387/390/749/750/907/1248/1377/1439, 171/260/306/332/387/390/749/750/1040/1248/1377/1439, 171/260/306/332/387/390/611/749/750/1248/1377/1439, 171/260/306/332/387/390/488/749/750/1248/1377/1439, 171/260/306/332/387/390/749/750/1192/1248/1377/1439, 171/260/306/332/387/390/749/750/1194/1248/1377/1439, 171/260/306/332/387/390/619/749/750/1248/1377/1439, 16/171/260/306/332/387/390/749/750/1248/1377/1439, 171/260/306/332/387/390/749/750/802/1248/1377/1439, 171/211/260/306/332/387/390/749/750/1248/1377/1439, 171/260/306/332/387/390/749/836/750/1248/1377/1439, 171/260/306/332/387/390/555/749/750/1248/1377/1439, 171/260/306/332/387/390/536/749/750/1248/1377/1439, 171/260/306/332/387/390/527/749/750/1248/1377/1439, 171/260/306/332/387/390/749/750/841/1248/1377/1439, 171/260/306/320/332/387/390/749/750/1248/1377/1439, 171/260/306/332/387/390/749/750/837/1248/1377/1439, 171/260/306/332/387/390/558/749/750/1248/1377/1439, 171/260/306/332/387/390/749/750/914/1248/1377/1439, 171/260/306/312/332/387/390/749/750/1248/1377/1439, 171/260/306/332/387/390/681/749/750/1248/1377/1439, 171/260/306/332/387/390/749/750/838/1248/1377/1439, 15/171/260/306/332/387/390/749/750/1248/1377/1439, 171/260/306/332/387/390/749/750/1248/1377/1427/1439, 18/171/260/306/332/387/390/749/750/1248/1377/1439, 171/260/306/332/387/390/683/749/750/1248/1377/1439, 24/171/260/306/332/387/390/749/750/1248/1377/1439, 171/260/306/332/387/390/534/749/750/1248/1377/1439, 171/260/306/332/387/390/749/750/840/1248/1377/1439, 171/260/306/332/387/390/749/750/1160/1248/1377/1439, 171/260/306/332/387/390/551/749/750/1248/1377/1439, 171/260/306/332/387/390/393/749/750/1248/1377/1439, 171/260/306/332/387/390/393/747/749/750/752/811/819/923/1148 1248/1377/1439, 171/260/306/332/387/390/393/749/750/751/775/1248/1377/1439, 63/171/260/306/332/387/390/393/732/749/750/775/1148/1248/1377/1439, 171/260/306/332/387/390/393/732/749/750/1148/1248/1377/1439, 171/260/306/332/387/390/749/750/775/1148/1248/1377/1439, 171/260/306/332/387/390/393/749/750/752/753/775/793/797/1248/1377/1439, 171/260/306/332/387/390/393/749/750/923/1248/1377/1439, 171/260/306/332/387/390/393/749/750/923/1148/1248/1377/1439, 171/260/306/332/387/390/393/747/749/750/751/1248/1377/1439, 171/260/306/332/387/390/393/747/749/750/753/775/1148/1248/1377/1439, 171/260/306/332/387/390/749/750/752/923/1051/1248/1377/1439, 63/171/260/306/332/387/390/749/750/775/1248/1377/1439, 63/171/260/306/332/387/390/393/749/750/752/775/793/1051/1053 1248/1377/1439, 171/260/306/332/387/390/749/750/752/753/775/793/819/1248/1377/1439, 63/171/260/306/332/387/390/749/750/1051/1248/1377/1439, 63/171/260/306/332/387/390/747/749/750/752/753/775/811/819/923/1051 1248/1377/1439, 171/260/306/332/387/390/393/749/750/752/787/1248/1377/1439, 171/260/306/332/387/390/749/750/751/1248/1377/1439, 63/171/260/306/332/387/390/749/750/1148/1248/1377/1439, 63/171/260/306/332/387/390/747/749/750/752/753/819/923/1148 1248/1377/1439, 171/260/306/332/387/390/749/750/1148/1248/1377/1439, 171/260/306/332/387/390/747/749/750/752/753/793/811/1248/1377/1439, 63/171/260/306/332/387/390/749/750/1248/1377/1439, 171/260/306/332/387/390/749/750/797/1148/1248/1377/1439, 171/260/306/332/387/390/749/750/751/752/753/1051/1248/1377/1439, 63/171/260/306/332/387/390/732/749/750/1051/1248/1377/1439, 171/260/306/332/387/390/749/750/752/797/815/923/1051/1148 1248/1377/1439, or 171/260/306/332/387/390/747/749/750/753/1248/1377/1439, wherein the amino acid positions are relative to the reference sequence corresponding to SEQ ID NO: 2.

[0180] In some embodiments, the amino acid sequence of the recombinant factor VIII polypeptide comprises at least a substitution or substitution set 171P/260T/306G/332P/387I/390A/620N/749F/750D/1248D/1377D/1439E, 171P/260T/306G/332P/387I/390A/491E/749F/750D/1248D/1377D/1439E, 171P/260T/306G/332P/387I/390A/749F/750D/491/1248D/1377D/1439E, 171P/260T/306G/332P/387I/390A/615N/749F/750D/1248D/1377D/1439E, 171P/260T/306G/332P/387I/390A/749F/750D/1248D/1283 S/1377D/1439E, 171P/260T/306G/332P/387I/390A/749F/750D/822S/1248D/1377D/1439E, 171P/260T/306G/328G/332P/387I/390A/749F/750D/1248D/1377D/1439E, 171P/212L/260T/306G/332P/387I/390A/749F/750D/1248D/1377D/1439E, 171P/260T/306G/332P/387I/390A/749F/750D/818W/1248D/1377D/1439E, 171P/260T/306G/332P/387I/390A/749F/750D/1248D/1283L/1377D/1439E, 171P/260T/306G/332P/387I/390A/555G/684G/749F/750D/1248D/1377D/1439E, 171P/260T/306G/332P/387I/390A/749F/750D/828K/1248D/1377D/1439E, 171P/260T/306G/332P/387I/390A/550G/749F/750D/1248D/1377D/1439E, 171P/260T/306G/332P/387I/390A/749F/750D/830M/1248D/1377D/1439E, 171P/260T/306G/332P/387I/390A/749F/750D/839A/1248D/1377D/1439E, 171P/260T/306G/332P/387I/390A/749F/750D/822T/1248D/1377D/1439E, 13Y/171P/260T/306G/332P/387I/390A/749F/750D/1248D/1377D/1439E, 14G/171P/260T/306G/332P/387I/390A/749F/750D/1248D/1377D/1439E, 17V/171P/260T/306G/332P/387I/390A/749F/750D/1248D/1377D/1439E, 171P/260T/306G/332P/387I/390A/749F/750D/836V/1248D/1377D/1439E, 171P/260T/306G/332P/387I/390A/749F/750D/839P/1248D/1377D/1439E, 171P/260T/306G/332P/387I/390A/749F/750D/1210W/1248D/1377D/1439E, 171P/260T/306G/332P/387I/390A/749F/750D/1248D/1281R/1377D/1439E, 64D/171P/260T/306G/332P/387I/390A/749F/750D/1248D/1377D/1439E, 171P/212G/260T/306G/332P/387I/390A/749F/750D/1248D/1377D/1439E, 171P/260T/306G/332P/387I/390A/682R/749F/750D/1248D/1377D/1439E, 14M/171P/260T/306G/332P/387I/390A/749F/750D/1248D/1377D/1439E, 171P/260T/306G/318C/332P/387I/390A/749F/750D/1248D/1377D/1439E, 17S/171P/260T/306G/332P/387I/390A/749F/750D/1248D/1377D/1439E, 20L/171P/260T/306G/332P/387I/390A/749F/750D/1248D/1377D/1439E, 171P/260T/306G/332P/387I/390A/749F/750D/818G/1248D/1377D/1439E, 171P/260T/306G/332P/387I/390A/749F/750D/836G/1248D/1377D/1439E, 21M/171P/260T/306G/332P/387I/390A/749F/750D/1248D/1377D/1439E, 171P/260T/306G/332P/387I/390A/749F/750D/836R/1248D/1377D/1439E, 171P/260T/306G/325Y/332P/387I/390A/749F/750D/1248D/1377D/1439E, 171P/260T/306G/332P/387I/390A/533V/749F/750D/1248D/1377D/1439E, 19G/171P/260T/306G/332P/387I/390A/749F/750D/1248D/1377D/1439E, 14V/171P/260T/306G/332P/387I/390A/749F/750D/1248D/1377D/1439E, 171P/260T/306G/332P/387I/390A/749F/750D/817D/1248D/1377D/1439E, 171P/260T/306G/332P/387I/390A/749F/750D/831W/1248D/1377D/1439E, 171P/225R/260T/306G/332P/387I/390A/749F/750D/1248D/1377D/1439E, 171P/260T/306G/332P/387I/390A/749F/750D/1156R/1248D/1377D/1439E, 171P/260T/306G/332P/387I/390A/749F/750D/830V/1248D/1377D/1439E, 171P/260T/306G/332P/387I/390A/393G/A747D/749F/750D/1248D/1377D/1439E, 171P/260T/306G/332P/387I/390A/749F/750D/753D/1248D/1377D/1439E, 171P/260T/306G/332P/387I/390A/393G/732W/749F/750D/S751Y/1248D/1377D/1439E, 63Q/171P/260T/306G/332P/387I/390A/749F/750D/797W/1248D/1377D/1439E, 171P/260T/306G/332P/387I/390A/622D/749F/750D/1248D/1377D/1439E, 171P/260T/306G/332P/387I/390A/617E/749F/750D/1248D/1377D/1439E, 171P/260T/306G/332P/387I/390A/617N/749F/750D/1248D/1377D/1439E, 171P/260T/306G/332P/387I/390A/749F/750D/907D/1248D/1377D/1439E, 171P/260T/306G/332P/387I/390A/749F/750D/1040E/1248D/1377D/1439E, 171P/260T/306G/332P/387I/390A/617D/749F/750D/1248D/1377D/1439E, 171P/260T/306G/332P/387I/390A/611E/749F/750D/1248D/1377D/1439E, 171P/260T/306G/332P/387I/390A/620P/749F/750D/1248D/1377D/1439E, 171P/260T/306G/332P/387I/390A/617G/749F/750D/1248D/1377D/1439E, 171P/260T/306G/332P/387I/390A/488G/749F/750D/1248D/1377D/1439E, 171P/260T/306G/332P/387I/390A/749F/750D/1192D/1248D/1377D/1439E, 171P/260T/306G/332P/387I/390A/749F/750D/1194P/1248D/1377D/1439E, 171P/260T/306G/332P/387I/390A/619E/749F/750D/1248D/1377D/1439E, 171P/260T/306G/332P/387I/390A/615D/749F/750D/1248D/1377D/1439E, 16A/171P/260T/306G/332P/387I/390A/749F/750D/1248D/1377D/1439E, 171P/260T/306G/332P/387I/390A/749F/750D/802S/1248D/1377D/1439E, 171P/260T/306G/332P/387I/390A/749F/750D/818V/1248D/1377D/1439E, 171P/L211K/260T/306G/332P/387I/390A/749F/750D/1248D/1377D/1439E, 171P/260T/306G/332P/387I/390A/749F/836W/750D/1248D/1377D/1439E, 171P/260T/306G/332P/387I/390A/555R/749F/750D/1248D/1377D/1439E, 171P/260T/306G/332P/387I/390A/536A/749F/750D/1248D/1377D/1439E, 171P/260T/306G/332P/387I/390A/527A/749F/750D/1248D/1377D/1439E, 171P/260T/306G/332P/387I/390A/555E/749F/750D/1248D/1377D/1439E, 171P/260T/306G/332P/387I/390A/749F/750D/841W/1248D/1377D/1439E, 171P/260T/306G/320Q/332P/387I/390A/749F/750D/1248D/1377D/1439E, 171P/260T/306G/332P/387I/390A/749F/750D/837G/1248D/1377D/1439E, 171P/260T/306G/332P/387I/390A/558R/749F/750D/1248D/1377D/1439E, 171P/260T/306G/332P/387I/390A/555G/749F/750D/1248D/1377D/1439E, 171P/211R/260T/306G/332P/387I/390A/749F/750D/1248D/1377D/1439E, 64G/171P/260T/306G/332P/387I/390A/749F/750D/1248D/1377D/1439E, 171P/260T/306G/320R/332P/387I/390A/749F/750D/1248D/1377D/1439E, 171P/260T/306G/332P/387I/390A/533Y/749F/750D/1248D/1377D/1439E, 171P/260T/306G/332P/387I/390A/749F/750D/914V/1248D/1377D/1439E, 16V/171P/260T/306G/332P/387I/390A/749F/750D/1248D/1377D/1439E, 171P/260T/306G/332P/387I/390A/749F/750D/1248D/1283E/1377D/1439E, 171P/260T/306G/332P/387I/390A/536M/749F/750D/1248D/1377D/1439E, 171P/260T/306G/312L/332P/387I/390A/749F/750D/1248D/1377D/1439E, 171P/260T/306G/332P/387I/390A/681N/749F/750D/1248D/1377D/1439E, 171P/260T/306G/332P/387I/390A/749F/750D/838T/1248D/1377D/1439E, 171P/260T/306G/332P/387I/390A/536R/749F/750D/1248D/1377D/1439E, 15G/171P/260T/306G/332P/387I/390A/749F/750D/1248D/1377D/1439E, 171P/260T/306G/332P/387I/390A/536P/749F/750D/1248D/1377D/1439E, 171P/260T/306G/332P/387I/390A/558W/749F/750D/1248D/1377D/1439E, 171P/260T/306G/332P/387I/390A/558E/749F/750D/1248D/1377D/1439E, 171P/260T/306G/332P/387I/390A/749F/750D/1248D/1377D/1427Y/1439E, 171P/260T/306G/332P/387I/390A/749F/750D/839G/1248D/1377D/1439E, 18L/171P/260T/306G/332P/387I/390A/749F/750D/1248D/1377D/1439E, 13G/171P/260T/306G/332P/387I/390A/749F/750D/1248D/1377D/1439E, 171P/260T/306G/332P/387I/390A/749F/750D/1210M/1248D/1377D/1439E, 171P/260T/306G/332P/387I/390A/749F/750D/1156G/1248D/1377D/1439E, 171P/260T/306G/332P/387I/390A/558L/749F/750D/1248D/1377D/1439E, 171P/260T/306G/332P/387I/390A/749F/750D/839K/1248D/1377D/1439E, 171P/211P/260T/306G/332P/387I/390A/749F/750D/1248D/1377D/1439E, 171P/211G/260T/306G/332P/387I/390A/749F/750D/1248D/1377D/1439E, 171P/211Q/260T/306G/332P/387I/390A/749F/750D/1248D/1377D/1439E, 16D/171P/260T/306G/332P/387I/390A/749F/750D/1248D/1377D/1439E, 171P/260T/306G/M320G/332P/387I/390A/749F/750D/1248D/1377D/1439E, 171P/260T/306G/332P/387I/390A/683W/749F/750D/1248D/1377D/1439E, 24V/171P/260T/306G/332P/387I/390A/749F/750D/1248D/1377D/1439E, 171P/260T/306G/332P/387I/390A/534I/749F/750D/1248D/1377D/1439E, 171P/260T/306G/332P/387I/390A/681A/749F/750D/1248D/1377D/1439E, 171P/260T/306G/332P/387I/390A/749F/750D/840G/1248D/1377D/1439E, 171P/260T/306G/332P/387I/390A/749F/750D/1160R/1248D/1377D/1439E, 171P/260T/306G/332P/387I/390A/681C/749F/750D/1248D/1377D/1439E, 171P/260T/306G/328Q/332P/387I/390A/749F/750D/1248D/1377D/1439E, 15S/171P/260T/306G/332P/387I/390A/749F/750D/1248D/1377D/1439E, 171P/260T/306G/332P/387I/390A/536K/749F/750D/1248D/1377D/1439E, 171P/260T/306G/332P/387I/390A/536G/749F/750D/1248D/1377D/1439E, 171P/260T/306G/332P/387I/390A/533R/749F/750D/1248D/1377D/1439E, 171P/260T/306G/332P/387I/390A/681E/749F/750D/1248D/1377D/1439E, 171P/260T/306G/332P/387I/390A/536W/749F/750D/1248D/1377D/1439E, 171P/260T/306G/332P/387I/390A/749F/750D/1156N/1248D/1377D/1439E, 16P/171P/260T/306G/332P/387I/390A/749F/750D/1248D/1377D/1439E, 171P/260T/306G/332P/387I/390A/749F/750D/817A/1248D/1377D/1439E, 18R/171P/260T/306G/332P/387I/390A/749F/750D/1248D/1377D/1439E, 171P/260T/306G/332P/387I/390A/551W/749F/750D/1248D/1377D/1439E, 171P/260T/306G/332P/387I/390A/555T/749F/750D/1248D/1377D/1439E, 171P/260T/306G/332P/387I/390A/681G/749F/750D/1248D/1377D/1439E, 171P/212A/260T/306G/332P/387I/390A/749F/750D/1248D/1377D/1439E, 16G/171P/260T/306G/332P/387I/390A/749F/750D/1248D/1377D/1439E, 171P/260T/306G/332P/387I/390A/749F/750D/838G/1248D/1377D/1439E, 171P/260T/306G/332P/387I/390A/681R/749F/750D/1248D/1377D/1439E, 171P/260T/306G/332P/387I/390A/393G/749F/750D/1248D/1377D/1439E, 171P/260T/306G/332P/387I/390A/393G/747D/749F/750D/752G/811F/819V/923M/1148N/1248D/1377D/1439E, 171P/260T/306G/332P/387I/390A/393G/749F/750D/751Y/775G/1248D/1377D/1439E, 63Q/171P/260T/306G/332P/387I/390A/393G/732W/749F/750D/775G/1148N/1248D/1377D/1439E, 171P/260T/306G/332P/387I/390A/393G/732W/749F/750D/1148N/1248D/1377D/1439E, 171P/260T/306G/332P/387I/390A/749F/750D/775G/1148N/1248D/1377D/1439E, 171P/260T/306G/332P/387I/390A/393G/749F/750D/752L/753D/775G/793G/797W/1248D/1377D/1439E, 171P/260T/306G/332P/387I/390A/393G/749F/750D/923M/1248D/1377D/1439E, 171P/260T/306G/332P/387I/390A/393G/749F/750D/923M/1148N/1248D/1377D/1439E, 171P/260T/306G/332P/387I/390A/393G/747D/749F/750D/751Y/1248D/1377D/1439E, 171P/260T/306G/332P/387I/390A/393G/747D/749F/750D/753D/775G/1148N/1248D/1377D/1439E, 171P/260T/306G/332P/387I/390A/749F/750D/752L/923M/1051R/1248D/1377D/1439E, 63Q/171P/260T/306G/332P/387I/390A/749F/750D/775G/1248D/1377D/1439E, 63Q/171P/260T/306G/332P/387I/390A/393G/749F/750D/752L/775G/793G/1051R/1053R 1248D/1377D/1439E, 171P/260T/306G/332P/387I/390A/749F/750D/752G/753D/775G/793G/819V/1248D/1377D/1439E, 63Q/171P/260T/306G/332P/387I/390A/749F/750D/1051R/1248D/1377D/1439E, 63Q/171P/260T/306G/332P/387I/390A/747D/749F/750D/752G/753D/775G/811F/819V/923M/1051R 1248D/1377D/1439E, 171P/260T/306G/332P/387I/390A/393G/749F/750D/752G/787W/1248D/1377D/1439E, 171P/260T/306G/332P/387I/390A/749F/750D/751Y/1248D/1377D/1439E, 63Q/171P/260T/306G/332P/387I/390A/749F/750D/1148N/1248D/1377D/1439E, 63H1/171P/260T/306G/332P/387I/390A/747D/749F/750D/752G/753D/819V/923M/1148N/1248D/1377D/1439E, 171P/260T/306G/332P/387I/390A/749F/750D/1148N/1248D/1377D/1439E, 171P/260T/306G/332P/387I/390A/747D/749F/750D/752L/753D/793G/811F/1248D/1377D/1439E, 63Q/171P/260T/306G/332P/387I/390A/749F/750D/1248D/1377D/1439E, 171P/260T/306G/332P/387I/390A/749F/750D/797W/1148N/1248D/1377D/1439E, 171P/260T/306G/332P/387I/390A/749F/750D/751Y/752L/753D/1051R/1248D/1377D/1439E, 63Q/171P/260T/306G/332P/387I/390A/732W/749F/750D/1051R/1248D/1377D/1439E, 171P/260T/306G/332P/387I/390A/749F/750D/752G/797W/815I/923M/1051R/1148N 1248D/1377D/1439E, or 171P/260T/306G/332P/387I/390A/747D/749F/750D/753D/1248D/1377D/1439E, wherein the amino acid positions are relative to the reference sequence corresponding to SEQ ID NO: 2.

[0181] In some embodiments, the amino acid sequence of the recombinant factor VIII polypeptide comprises at least a substitution or substitution set at amino acid position(s) 63/171/260/306/332/387/390/393/681/732/749/750/775/1148/1248/1377/1439, 63/171/260/306/332/387/390/393/622/732/749/750/775/1148/1248/1377/1439, 63/171/260/306/332/387/390/393/617/732/749/750/775/1148/1248/1377/1439, 63/171/260/306/332/387/390/393/558/732/749/750/775/1148/1248/1377/1439, 63/171/260/306/332/387/390/393/536/732/749/750/775/1148/1248/1377/1439, 63/171/211/260/306/332/387/390/393/732/749/750/775/1148/1248/1377/1439, 63/171/260/306/320/332/387/390/393/732/749/750/775/1148/1248/1377/1439, 63/171/260/306/332/387/390/393/732/749/750/775/839/1148/1248/1377/1439, 63/171/260/306/332/387/390/393/732/749/750/775/797/1148/1248/1377/1439, 63/171/260/306/332/387/390/393/533/732/749/750/775/1148/1248/1377/1439, 63/171/260/306/332/387/390/393/732/749/750/751/775/1148/1248/1377/1439, 63/171/260/303/306/332/387/390/393/732/749/750/775/1148/1248/1377/1439, 63/171/260/306/332/387/390/393/732/749/750/951/775/1148/1248/1377/1439, 63/164/171/260/306/332/387/390/393/732/749/750/775/1148/1248/1377/1439, 63/171/260/306/332/387/390/393/732/749/750/775/818/1148/1248/1377/1439, 63/171/260/306/332/387/390/393/732/749/750/775/807/1148/1248/1377/1439, 63/171/260/306/332/387/390/393/732/749/750/775/799/1148/1248/1377/1439, 63/171/260/306/332/387/390/393/732/735/749/750/775/1148/1248/1377/1439, 63/171/260/306/332/387/390/393/732/749/750/775/794/1148/1248/1377/1439, 63/171/260/306/332/387/390/393/732/749/750/775/926/1148/1248/1377/1439, 63/171/260/306/332/387/390/393/732/749/750/755/775/1148/1248/1377/1439, 63/171/260/306/332/387/390/393/732/749/750/775/921/1148/1248/1377/1439, 63/171/260/306/332/387/390/393/732/749/750/775/801/1148/1248/1377/1439, 63/171/260/306/332/387/390/393/732/749/750/775/1094/1148/1248/1377/1439, 63/171/260/306/332/387/390/393/732/749/750/775/968/1148/1248/1377/1439, 63/171/260/306/332/387/390/393/732/749/750/775/929/1148/1248/1377/1439, 63/171/260/306/332/387/390/393/732/749/750/775/924/1148/1248/1377/1439, 63/171/260/306/332/387/390/393/698/732/749/750/775/1148/1248/1377/1439, 63/168/171/260/306/332/387/390/393/732/749/750/775/1148/1248/1377/1439, 63/171/260/306/332/387/390/393/581/732/749/750/775/1148/1248/1377/1439, 63/171/260/306/332/387/390/393/732/749/750/775/916/1148/1248/1377/1439, 63/171/260/306/332/387/390/393/732/749/750/775/1148/1248/1377/1428/1439, 63/171/260/306/332/387/390/393/732/749/750/775/805/1148/1248/1377/1439, 63/171/260/306/332/387/390/393/732/749/750/775/1114/1148/1248/1377/1439, 63/171/260/306/311/332/387/390/393/732/749/750/775/1148/1248/1377/1439, 63/171/260/306/332/387/390/393/732/737/749/750/775/1148/1248/1377/1439, 63/171/260/306/332/387/390/393/693/732/749/750/775/1148/1248/1377/1439, 63/171/260/306/332/387/390/393/732/749/750/775/809/1148/1248/1377/1439, 63/171/260/306/332/387/390/393/732/749/750/757/775/1148/1248/1377/1439, 63/171/260/306/332/387/390/393/732/749/750/775/1099/1148/1248/1377/1439, 63/171/260/306/332/387/390/393/676/732/749/750/775/1148/1248/1377/1439, 63/171/260/306/332/387/390/393/732/740/749/750/775/1148/1248/1377/1439, 63/171/260/306/332/387/390/393/732/698/749/750/775/1148/1248/1377/1439, 63/171/260/306/332/387/390/393/732/749/750/775/791/1148/1248/1377/1439, 63/171/211/260/306/332/387/390/393/536/622/681/732/749/750/775/1148/1248/1377/1439, 63/171/260/306/332/387/390/393/536/558/732/749/750/775/1148/1248/1377/1439, 63/171/211/260/306/332/387/390/393/536/555/617/749/750/775/1148/1248/1377/1439, 63/171/211/260/306/332/387/390/393/681/749/750/775/1148/1248/1377/1439, 63/171/211/260/306/332/387/390/393/536/555/732/749/750/775/1148/1248/1377/1439, 63/171/260/306/332/387/390/393/555/732/749/750/775/1148/1248/1377/1439, 63/171/211/260/306/332/387/390/393/536/732/749/750/775/1148/1248/1377/1439, 63/171/211/212/260/306/332/387/390/393/732/749/750/775/1148/1248/1377/1439, 63/171/211/260/306/332/387/390/393/536/617/681/749/750/775/1148/1248/1377/1439, 63/171/211/260/306/332/387/390/393/536/558/617/681/732/749/750/775/1148/1248/1377/1439, 63/171/260/306/332/387/390/393/555/749/750/775/1148/1248/1377/1439, 63/171/260/306/332/387/390/393/536/555/558/617/749/750/775/1148/1248/1377/1439, 63/171/260/306/332/387/390/393/536/617/681/749/750/775/1148/1248/1377/1439, 63/171/260/306/332/387/390/393/536/555/732/749/750/775/1148/1248/1377/1439, 63/171/260/306/332/387/390/393/536/622/681/732/749/750/775/1148/1248/1377/1439, 63/171/260/306/332/387/390/393/749/750/775/1148/1248/1377/1439, 63/171/212/260/306/320/332/387/390/393/533/617/681/732/749/750/775/1148/1248/1377/1439, 63/171/211/260/306/312/332/387/390/393/533/534/617/619/681/732/749/750/775/839/1148/1248/1377/1439, 63/171/212/260/306/332/387/390/393/732/749/750/775/1148/1248/1377/1439, 63/171/211/212/260/306/320/332/387/390/393/619/681/732/749/750/775/839/1148/1248/1377/1439, 63/171/260/306/332/387/390/393/732/749/750/775/797/839/1148/1248/1377/1439, 63/171/212/260/306/312/320/332/387/390/393/533/534/617/681/732/749/750/775/1148/1248/1377/1439, 63/171/260/306/332/387/390/393/558/619/681/732/749/750/775/1148/1248/1377/1439, 63/171/260/306/320/332/387/390/393/558/681/732/749/750/775/1148/1248/1377/1439, 63/171/212/260/306/320/332/387/390/393/534/619/681/732/749/750/775/797/839/1148/1248/1377/1439, 63/171/260/306/320/332/387/390/393/558/619/749/750/775/839/1148/1248/1377/1439, 63/171/211/212/260/306/312/332/387/390/393/534/558/619/681/749/750/775/839/1148/1248/1377/1439, 63/171/260/306/320/332/387/390/393/534/558/619/749/750/775/797/1148/1248/1377/1439, 63/171/260/306/332/387/390/393/558/617/619/681/732/749/750/775/1148/1248/1377/1439, 63/171/211/260/306/332/387/390/393/534/558/611/681/732/749/750/775/1148/1248/1377/1439, 63/171/211/260/306/320/332/387/390/393/617/619/681/732/749/750/775/1148/1248/1377/1439, 63/171/260/306/332/387/390/393/558/617/681/732/749/750/775/797/1148/1248/1377/1439, 63/171/260/306/320/332/387/390/393/534/619/749/750/775/1148/1248/1377/1439, 63/171/211/260/306/332/387/390/393/619/681/732/749/750/775/1148/1248/1377/1439, 63/171/211/212/260/306/332/387/390/393/534/558/619/749/750/775/839/1148/1248/1377/1439, 63/171/212/260/306/320/332/387/390/393/619/681/732/749/750/775/797/839/1148/1248/1377/1439, 63/171/212/260/306/320/332/387/390/393/611/732/749/750/775/839/1148/1248/1377/1439, 63/171/260/306/320/332/387/390/393/558/619/681/732/749/750/775/1148/1248/1377/1439, 63/171/260/306/312/332/387/390/393/533/617/681/732/749/750/775/797/839/1148/1248/1377/1439, 63/171/260/306/332/387/390/393/558/611/681/732/749/750/775/1148/1248/1377/1439, 63/171/260/306/312/332/387/390/393/732/749/750/775/1148/1248/1377/1439, 63/171/211/260/306/320/332/387/390/393/558/619/681/749/750/775/797/839/1148/1248/1377/1439, 63/171/260/306/320/332/387/390/393/558/749/750/775/797/1148/1248/1377/1439, 63/171/260/306/332/387/390/393/533/558/611/619/716/749/750/775/839/1148/1248/1377/1439, 63/171/260/306/312/332/387/390/393/681/732/749/750/775/1148/1248/1377/1439, 63/171/260/306/320/332/387/390/393/534/619/681/732/749/750/775/1148/1248/1377/1439, 63/171/211/260/306/320/332/387/390/393/533/536/619/732/749/750/775/1148/1248/1377/1439, 63/171/260/306/332/387/390/393/558/617/681/732/749/750/775/839/1148/1248/1377/1439, 63/171/212/260/306/320/332/387/390/393/534/558/681/732/749/750/775/1148/1248/1377/1439, 63/171/260/306/332/387/390/393/533/534/681/732/749/750/775/839/1148/1248/1377/1439, 63/171/212/260/306/332/387/390/393/534/619/681/732/749/750/775/1148/1248/1377/1439, 63/171/260/306/332/387/390/393/617/619/681/732/749/750/775/1148/1248/1377/1439, 63/171/211/212/260/306/320/332/387/390/393/558/617/681/732/749/750/775/1148/1248/1377/1439, 63/171/212/260/306/332/387/390/393/534/558/681/732/749/750/775/797/1148/1248/1377/1439, 63/171/212/260/306/320/332/387/390/393/534/732/749/750/775/1148/1248/1377/1439, 63/171/211/260/306/312/332/387/390/393/619/732/749/750/775/1148/1248/1377/1439, 63/171/212/260/306/312/332/387/390/393/619/732/749/750/775/839/1148/1248/1377/1439, 63/171/210/212/260/306/320/332/387/390/393/558/681/732/749/750/775/1148/1248/1377/1439, 63/171/212/260/306/312/332/387/390/393/534/681/732/749/750/775/797/839/1148/1248/1377/1439, 63/171/211/260/306/320/332/387/390/393/558/732/749/750/775/839/1148/1248/1377/1439, 63/171/260/294/306/332/387/390/393/732/749/750/775/1148/1248/1377/1439, 63/171/260/306/332/387/390/393/732/749/750/759/775/1148/1248/1377/1439, 63/171/260/306/332/387/390/393/538/732/749/750/775/1148/1248/1377/1439, or 63/171/260/306/332/387/390/393/732/749/750/775/1109/1148/1248/1377/1439, wherein the amino acid positions are relative to the reference sequence corresponding to SEQ ID NO: 2.

[0182] In some embodiments, the amino acid sequence of the recombinant factor VIII polypeptide comprises at least a substitution or substitution set 63Q/171P/260T/306G/332P/387I/390A/393G/681A/732W/749F/750D/775G/1148N/1248D/1377D/1439E, 63Q/171P/260T/306G/332P/387I/390A/393G/622D/732W/749F/750D/775G/1148N/1248D/1377D/1439E, 63Q/171P/260T/306G/332P/387I/390A/393G/617G/732W/749F/750D/775G/1148N/1248D/1377D/1439E, 63Q/171P/260T/306G/332P/387I/390A/393G/558L/732W/749F/750D/775G/1148N/1248D/1377D/1439E, 63Q/171P/260T/306G/332P/387I/390A/393G/536K/732W/749F/750D/775G/1148N/1248D/1377D/1439E, 63Q/171P/260T/306G/332P/387I/390A/393G/681G/732W/749F/750D/775G/1148N/1248D/1377D/1439E, 63Q/171P/211Q/260T/306G/332P/387I/390A/393G/732W/749F/750D/775G/1148N/1248D/1377D/1439E, 63Q/171P/260T/306G/320R/332P/387I/390A/393G/732W/749F/750D/775G/1148N/1248D/1377D/1439E, 63Q/171P/260T/306G/332P/387I/390A/393G/558W/732W/749F/750D/775G/1148N/1248D/1377D/1439E, 63Q/171P/260T/306G/332P/387I/390A/393G/732W/749F/750D/775G/839K/1148N/1248D/1377D/1439E, 63Q/171P/211K/260T/306G/332P/387I/390A/393G/732W/749F/750D/775G/1148N/1248D/1377D/1439E, 63Q/171P/260T/306G/332P/387I/390A/393G/732W/749F/750D/775G/797W/1148N/1248D/1377D/1439E, 63Q/171P/260T/306G/332P/387I/390A/393G/533R/732W/749F/750D/775G/1148N/1248D/1377D/1439E, 63Q/171P/260T/306G/332P/387I/390A/393G/732W/749F/750D/751A/775G/1148N/1248D/1377D/1439E, 63Q/171P/260T/306G/332P/387I/390A/393G/732W/749F/750D/751T/775G/1148N/1248D/1377D/1439E, 63Q/171P/260T/306G/332P/387I/390A/393G/732W/749F/750D/951V/775G/1148N/1248D/1377D/1439E, 63Q/164E/171P/260T/306G/332P/387I/390A/393G/732W/749F/750D/775G/1148N/1248D/1377D/1439E, 63Q/171P/260T/306G/332P/387I/390A/393G/732W/749F/750D/775G/818G/1148N/1248D/1377D/1439E, 63Q/171P/260T/306G/332P/387I/390A/393G/732W/749F/750D/775G/807L/1148N/1248D/1377D/1439E, 63Q/171P/260T/306G/332P/387I/390A/393G/732W/749F/750D/775G/799A/1148N/1248D/1377D/1439E, 63Q/171P/260T/306G/332P/387I/390A/393G/732W/735S/749F/750D/775G/1148N/1248D/1377D/1439E, 63Q/171P/260T/306G/332P/387I/390A/393G/732W/749F/750D/775G/794R/1148N/1248D/1377D/1439E, 63Q/171P/260T/306G/332P/387I/390A/393G/732W/749F/750D/775G/926V/1148N/1248D/1377D/1439E, 63Q/171P/260T/306G/332P/387I/390A/393G/732W/749F/750D/755P/775G/1148N/1248D/1377D/1439E, 63Q/171P/260T/306G/332P/387I/390A/393G/732W/749F/750D/775G/921W/1148N/1248D/1377D/1439E, 63Q/171P/260T/306G/332P/387I/390A/393G/732W/749F/750D/775G/801A/1148N/1248D/1377D/1439E, 63Q/171P/260T/306G/332P/387I/390A/393G/732W/749F/750D/775G/1094S/1148N/1248D/1377D/1439E, 63Q/171P/260T/306G/332P/387I/390A/393G/732W/749F/750D/775G/968A/1148N/1248D/1377D/1439E, 63Q/171P/260T/306G/332P/387I/390A/393G/732W/749F/750D/775G/929Q/1148N/1248D/1377D/1439E, 63Q/171P/260T/306G/332P/387I/390A/393G/732W/749F/750D/775G/924W/1148N/1248D/1377D/1439E, 63Q/171P/260T/306G/332P/387I/390A/393G/732W/749F/750D/775G/807P/1148N/1248D/1377D/1439E, 63Q/171P/260T/306G/332P/387I/390A/393G/698D/732W/749F/750D/775G/1148N/1248D/1377D/1439E, 63Q/168G/171P/260T/306G/332P/387I/390A/393G/732W/749F/750D/775G/1148N/1248D/1377D/1439E, 63Q/171P/260T/306G/332P/387I/390A/393G/732W/749F/750D/775G/929V/1148N/1248D/1377D/1439E, 63Q/171P/260T/306G/332P/387I/390A/393G/732W/749F/750D/775G/818A/1148N/1248D/1377D/1439E, 63Q/171P/260T/306G/332P/387I/390A/393G/732W/749F/750D/775G/818S/1148N/1248D/1377D/1439E, 63Q/171P/260T/306G/332P/387I/390A/393G/581K/732W/749F/750D/775G/1148N/1248D/1377D/1439E, 63Q/171P/260T/306G/332P/387I/390A/393G/732W/749F/750D/775G/818P/1148N/1248D/1377D/1439E, 63Q/171P/260T/306G/332P/387I/390A/393G/732W/749F/750D/775G/916K/1148N/1248D/1377D/1439E, 63Q/171P/260T/306G/332P/387I/390A/393G/698S/732W/749F/750D/775G/1148N/1248D/1377D/1439E, 63Q/171P/260T/751G/306G/332P/387I/390A/393G/732W/749F/750D/775G/1148N/1248D/1377D/1439E, 63Q/171P/260T/306G/332P/387I/390A/393G/732W/749F/750D/775G/916C/1148N/1248D/1377D/1439E, 63Q/171P/260T/306G/332P/387I/390A/393G/732W/749F/750D/775G/1148N/1248D/1377D/1428G/1439E, 63Q/171P/260T/306G/332P/387I/390A/393G/732W/749F/750D/775G/805L/1148N/1248D/1377D/1439E, 63Q/171P/260T/306G/332P/387I/390A/393G/732W/749F/750D/775G/924M/1148N/1248D/1377D/1439E, 63Q/171P/260T/306G/332P/387I/390A/393G/732W/749F/750D/775G/1114M/1148N/1248D/1377D/1439E, 63Q/171P/260T/306G/311G/332P/387I/390A/393G/732W/749F/750D/775G/1148N/1248D/1377D/1439E, 63Q/171P/260T/306G/332P/387I/390A/393G/732W/737N/749F/750D/775G/1148N/1248D/1377D/1439E, 63Q/171P/260T/306G/332P/387I/390A/393G/732W/749F/750D/775G/805V/1148N/1248D/1377D/1439E, 63Q/171P/260T/306G/332P/387I/390A/393G/732W/749F/750D/775G/801I/1148N/1248D/1377D/1439E, 63Q/171P/260T/306G/332P/387I/390A/393G/732W/749F/750D/751D/775G/1148N/1248D/1377D/1439E, 63Q/171P/260T/306G/332P/387I/390A/393G/693T/732W/749F/750D/775G/1148N/1248D/1377D/1439E, 63Q/171P/260T/306G/332P/387I/390A/393G/732W/749F/750D/775G/818E/1148N/1248D/1377D/1439E, 63Q/171P/260T/306G/332P/387I/390A/393G/732W/749F/750D/775G/929A/1148N/1248D/1377D/1439E, 63Q/171P/260T/306G/311E/332P/387I/390A/393G/732W/749F/750D/775G/1148N/1248D/1377D/1439E, 63Q/171P/260T/306G/332P/387I/390A/393G/732W/737L/749F/750D/775G/1148N/1248D/1377D/1439E, 63Q/171P/260T/306G/332P/387I/390A/393G/732W/749F/750D/775G/809W/1148N/1248D/1377D/1439E, 63Q/171P/260T/306G/332P/387I/390A/393G/732W/749F/750D/757A/775G/1148N/1248D/1377D/1439E, 63Q/171P/260T/306G/332P/387I/390A/393G/732W/749F/750D/775G/1099G/1148N/1248D/1377D/1439E, 63Q/171P/260T/306G/332P/387I/390A/393G/732W/749F/750D/775G/799G/1148N/1248D/1377D/1439E, 63Q/171P/260T/306G/332P/387I/390A/393G/732W/749F/750D/775G/916I/1148N/1248D/1377D/1439E, 63Q/171P/260T/306G/332P/387I/390A/393G/732W/749F/750D/775G/805G/1148N/1248D/1377D/1439E, 63Q/171P/260T/306G/332P/387I/390A/393G/732W/737F/749F/750D/775G/1148N/1248D/1377D/1439E, 63Q/171P/260T/306G/332P/387I/390A/393G/732W/737M/749F/750D/775G/1148N/1248D/1377D/1439E, 63Q/171P/260T/306G/332P/387I/390A/393G/732W/749F/750D/775G/799P/1148N/1248D/1377D/1439E, 63Q/171P/260T/306G/332P/387I/390A/393G/732W/749F/750D/775G/807C/1148N/1248D/1377D/1439E, 63Q/171P/260T/306G/332P/387I/390A/393G/732W/749F/750D/775G/916E/1148N/1248D/1377D/1439E, 63Q/171P/260T/306G/332P/387I/390A/393G/676Q/732W/749F/750D/775G/1148N/1248D/1377D/1439E, 63Q/171P/260T/306G/332P/387I/390A/393G/581V/732W/749F/750D/775G/1148N/1248D/1377D/1439E, 63Q/171P/260T/306G/332P/387I/390A/393G/732W/749F/750D/775G/968P/1148N/1248D/1377D/1439E, 63Q/171P/260T/306G/332P/387I/390A/393G/732W/749F/750D/755Y/775G/1148N/1248D/1377D/1439E, 63Q/171P/260T/306G/332P/387I/390A/393G/732W/749F/750D/775G/916Q/1148N/1248D/1377D/1439E, 63Q/171P/260T/306G/332P/387I/390A/393G/732W/735D/749F/750D/775G/1148N/1248D/1377D/1439E, 63Q/171P/260T/306G/332P/387I/390A/393G/732W/740G/749F/750D/775G/1148N/1248D/1377D/1439E, 63Q/171P/260T/306G/332P/387I/390A/393G/732W/698Y/749F/750D/775G/1148N/1248D/1377D/1439E, 63Q/171P/260T/306G/332P/387I/390A/393G/732W/749F/750D/757G/775G/1148N/1248D/1377D/1439E, 63Q/171P/260T/306G/332P/387I/390A/393G/732W/749F/750D/775G/791T/1148N/1248D/1377D/1439E, 63Q/171P/260T/306G/332P/387I/390A/393G/732W/749F/750D/775G/1114A/1148N/1248D/1377D/1439E, 63Q/171P/260T/306G/332P/387I/390A/393G/732W/735V/749F/750D/775G/1148N/1248D/1377D/1439E, 63Q/171P/260T/306G/332P/387I/390A/393G/732W/749F/750D/775G/1148N/1248D/1377D/1439E, 63Q/171P/260T/306G/332P/387I/390A/393G/536P/732W/749F/750D/775G/1148N/1248D/1377D/1439E, 63Q/171P/211R/260T/306G/332P/387I/390A/393G/536K/622D/681A/732W/749F/750D/775G/1148N/1248 D/1377D/1439E, 63Q/171P/260T/306G/332P/387I/390A/393G/536K/558L/732W/749F/750D/775G/1148N/1248D/1377D/1439E, 63Q/171P/211R/260T/306G/332P/387I/390A/393G/536R/555G/617G/749F/750D/775G/1148N/1248D/1377 D/1439E, 63Q/171P/211R/260T/306G/332P/387I/390A/393G/681R/749F/750D/775G/1148N/1248D/1377D/1439E, 63Q/171P/211R/260T/306G/332P/387I/390A/393G/536K/555E/732W/749F/750D/775G/1148N/1248D/1377 D/1439E, 63Q/171P/260T/306G/332P/387I/390A/393G/536R/732W/749F/750D/775G/1148N/1248D/1377D/1439E, 63Q/171P/260T/306G/332P/387I/390A/393G/555E/732W/749F/750D/775G/1148N/1248D/1377D/1439E, 63Q/171P/211R/260T/306G/332P/387I/390A/393G/536P/732W/749F/750D/775G/1148N/1248D/1377D/1439E, 63Q/171P/211R/212P/260T/306G/332P/387I/390A/393 G/732W/749F/750D/775G/1148N/1248D/1377D/1439E, 63Q/171P/211R/260T/306G/332P/387I/390A/393G/536K/732W/749F/750D/775G/1148N/1248D/1377D/1439E, 63Q/171P/211R/260T/306G/332P/387I/390A/393G/536K/617G/681A/749F/750D/775G/1148N/1248D/1377 D/1439E, 63Q/171P/211R/260T/306G/332P/387I/390A/393G/732W/749F/750D/775G/1148N/1248D/1377D/1439E, 63Q/171P/211R/260T/306G/332P/387I/390A/393G/536P/558L/617G/681A/732W/749F/750D/775G/1148N/1248D/1377D/1439E, 63Q/171P/260T/306G/332P/387I/390A/393G/555G/749F/750D/775G/1148N/1248D/1377D/1439E, 63Q/171P/260T/306G/332P/387I/390A/393G/536P/555E/558L/617G/749F/750D/775G/1148N/1248D/1377D/1439E, 63Q/171P/260T/306G/332P/387I/390A/393G/536K/617G/681A/749F/750D/775G/1148N/1248D/1377D/1439E, 63Q/171P/260T/306G/332P/387I/390A/393G/536K/555G/732W/749F/750D/775G/1148N/1248D/1377D/1439E, 63Q/171P/260T/306G/332P/387I/390A/393G/536P/622D/681A/732W/749F/750D/775G/1148N/1248D/1377 D/1439E, 63Q/171P/260T/306G/332P/387I/390A/393G/749F/750D/775G/1148N/1248D/1377D/1439E, 63Q/171P/212A/260T/306G/320Q/332P/387I/390A/393G/533R/617E/681G/732W/749F/750D/775G/1148N/1248D/1377D/1439E, 63Q/171P/211K/260T/306G/312L/332P/387I/390A/393G/533R/534I/617D/619E/681N/732W/749F/750D/775G/839K/1148N/1248D/1377D/1439E, 63Q/171P/212A/260T/306G/332P/387I/390A/393G/732W/749F/750D/775G/1148N/1248D/1377D/1439E, 63Q/171P/211K/212A/260T/306G/320Q/332P/387I/390A/393G/619E/681G/732W/749F/750D/775G/839K/1148N/1248D/1377D/1439E, 63Q/171P/260T/306G/332P/387I/390A/393G/732W/749F/750D/775G/797W/839K/1148N/1248D/1377D/1439E, 63Q/171P/212A/260T/306G/312L/320Q/332P/387I/390A/393G/533R/534I/617E/681G/732W/749F/750D/775G/1148N/1248D/1377D/1439E, 63Q/171P/260T/306G/332P/387I/390A/393G/558W/619E/681G/732W/749F/750D/775G/1148N/1248D/1377 D/1439E, 63Q/171P/260T/306G/320Q/332P/387I/390A/393G/558W/681G/732W/749F/750D/775G/1148N/1248D/1377D/1439E, 63Q/171P/212A/260T/306G/320Q/332P/387I/390A/393G/534I/619E/681G/732W/749F/750D/775G/797W/839K/1148N/1248D/1377D/1439E, 63Q/171P/260T/306G/320R/332P/387I/390A/393G/558W/619E/749F/750D/775G/839K/1148N/1248D/1377 D/1439E, 63Q/171P/211K/212A/260T/306G/312L/332P/387I/390A/393G/534I/558W/619E/681N/749F/750D/775G/839K/1148N/1248D/1377D/1439E, 63Q/171P/260T/306G/320R/332P/387I/390A/393G/534I/558R/619E/749F/750D/775G/797W/1148N/1248D/1377D/1439E, 63Q/171P/260T/306G/332P/387I/390A/393G/558W/617D/619E/681N/732W/749F/750D/775G/1148N/1248 D/1377D/1439E, 63Q/171P/211Q/260T/306G/332P/387I/390A/393G/534I/558W/611E/681N/732W/749F/750D/775G/1148N/1248D/1377D/1439E, 63Q/171P/211K/260T/306G/320R/332P/387I/390A/393G/617E/619E/681G/732W/749F/750D/775G/1148N/1248D/1377D/1439E, 63Q/171P/260T/306G/332P/387I/390A/393G/558W/617D/681G/732W/749F/750D/775G/797W/1148N/1248 D/1377D/1439E, 63Q/171P/260T/306G/320R/332P/387I/390A/393G/534I/619E/749F/750D/775G/1148N/1248D/1377D/1439E, 63Q/171P/211K/260T/306G/332P/387I/390A/393G/619E/681N/732W/749F/750D/775G/1148N/1248D/1377 D/1439E, 63Q/171P/211K/212A/260T/306G/332P/387I/390A/393G/534I/558W/619E/749F/750D/775G/839K/1148N/1248D/1377D/1439E, 63Q/171P/212A/260T/306G/320R/332P/387I/390A/393G/619E/681N/732W/749F/750D/775G/797W/839K/1148N/1248D/1377D/1439E, 63Q/171P/212A/260T/306G/320R/332P/387I/390A/393G/611E/732W/749F/750D/775G/839K/1148N/1248D/1377D/1439E, 63Q/171P/260T/306G/320Q/332P/387I/390A/393G/558W/619E/681N/732W/749F/750D/775G/1148N/1248 D/1377D/1439E, 63Q/171P/260T/306G/312L/332P/387I/390A/393G/533R/617D/681N/732W/749F/750D/775G/797W/839K/1148N/1248D/1377D/1439E, 63Q/171P/260T/306G/332P/387I/390A/393G/558W/611E/681N/732W/749F/750D/775G/1148N/1248D/1377 D/1439E, 63Q/171P/260T/306G/312L/332P/387I/390A/393G/732W/749F/750D/775G/1148N/1248D/1377D/1439E, 63Q/171P/211Q/260T/306G/320R/332P/387I/390A/393G/558W/619E/681G/749F/750D/775G/797W/839K/1148N/1248D/1377D/1439E, 63Q/171P/260T/306G/320Q/332P/387I/390A/393G/558W/749F/750D/775G/797W/1148N/1248D/1377D/1439E, 63Q/171P/260T/306G/332P/387I/390A/393G/533R/558W/611E/619E/716L/749F/750D/775G/839K/1148N/1248D/1377D/1439E, 63Q/171P/260T/306G/312L/332P/387I/390A/393G/681G/732W/749F/750D/775G/1148N/1248D/1377D/1439E, 63Q/171P/260T/306G/320Q/332P/387I/390A/393G/534I/619E/681N/732W/749F/750D/775G/1148N/1248D/1377D/1439E, 63Q/171P/211K/260T/306G/320Q/332P/387I/390A/393G/533R/536L/619E/732W/749F/750D/775G/1148N/1248D/1377D/1439E, 63Q/171P/260T/306G/332P/387I/390A/393G/558W/617E/681N/732W/749F/750D/775G/839K/1148N/1248 D/1377D/1439E, 63Q/171P/212A/260T/306G/320R/332P/387I/390A/393G/534I/558W/681G/732W/749F/750D/775G/1148N/1248D/1377D/1439E, 63Q/171P/260T/306G/332P/387I/390A/393G/533R/534I/681N/732W/749F/750D/775G/839K/1148N/1248D/1377D/1439E, 63Q/171P/212A/260T/306G/332P/387I/390A/393G/534I/619E/681G/732W/749F/750D/775G/1148N/1248D/1377D/1439E, 63Q/171P/260T/306G/332P/387I/390A/393G/617E/619E/681G/732W/749F/750D/775G/1148N/1248D/1377 D/1439E, 63Q/171P/211Q/212A/260T/306G/320R/332P/387I/390A/393G/558W/617E/681N/732W/749F/750D/775G/1148N/1248D/1377D/1439E, 63Q/171P/212A/260T/306G/332P/387I/390A/393G/534I/558W/681N/732W/749F/750D/775G/797W/1148N/1248D/1377D/1439E, 63Q/171P/212A/260T/306G/320R/332P/387I/390A/393G/534I/732W/749F/750D/775G/1148N/1248D/1377 D/1439E, 63Q/171P/211K/260T/306G/312L/332P/387I/390A/393G/619E/732W/749F/750D/775G/1148N/1248D/1377 D/1439E, 63Q/171P/212A/260T/306G/312L/332P/387I/390A/393G/619E/732W/749F/750D/775G/839K/1148N/1248D/1377D/1439E, 63Q/171P/210P/212A/260T/306G/320R/332P/387I/390A/393G/558W/681G/732W/749F/750D/775G/1148N/1248D/1377D/1439E, 63Q/171P/212A/260T/306G/312L/332P/387I/390A/393G/534I/681N/732W/749F/750D/775G/797W/839K/1148N/1248D/1377D/1439E, 63Q/171P/211K/260T/306G/320R/332P/387I/390A/393G/558W/732W/749F/750D/775G/839K/1148N/1248 D/1377D/1439E, 63Q/171P/260T/306G/332P/387I/390A/393G/732W/749F/750D/775G/924Q/1148N/1248D/1377D/1439E, 63Q/171P/260T/306G/332P/387I/390A/393G/732W/749F/750D/775G/916L/1148N/1248D/1377D/1439E, 63Q/171P/260T/306G/332P/387I/390A/393G/732W/749F/750D/757T/775G/1148N/1248D/1377D/1439E, 63Q/171P/260T/306G/332P/387I/390A/393G/732W/737K/749F/750D/775G/1148N/1248D/1377D/1439E, 63Q/171P/260T/306G/332P/387I/390A/393G/732W/749F/750D/775G/818V/1148N/1248D/1377D/1439E, 63Q/171P/260T/306G/332P/387I/390A/393G/732W/749F/750D/775G/801G/1148N/1248D/1377D/1439E, 63Q/171P/260T/294G/306G/332P/387I/390A/393G/732W/749F/750D/775G/1148N/1248D/1377D/1439E, 63Q/171P/260T/306G/332P/387I/390A/393G/732W/749F/750D/775G/799S/1148N/1248D/1377D/1439E, 63Q/171P/260T/306G/332P/387I/390A/393G/732W/749F/750D/775G/799E/1148N/1248D/1377D/1439E, 63Q/171P/260T/306G/332P/387I/390A/393G/732W/749F/750D/775G/809G/1148N/1248D/1377D/1439E, 63Q/171P/260T/306G/332P/387I/390A/393G/732W/749F/750D/775G/791M/1148N/1248D/1377D/1439E, 63Q/171P/260T/306G/332P/387I/390A/393G/732W/737V/749F/750D/775G/1148N/1248D/1377D/1439E, 63Q/171P/260T/306G/332P/387I/390A/393G/732W/749F/750D/775G/805Q/1148N/1248D/1377D/1439E, 63Q/171P/260T/306G/332P/387I/390A/393G/732W/749F/750D/775G/799Q/1148N/1248D/1377D/1439E, 63Q/171P/260T/306G/332P/387I/390A/393G/732W/737S/749F/750D/775G/1148N/1248D/1377D/1439E, 63Q/171P/260T/306G/332P/387I/390A/393G/732W/749F/750D/775G/916M/1148N/1248D/1377D/1439E, 63Q/171P/260T/306G/332P/387I/390A/393G/732W/749F/750D/759S/775G/1148N/1248D/1377D/1439E, 63Q/171P/260T/306G/332P/387I/390A/393G/732W/749F/750D/775G/799V/1148N/1248D/1377D/1439E, 63Q/171P/260T/306G/332P/387I/390A/393G/538V/732W/749F/750D/775G/1148N/1248D/1377D/1439E, 63Q/171P/260T/306G/332P/387I/390A/393G/732W/749F/750D/775G/1109G/1148N/1248D/1377D/1439E, 63Q/168R/171P/260T/306G/332P/387I/390A/393G/732W/749F/750D/775G/1148N/1248D/1377D/1439E, 63Q/171P/260T/306G/332P/387I/390A/393G/732W/749F/750D/775G/921R/1148N/1248D/1377D/1439E, 63Q/171P/260T/306G/332P/387I/390A/393G/732W/749F/750D/775G/926T/1148N/1248D/1377D/1439E, 63Q/171P/260T/306G/332P/387I/390A/393G/732W/749F/750D/775G/916T/1148N/1248D/1377D/1439E, 63Q/171P/260T/306G/332P/387I/390A/393G/732W/737G/749F/750D/775G/1148N/1248D/1377D/1439E, or 63Q/171P/260T/306G/332P/387I/390A/393G/732W/749F/750D/775G/801R/1148N/1248D/1377D/1439E, wherein the amino acid positions are relative to the reference sequence corresponding to SEQ ID NO: 2.

[0183] In some embodiments, the amino acid sequence of the recombinant factor VIII polypeptide comprises at least a substitution or substitution set at amino acid position(s) 63/171/212/260/306/320/332/387/390/393/534/558/681/732/749/750/775/1042/1148/1248/1377/1439, 63/171/212/260/306/320/332/387/390/393/534/558/681/732/749/750/775/1041/1148/1248/1377/1439, 63/171/212/260/306/320/332/387/390/393/534/558/681/732/749/750/775/1051/1148/1248/1377/1439, 63/171/212/260/306/320/332/387/390/393/534/558/681/732/749/750/775/1148/1248/1283/1377/1439, 63/171/212/260/306/320/332/387/390/393/534/558/681/732/749/750/775/1148/1248/1281/1377/1439, 63/171/212/260/306/320/332/387/390/393/534/558/681/732/749/750/775/916/1148/1248/1377/1439, 63/171/187/212/260/306/320/332/387/390/393/534/558/681/732/749/750/775/1148/1248/1377/1439, 63/171/212/215/260/306/320/332/387/390/393/534/558/681/732/749/750/775/1148/1248/1377/1439, 63/171/178/212/260/306/320/332/387/390/393/534/558/681/732/749/750/775/1148/1248/1377/1439, 63/171/212/260/306/320/332/387/390/393/534/558/681/732/749/750/775/1050/1148/1248/1377/1439, 63/171/212/260/306/320/332/387/390/393/534/558/681/732/749/750/775/1148/1210/1248/1377/1439, 63/104/171/212/260/306/320/332/387/390/393/534/558/681/732/749/750/775/1148/1248/1377/1439, 63/171/212/260/306/320/332/387/390/393/534/558/615/681/732/749/750/775/1148/1248/1377/1439, 63/171/212/260/306/320/332/387/390/393/534/558/610/681/732/749/750/775/1148/1248/1377/1439, 63/171/212/260/306/320/332/387/390/393/534/536/558/681/732/749/750/775/1148/1248/1377/1439, 63/171/212/260/306/320/332/387/390/393/534/558/618/681/732/749/750/775/1148/1248/1377/1439, 63/171/212/260/306/320/332/387/390/393/534/558/621/681/732/749/750/775/1148/1248/1377/1439, 63/171/212/260/306/320/332/387/390/393/534/558/614/681/732/749/750/775/1148/1248/1377/1439, 63/110/171/212/260/306/320/332/387/390/393/534/558/681/732/749/750/775/1148/1248/1377/1439, 63/171/212/260/301/306/320/332/387/390/393/534/558/681/732/749/750/775/1148/1248/1377/1439, 63/171/212/260/306/320/332/387/390/393/534/558/681/732/749/750/775/1078/1148/1248/1377/1439, 63/171/212/260/306/320/332/387/390/393/534/558/681/732/749/750/775/812/1148/1248/1377/1439, 63/171/212/260/306/320/332/387/390/393/534/558/681/732/749/750/775/786/1148/1248/1377/1439, 63/127/171/212/260/306/320/332/387/390/393/534/558/681/732/749/750/775/1148/1248/1377/1439, 63/171/175/212/260/306/320/332/387/390/393/534/558/681/732/749/750/775/1148/1248/1377/1439, 63/171/212/260/306/320/332/387/390/393/534/558/681/732/749/750/775/1093/1148/1248/1377/1439, 63/171/212/260/306/320/332/387/390/393/534/558/681/732/749/750/775/1088/1148/1248/1377/1439, 63/171/212/260/306/320/332/387/390/393/534/558/650/681/732/749/750/775/1148/1248/1377/1439, 63/171/212/260/306/320/332/387/390/393/534/535/558/681/732/749/750/775/1148/1248/1377/1439, 63/171/212/260/306/320/332/387/390/393/534/558/681/732/749/750/775/806/1148/1248/1377/1439, 63/171/212/260/306/320/332/387/390/393/534/558/681/732/738/749/750/775/1148/1248/1377/1439, 63/171/212/260/306/320/332/387/390/393/534/558/681/700/732/749/750/775/1148/1248/1377/1439, 63/132/171/212/260/306/320/332/387/390/393/534/558/681/732/749/750/775/1148/1248/1377/1439, 63/171/212/260/306/320/332/387/390/393/534/558/681/732/749/750/775/1076/1148/1248/1377/1439, 63/171/212/260/306/320/332/387/390/393/534/558/681/732/749/750/775/1084/1148/1248/1377/1439, 63/171/212/260/306/320/332/387/390/393/498/534/558/681/732/749/750/775/1148/1248/1377/1439, 63/171/212/260/306/320/332/387/390/393/534/558/681/732/749/750/756/775/1148/1248/1377/1439, 63/171/212/260/306/320/332/387/390/393/534/558/681/732/749/750/775/1108/1148/1248/1377/1439, 63/171/212/260/306/320/332/387/390/393/534/558/681/732/746/749/750/775/1148/1248/1377/1439, 63/160/171/212/260/306/320/332/387/390/393/534/558/681/732/749/750/775/1148/1248/1377/1439, 63/171/212/260/306/320/332/387/390/393/534/543/558/681/732/749/750/775/1148/1248/1377/1439, 63/171/212/260/306/310/320/332/387/390/393/534/558/681/732/749/750/775/1148/1248/1377/1439, 63/171/212/260/306/320/332/387/390/393/534/558/584/681/732/749/750/775/1148/1248/1377/1439, 63/171/212/260/306/320/332/387/390/393/534/558/681/732/749/750/775/918/1148/1248/1377/1439, 63/171/212/260/306/320/332/387/390/393/534/558/681/732/749/750/775/1148/1248/1377/1439/1452, 63/171/212/260/306/320/332/387/390/393/534/558/681/732/749/750/775/790/1148/1248/1377/1439, 63/171/212/260/292/306/320/332/387/390/393/534/558/681/732/749/750/775/1148/1248/1377/1439, 63/171/212/260/306/320/332/387/390/393/534/558/681/732/749/750/775/800/1148/1248/1377/1439, 63/167/171/212/260/306/320/332/387/390/393/534/558/681/732/749/750/775/1148/1248/1377/1439, 63/171/212/260/306/320/332/387/390/393/534/558/681/732/749/750/775/892/1148/1248/1377/1439, 63/171/212/260/304/306/320/332/387/390/393/534/558/681/732/749/750/775/1148/1248/1377/1439, 63/171/212/260/306/320/332/387/390/393/534/558/681/732/749/750/775/1116/1148/1248/1377/1439, 63/171/212/260/306/320/332/387/390/393/534/558/681/732/749/750/752/775/1148/1248/1377/1439, 63/171/212/260/281/306/320/332/387/390/393/534/558/681/732/749/750/775/1148/1248/1377/1439, 63/171/212/260/306/320/332/387/390/393/534/558/681/732/749/750/775/917/1148/1248/1377/1439, 63/171/212/260/306/320/332/387/390/393/534/558/681/712/732/749/750/775/1148/1248/1377/1439, 63/171/212/260/306/320/332/387/390/393/534/558/681/732/749/750/775/1080/1148/1248/1377/1439, 63/171/212/260/306/320/332/387/390/393/534/558/681/732/749/750/775/806/1148/1248/1352/1377/1439, 63/171/212/260/306/320/332/387/390/393/534/558/681/732/749/750/775/1095/1148/1248/1377/1439, 63/171/212/260/306/320/332/387/390/393/534/558/681/732/744/749/750/775/1148/1248/1377/1439, 63/171/212/260/306/320/332/387/390/393/534/558/681/732/749/750/775/1098/1148/1248/1377/1439, 63/171/212/260/306/320/332/387/390/393/534/558/681/732/749/750/775/948/1148/1248/1377/1439, 63/119/171/212/260/306/320/332/387/390/393/534/558/681/732/749/750/775/1148/1248/1377/1439, 63/171/212/260/306/320/332/387/390/393/534/558/681/732/749/750/775/785/1148/1248/1377/1439, 63/171/212/260/306/320/332/387/390/393/534/558/681/732/749/750/775/1113/1148/1248/1377/1439, 63/171/212/260/306/320/332/387/390/393/534/558/667/681/732/749/750/775/1148/1248/1377/1439, 63/158/171/212/260/306/320/332/387/390/393/534/558/681/732/749/750/775/1148/1248/1377/1439, 63/171/212/260/306/320/332/387/390/393/534/558/580/681/732/749/750/775/1148/1248/1377/1439, 63/171/212/260/306/320/332/387/390/393/534/558/681/707/732/749/750/775/1148/1248/1377/1439, 63/171/212/260/306/320/332/387/390/393/534/558/681/731/732/749/750/775/1148/1248/1377/1439, 63/171/212/260/306/320/332/387/390/393/534/558/681/732/749/750/775/1100/1148/1248/1377/1439, 63/171/212/260/306/320/332/387/390/393/534/558/681/732/749/750/775/1089/1148/1248/1377/1439, 63/171/212/260/306/320/332/387/390/393/534/558/681/732/749/750/775/1092/1148/1248/1377/1439, 63/171/212/260/306/320/332/387/390/393/534/558/681/732/749/750/775/939/1148/1248/1377/1439, 63/171/212/260/306/320/332/387/390/393/534/558/681/732/749/750/775/1104/1148/1248/1377/1439, 63/171/212/260/306/320/332/387/390/393/534/558/681/732/736/749/750/775/1148/1248/1377/1439, 63/171/212/260/306/320/332/387/390/393/534/558/681/732/749/750/775/1148/1248/1297/1377/1439, 63/171/212/260/306/320/332/387/390/393/534/558/681/732/749/750/775/1127/1148/1248/1377/1439, 63/171/212/260/306/320/332/387/390/393/534/558/681/686/732/749/750/775/1148/1248/1377/1439, 63/171/212/260/306/320/332/387/390/393/534/558/681/732/749/750/775/1148/1129/1248/1377/1439, 63/171/212/260/306/320/332/387/390/393/534/558/681/732/749/750/775/1138/1148/1248/1377/1439, 63/171/212/260/306/320/332/387/390/393/534/558/681/732/749/750/775/786/821/1148/1248/1377/1439, 63/171/212/260/306/320/332/387/390/393/534/558/680/681/732/749/750/775/1148/1248/1377/1439, 63/171/212/260/306/132/320/332/387/390/393/534/558/681/732/749/750/775/1148/1248/1377/1439, 63/171/212/260/306/320/332/387/390/393/534/558/681/732/749/750/775/1101/1148/1248/1377/1439, 63/171/212/260/306/320/332/387/390/393/534/558/681/732/749/750/775/808/1148/1248/1377/1439, 63/171/212/260/306/320/332/387/390/393/534/558/681/732/739/749/750/775/1148/1248/1377/1439, 63/171/212/260/306/308/320/332/387/390/393/534/558/681/732/749/750/775/1148/1248/1377/1439, 63/171/212/260/306/320/332/387/390/393/534/536/555/558/619/681/749/750/775/799/805/1148/1248/1377/1439, 63/171/212/260/306/320/332/387/390/393/534/555/558/619/681/732/749/750/775/801/1148/1248/1377/1439, 63/171/212/260/306/320/332/387/390/393/534/555/558/619/681/732/749/750/775/799/1148/1248/1377/1439, 63/171/212/260/306/320/332/387/390/393/534/558/619/681/732/749/750/775/799/801/805/1148/1248/1377/1439, 63/171/212/260/306/320/332/387/390/393/534/536/555/558/619/681/749/750/775/799/1148/1248/1377/1439, 63/171/212/260/306/320/332/387/390/393/534/558/681/732/749/750/775/799/805/1148/1248/1377/1439, 63/171/212/260/306/320/332/387/390/393/534/558/681/732/749/750/775/801/1148/1248/1377/1439, 63/171/212/246/260/306/320/332/387/390/393/534/558/619/681/732/749/750/775/799/801/1148/1248/1377/1439, 63/171/212/260/306/320/332/387/390/393/534/536/555/558/619/681/732/749/750/775/1148/1248/1377/1439, 63/171/212/260/306/320/332/387/390/393/534/558/619/681/732/749/750/775/839/1148/1248/1377/1439, 63/171/212/260/306/320/332/387/390/393/534/558/619/681/732/749/750/775/799/805/1148/1248/1377/1439, 63/171/212/260/306/320/332/387/390/393/534/536/558/681/732/749/750/775/801/805/1148/1248/1377/1439, 63/171/212/260/306/320/332/387/390/393/534/555/558/619/681/732/749/750/775/799/805/1148/1248/1377/1439, 63/171/212/260/306/320/332/387/390/393/534/558/619/681/732/749/750/775/801/805/1148/1248/1377/1439, 63/171/212/260/306/320/332/387/390/393/534/555/558/619/681/732/749/750/775/1148/1248/1377/1439, 63/171/212/260/306/320/332/387/390/393/534/536/558/619/681/732/749/750/775/801/1148/1248/1377/1439, 63/171/212/260/306/320/332/387/390/393/534/558/681/732/749/750/775/801/805/1148/1248/1377/1439, 63/171/212/260/306/320/332/387/390/393/534/536/558/619/681/732/749/750/775/799/805/1148/1248/1377/1439, 63/171/212/260/306/320/332/387/390/393/534/555/558/619/681/749/750/775/799/801/805/1148/1248/1377/1439, 63/171/212/260/306/320/332/387/390/393/534/558/681/732/750/775/1148/1248/1377/1439, 63/171/212/260/306/320/332/387/390/393/534/558/616/681/732/749/750/775/1148/1248/1377/1439, 63/171/212/260/306/320/332/387/390/393/534/558/611/681/732/749/750/775/1148/1248/1377/1439, 63/171/212/260/306/320/332/370/387/390/393/534/558/614/681/732/749/750/775/1148/1248/1377/1439, 63/171/212/260/306/320/332/387/390/393/534/558/681/732/749/750/775/1148/1156/1248/1377/1439, 63/171/212/260/306/320/332/387/390/393/534/558/681/732/749/750/775/1148/1158/1248/1377/1439, 63/171/212/260/306/320/332/387/390/393/534/555/558/681/732/737/749/750/775/799/1148/1248/1377/1439, 63/171/212/260/306/320/332/387/390/393/534/536/558/619/681/732/749/750/775/809/1109/1148/1248/1377/1439, 63/171/212/260/306/320/332/387/390/393/534/536/555/558/619/681/732/737/749/750/775/799/809/839/916/921/1148/1248/1377/1439, 63/171/212/260/306/320/332/387/390/393/534/558/681/732/749/750/775/916/1109/1148/1248/1377/1439, 63/171/212/260/306/320/332/387/390/393/534/536/558/619/681/732/749/750/775/799/916/1109/1148/1248/1377/1439, 63/171/212/260/306/320/332/387/390/393/534/555/558/619/681/732/749/750/775/807/1109/1148/1248/1377/1439, 63/171/212/260/306/320/332/387/390/393/534/555/558/619/681/749/750/775/799/1148/1248/1377/1439, 63/171/212/260/306/320/332/387/390/393/534/558/619/681/732/749/750/775/799/916/1109/1148/1248/1377/1439, 63/171/212/260/306/320/332/387/390/393/534/558/619/681/732/749/750/775/1148/1248/1377/1439, 63/171/212/260/306/320/332/387/390/393/534/555/558/681/732/749/750/775/921/1148/1248/1377/1439, 63/171/212/260/306/320/332/387/390/393/534/558/619/681/732/749/750/775/916/1148/1248/1377/1439, 63/171/212/260/306/320/332/387/390/393/534/555/558/681/732/749/750/775/1148/1248/1377/1439, 63/171/212/260/306/320/332/387/390/393/534/558/681/749/750/775/1148/1248/1377/1439, 63/171/212/260/306/320/332/387/390/393/534/558/619/681/732/749/750/775/799/1148/1248/1377/1439, 63/171/212/260/306/320/332/387/390/393/534/558/681/732/749/750/775/1148/1248/1377/1439, 63/171/212/260/306/320/332/387/390/393/534/555/558/681/732/749/750/775/916/1148/1248/1377/1439, 63/171/212/260/306/320/332/387/390/393/534/558/681/732/749/750/775/839/1148/1248/1377/1439, or 63/171/212/260/306/320/332/387/390/393/534/558/681/732/749/750/775/799/1148/1248/1377/1439, wherein the amino acid positions are relative to the reference sequence corresponding to SEQ ID NO: 2.

[0184] In some embodiments, the amino acid sequence of the recombinant factor VIII polypeptide comprises at least a substitution or substitution set 63Q/171P/212A/260T/306G/320R/332P/387I/390A/393G/534I/558W/681G/732W/749F/750D/775G/1042E/1148N/1248D/1377D/1439E, 63Q/171P/212A/260T/306G/320R/332P/387I/390A/393G/534I/558W/681G/732W/749F/750D/775G/1041N/1148N/1248D/1377D/1439E, 63Q/171P/212A/260T/306G/320R/332P/387I/390A/393G/534I/558W/681G/732W/749F/750D/775G/1051H/1148N/1248D/1377D/1439E, 63Q/171P/212A/260T/306G/320R/332P/387I/390A/393G/534I/558W/681G/732W/749F/750D/775G/1148N/1248D/1283H/1377D/1439E, 63Q/171P/212A/260T/306G/320R/332P/387I/390A/393G/534I/558W/681G/732W/749F/750D/775G/1148N/1248D/1283T/1377D/1439E, 63Q/171P/212A/260T/306G/320R/332P/387I/390A/393G/534I/558W/681G/732W/749F/750D/775G/1148N/1248D/1281Q/1377D/1439E, 63Q/171P/212A/260T/306G/320R/332P/387I/390A/393G/534I/558W/681G/732W/749F/750D/775G/1148N/1248D/1281P/1377D/1439E, 63Q/171P/212A/260T/306G/320R/332P/387I/390A/393G/534I/558W/681G/732W/749F/750D/775G/916E/1148N/1248D/1377D/1439E, 63Q/171P/212A/260T/306G/320R/332P/387I/390A/393G/534I/558W/681G/732W/749F/750D/775G/1051W/1148N/1248D/1377D/1439E, 63Q/171P/187C/212A/260T/306G/320R/332P/387I/390A/393G/534I/558W/681G/732W/749F/750D/775G/1148N/1248D/1377D/1439E, 63Q/171P/212A/215E/260T/306G/320R/332P/387I/390A/393G/534I/558W/681G/732W/749F/750D/775G/1148N/1248D/1377D/1439E, 63Q/171P/212A/215P/260T/306G/320R/332P/387I/390A/393G/534I/558W/681G/732W/749F/750D/775G/1148N/1248D/1377D/1439E, 63Q/171P/212A/215S/260T/306G/320R/332P/387I/390A/393G/534I/558W/681G/732W/749F/750D/775G/1148N/1248D/1377D/1439E, 63Q/171P/178C/212A/260T/306G/320R/332P/387I/390A/393G/534I/558W/681G/732W/749F/750D/775G/1148N/1248D/1377D/1439E, 63Q/171P/212A/260T/306G/320R/332P/387I/390A/393G/534I/558W/681G/732W/749F/750D/775G/1050T/1148N/1248D/1377D/1439E, 63Q/171P/212A/260T/306G/320R/332P/387I/390A/393G/534I/558W/681G/732W/749F/750D/775G/1148N/1210T/1248D/1377D/1439E, 63Q/171P/212A/260T/306G/320R/332P/387I/390A/393G/534I/558W/681G/732W/749F/750D/775G/1148N/1248D/1281K/1377D/1439E, 63Q/171P/212A/260T/306G/320R/332P/387I/390A/393G/534I/558W/681G/732W/749F/750D/775G/1042A/1148N/1248D/1377D/1439E, 63Q/104S/171P/212A/260T/306G/320R/332P/387I/390A/393G/534I/558W/681G/732W/749F/750D/775G/1148N/1248D/1377D/1439E, 63Q/171P/212A/260T/306G/320R/332P/387I/390A/393G/534I/558W/615D/681G/732W/749F/750D/775G/1148N/1248D/1377D/1439E, 63Q/171P/212A/260T/306G/320R/332P/387I/390A/393G/534I/558W/610S/681G/732W/749F/750D/775G/1148N/1248D/1377D/1439E, 63Q/171P/212A/260T/306G/320R/332P/387I/390A/393G/534I/558W/610K/681G/732W/749F/750D/775G/1148N/1248D/1377D/1439E, 63Q/171P/212A/260T/306G/320R/332P/387I/390A/393G/534I/558W/610T/681G/732W/749F/750D/775G/1148N/1248D/1377D/1439E, 63Q/171P/212A/260T/306G/320R/332P/387I/390A/393G/534I/536P/558W/681G/732W/749F/750D/775G/1148N/1248D/1377D/1439E, 63Q/171P/212A/260T/306G/320R/332P/387I/390A/393G/534I/558W/618Y/681G/732W/749F/750D/775G/1148N/1248D/1377D/1439E, 63Q/171P/212A/260T/306G/320R/332P/387I/390A/393G/534I/558W/621W/681G/732W/749F/750D/775G/1148N/1248D/1377D/1439E, 63Q/171P/212A/260T/306G/320R/332P/387I/390A/393G/534I/558W/618P/681G/732W/749F/750D/775G/1148N/1248D/1377D/1439E, 63Q/171P/212A/260T/306G/320R/332P/387I/390A/393G/534I/558W/614F/681G/732W/749F/750D/775G/1148N/1248D/1377D/1439E, 63Q/110H/171P/212A/260T/306G/320R/332P/387I/390A/393G/534I/558W/681G/732W/749F/750D/775G/1148N/1248D/1377D/1439E, 63Q/171P/212A/260T/301K/306G/320R/332P/387I/390A/393G/534I/558W/681G/732W/749F/750D/775G/1148N/1248D/1377D/1439E, 63Q/171P/212A/260T/306G/320R/332P/387I/390A/393G/534I/558W/681G/732W/749F/750D/775G/1078S/1148N/1248D/1377D/1439E, 63Q/171P/212A/260T/306G/320R/332P/387I/390A/393G/534I/558W/681G/732W/749F/750D/775G/812G/1148N/1248D/1377D/1439E, 63Q/171P/212A/260T/306G/320R/332P/387I/390A/393G/534I/558W/681G/732W/749F/750D/775G/786C/1148N/1248D/1377D/1439E, 63Q/127V/171P/212A/260T/306G/320R/332P/387I/390A/393G/534I/558W/681G/732W/749F/750D/775G/1148N/1248D/1377D/1439E, 63Q/171P/175G/212A/260T/306G/320R/332P/387I/390A/393G/534I/558W/681G/732W/749F/750D/775G/1148N/1248D/1377D/1439E, 63Q/171P/212A/260T/306G/320R/332P/387I/390A/393G/534I/558W/681G/732W/749F/750D/775G/1093W/1148N/1248D/1377D/1439E, 63Q/171P/212A/260T/306G/320R/332P/387I/390A/393G/534I/558W/681G/732W/749F/750D/775G/1088G/1148N/1248D/1377D/1439E, 63Q/171P/212A/260T/306G/320R/332P/387I/390A/393G/534I/558W/681G/732W/749F/750D/775G/1093T/1148N/1248D/1377D/1439E, 63Q/171P/212A/260T/306G/320R/332P/387I/390A/393G/534I/558W/650M/681G/732W/749F/750D/775G/1148N/1248D/1377D/1439E, 63Q/171P/212A/260T/301M/306G/320R/332P/387I/390A/393G/534I/558W/681G/732W/749F/750D/775G/1148N/1248D/1377D/1439E, 63Q/171P/212A/260T/306G/320R/332P/387I/390A/393G/534I/535N/558W/681G/732W/749F/750D/775G/1148N/1248D/1377D/1439E, 63Q/171P/212A/260T/306G/320R/332P/387I/390A/393G/534I/558W/681G/732W/749F/750D/775G/806R/1148N/1248D/1377D/1439E, 63Q/171P/212A/260T/306G/320R/332P/387I/390A/393G/534I/558W/681G/732W/738E/749F/750D/775G/1148N/1248D/1377D/1439E, 63Q/171P/212A/260T/306G/320R/332P/387I/390A/393G/534I/558W/681G/700E/732W/749F/750D/775G/1148N/1248D/1377D/1439E, 63Q/132R/171P/212A/260T/306G/320R/332P/387I/390A/393G/534I/558W/681G/732W/749F/750D/775G/1148N/1248D/1377D/1439E, 63Q/171P/212A/260T/306G/320R/332P/387I/390A/393G/534I/558W/681G/732W/749F/750D/775G/1076G/1148N/1248D/1377D/1439E, 63Q/171P/212A/260T/306G/320R/332P/387I/390A/393G/534I/558W/681G/732W/749F/750D/775G/1084L/1148N/1248D/1377D/1439E, 63Q/171P/212A/260T/306G/320R/332P/387I/390A/393G/498A/534I/558W/681G/732W/749F/750D/775G/1148N/1248D/1377D/1439E, 63Q/171P/212A/260T/306G/320R/332P/387I/390A/393G/534I/558W/681G/732W/749F/750D/775G/786L/1148N/1248D/1377D/1439E, 63Q/171P/212A/260T/306G/320R/332P/387I/390A/393G/534I/558W/681G/732W/738F/749F/750D/775G/1148N/1248D/1377D/1439E, 63Q/171P/212A/260T/306G/320R/332P/387I/390A/393G/534I/535G/558W/681G/732W/749F/750D/775G/1148N/1248D/1377D/1439E, 63Q/171P/212A/260T/306G/320R/332P/387I/390A/393G/534I/558W/681G/732W/749F/750D/775G/806E/1148N/1248D/1377D/1439E, 63Q/171P/212A/260T/306G/320R/332P/387I/390A/393G/534I/558W/681G/732W/749F/750D/756G/775G/1148N/1248D/1377D/1439E, 63Q/171P/212A/260T/306G/320R/332P/387I/390A/393G/534I/558W/681G/732W/749F/750D/775G/1108S/1148N/1248D/1377D/1439E, 63Q/171P/212A/260T/306G/320R/332P/387I/390A/393G/534I/558W/681G/732W/749F/750D/775G/1093V/1148N/1248D/1377D/1439E, 63Q/171P/212A/260T/306G/320R/332P/387I/390A/393G/534I/558W/681G/732W/746P/749F/750D/775G/1148N/1248D/1377D/1439E, 63Q/160E/171P/212A/260T/306G/320R/332P/387I/390A/393G/534I/558W/681G/732W/749F/750D/775G/1148N/1248D/1377D/1439E, 63Q/160T/171P/212A/260T/306G/320R/332P/387I/390A/393G/534I/558W/681G/732W/749F/750D/775G/1148N/1248D/1377D/1439E, 63Q/171P/178V/212A/260T/306G/320R/332P/387I/390A/393G/534I/558W/681G/732W/749F/750D/775G/1148N/1248D/1377D/1439E, 63Q/171P/212A/260T/306G/320R/332P/387I/390A/393G/534I/543L/558W/681G/732W/749F/750D/775G/1148N/1248D/1377D/1439E, 63Q/171P/212A/260T/306G/310G/320R/332P/387I/390A/393G/534I/558W/681G/732W/749F/750D/775G/1148N/1248D/1377D/1439E, 63Q/171P/212A/260T/306G/320R/332P/387I/390A/393G/534I/558W/681G/700Q/732W/749F/750D/775G/1148N/1248D/1377D/1439E, 63Q/171P/212A/260T/306G/320R/332P/387I/390A/393G/534I/558W/681G/732W/749F/750D/775G/1093A/1148N/1248D/1377D/1439E, 63Q/171P/212A/260T/306G/320R/332P/387I/390A/393G/534I/558W/584A/681G/732W/749F/750D/775G/1148N/1248D/1377D/1439E, 63Q/171P/212A/260T/306G/320R/332P/387I/390A/393G/534I/558W/681G/732W/749F/750D/775G/918S/1148N/1248D/1377D/1439E, 63Q/171P/212A/260T/306G/320R/332P/387I/390A/393G/534I/558W/681G/732W/749F/750D/775G/1148N/1248D/1377D/1439E/1452L, 63Q/171P/212A/260T/306G/320R/332P/387I/390A/393G/534I/558W/681G/732W/738P/749F/750D/775G/1148N/1248D/1377D/1439E, 63Q/171P/212A/260T/306G/320R/332P/387I/390A/393G/534I/558W/681G/732W/749F/750D/775G/790W/1148N/1248D/1377D/1439E, 63Q/171P/212A/260T/306G/320R/332P/387I/390A/393G/534I/558W/681G/732W/749F/750D/775G/790I/1148N/1248D/1377D/1439E, 63Q/171P/212A/260T/292D/306G/320R/332P/387I/390A/393G/534I/558W/681G/732W/749F/750D/775G/1148N/1248D/1377D/1439E, 63Q/171P/212A/260T/306G/320R/332P/387I/390A/393G/534I/558W/681G/732W/749F/750D/775G/800M/1148N/1248D/1377D/1439E, 63Q/171P/212A/260T/306G/320R/332P/387I/390A/393G/534I/558W/681G/732W/749F/750D/775G/1108M/1148N/1248D/1377D/1439E, 63Q/171P/212A/260T/306G/320R/332P/387I/390A/393G/534I/558W/681G/732W/749F/750D/775G/1088S/1148N/1248D/1377D/1439E, 63Q/167G/171P/212A/260T/306G/320R/332P/387I/390A/393G/534I/558W/681G/732W/749F/750D/775G/1148N/1248D/1377D/1439E, 63Q/171P/212A/260T/306G/320R/332P/387I/390A/393G/534I/558W/681G/732W/749F/750D/775G/892T/1148N/1248D/1377D/1439E, 63Q/171P/212A/260T/306G/320R/332P/387I/390A/393G/534I/558W/681G/732W/749F/750D/775G/790P/1148N/1248D/1377D/1439E, 63Q/171P/212A/260T/306G/320R/332P/387I/390A/393G/534I/558W/681G/732W/749F/750D/775G/800R/1148N/1248D/1377D/1439E, 63Q/171P/212A/260T/306G/320R/332P/387I/390A/393G/534I/558W/681G/732W/738K/749F/750D/775G/1148N/1248D/1377D/1439E, 63Q/171P/212A/260T/304G/306G/320R/332P/387I/390A/393G/534I/558W/681G/732W/749F/750D/775G/1148N/1248D/1377D/1439E, 63Q/171P/212A/260T/306G/320R/332P/387I/390A/393G/534I/558W/681G/732W/749F/750D/775G/1116G/1148N/1248D/1377D/1439E, 63Q/171P/178Q/212A/260T/306G/320R/332P/387I/390A/393G/534I/558W/681G/732W/749F/750D/775G/1148N/1248D/1377D/1439E, 63Q/171P/212A/260T/306G/320R/332P/387I/390A/393G/534I/558W/681G/732W/749F/750D/775G/1116A/1148N/1248D/1377D/1439E, 63Q/171P/212A/260T/306G/320R/332P/387I/390A/393G/534I/558W/681G/732W/749F/750D/752G/775G/1148N/1248D/1377D/1439E, 63Q/171P/212A/260T/306G/320R/332P/387I/390A/393G/534I/558W/681G/732W/749F/750D/775G/1108W/1148N/1248D/1377D/1439E, 63Q/171P/212A/260T/306G/320R/332P/387I/390A/393G/534I/558W/681G/732W/738D/749F/750D/775G/1148N/1248D/1377D/1439E, 63Q/171P/212A/260T/281A/306G/320R/332P/387I/390A/393G/534I/558W/681G/732W/749F/750D/775G/1148N/1248D/1377D/1439E, 63Q/171P/212A/260T/306G/320R/332P/387I/390A/393G/534I/558W/681G/732W/749F/750D/775G/917G/1148N/1248D/1377D/1439E, 63Q/171P/212A/260T/306G/320R/332P/387I/390A/393G/534I/558W/681G/712M/732W/749F/750D/775G/1148N/1248D/1377D/1439E, 63Q/171P/212A/260T/306G/320R/332P/387I/390A/393G/534I/558W/681G/732W/749F/750D/775G/1080V/1148N/1248D/1377D/1439E, 63Q/171P/212A/260T/306G/320R/332P/387I/390A/393G/534I/558W/681G/732W/749F/750D/775G/806G/1148N/1248D/1352E/1377D/1439E, 63Q/171P/212A/260T/306G/320R/332P/387I/390A/393G/534I/558W/681G/732W/749F/750D/775G/1095G/1148N/1248D/1377D/1439E, 63Q/171P/212A/260T/306G/320R/332P/387I/390A/393G/534I/558W/681G/732W/749F/750D/775G/1093G/1148N/1248D/1377D/1439E, 63Q/171P/212A/260T/306G/320R/332P/387I/390A/393G/534I/558W/681G/732W/744A/749F/750D/775G/1148N/1248D/1377D/1439E, 63Q/171P/212A/260T/306G/320R/332P/387I/390A/393G/534I/543G/558W/681G/732W/749F/750D/775G/1148N/1248D/1377D/1439E, 63Q/171P/212A/260T/306G/320R/332P/387I/390A/393G/534I/558W/681G/732W/749F/750D/775G/1098G/1148N/1248D/1377D/1439E, 63Q/171P/212A/260T/281S/306G/320R/332P/387I/390A/393G/534I/558W/681G/732W/749F/750D/775G/1148N/1248D/1377D/1439E, 63Q/171P/212A/260T/306G/320R/332P/387I/390A/393G/534I/558W/681G/732W/749F/750D/756T/775G/1148N/1248D/1377D/1439E, 63Q/171P/212A/260T/306G/320R/332P/387I/390A/393G/534I/558W/681G/732W/749F/750D/775G/948S/1148N/1248D/1377D/1439E, 63Q/119V/171P/212A/260T/306G/320R/332P/387I/390A/393G/534I/558W/681G/732W/749F/750D/775G/1148N/1248D/1377D/1439E, 63Q/171P/212A/260T/306G/320R/332P/387I/390A/393G/534I/558W/681G/732W/749F/750D/775G/1116L/1148N/1248D/1377D/1439E, 63Q/171P/212A/260T/306G/320R/332P/387I/390A/393G/534I/558W/681G/732W/749F/750D/775G/785V/1148N/1248D/1377D/1439E, 63Q/171P/212A/260T/306G/320R/332P/387I/390A/393G/534I/558W/681G/732W/749F/750D/775G/1113F/1148N/1248D/1377D/1439E, 63Q/171P/212A/260T/306G/320R/332P/387I/390A/393G/534I/558W/681G/700A/732W/749F/750D/775G/1148N/1248D/1377D/1439E, 63Q/171P/212A/260T/306G/320R/332P/387I/390A/393G/534I/558W/681G/732W/749F/750D/775G/786D/1148N/1248D/1377D/1439E, 63Q/171P/175A/212A/260T/306G/320R/332P/387I/390A/393G/534I/558W/681G/732W/749F/750D/775G/1148N/1248D/1377D/1439E, 63Q/171P/212A/260T/306G/320R/332P/387I/390A/393G/534I/558W/681G/732W/749F/750D/775G/790M/1148N/1248D/1377D/1439E, 63Q/171P/212A/260T/306G/320R/332P/387I/390A/393G/534I/558W/667I/681G/732W/749F/750D/775G/1148N/1248D/1377D/1439E, 63Q/158G/171P/212A/260T/306G/320R/332P/387I/390A/393G/534I/558W/681G/732W/749F/750D/775G/1148N/1248D/1377D/1439E, 63Q/171P/212A/260T/306G/320R/332P/387I/390A/393G/534I/558W/580S/681G/732W/749F/750D/775G/1148N/1248D/1377D/1439E, 63Q/171P/212A/260T/306G/320R/332P/387I/390A/393G/534I/558W/681G/707H/732W/749F/750D/775G/1148N/1248D/1377D/1439E, 63Q/171P/212A/260T/306G/320R/332P/387I/390A/393G/534I/558W/681G/731I/732W/749F/750D/775G/1148N/1248D/1377D/1439E, 63Q/171P/212A/260T/306G/320R/332P/387I/390A/393G/534I/558W/681G/732W/749F/750D/775G/918M/1148N/1248D/1377D/1439E, 63Q/171P/212A/260T/306G/320R/332P/387I/390A/393G/534I/558W/681G/732W/749F/750D/775G/1100S/1148N/1248D/1377D/1439E, 63Q/171P/212A/260T/306G/320R/332P/387I/390A/393G/534I/558W/681G/732W/749F/750D/775G/1089S/1148N/1248D/1377D/1439E, 63Q/171P/212A/260T/306G/320R/332P/387I/390A/393G/534I/558W/681G/712Y/732W/749F/750D/775G/1148N/1248D/1377D/1439E, 63Q/171P/175H/212A/260T/306G/320R/332P/387I/390A/393G/534I/558W/681G/732W/749F/750D/775G/1148N/1248D/1377D/1439E, 63Q/171P/212A/260T/306G/320R/332P/387I/390A/393G/534I/558W/681G/732W/749F/750D/775G/1092G/1148N/1248D/1377D/1439E, 63Q/171P/212A/260T/306G/320R/332P/387I/390A/393G/534I/558W/681G/732W/749F/750D/775G/939E/1148N/1248D/1377D/1439E, 63Q/171P/212A/260T/306G/320R/332P/387I/390A/393G/534I/558W/681G/732W/749F/750D/775G/1104E/1148N/1248D/1377D/1439E, 63Q/171P/212A/260T/306G/320R/332P/387I/390A/393G/534I/558W/681G/732W/749F/750D/775G/800G/1148N/1248D/1377D/1439E, 63Q/171P/212A/260T/306G/320R/332P/387I/390A/393G/534I/558W/681G/732W/736F/749F/750D/775G/1148N/1248D/1377D/1439E, 63Q/171P/212A/260T/306G/320R/332P/387I/390A/393G/534I/543W/558W/681G/732W/749F/750D/775G/1148N/1248D/1377D/1439E, 63Q/171P/212A/260T/306G/320R/332P/387I/390A/393G/534I/558W/681G/732W/749F/750D/775G/1148N/1248D/1297A/1377D/1439E, 63Q/171P/212A/260T/306G/320R/332P/387I/390A/393G/534I/558W/681G/712L/732W/749F/750D/775G/1148N/1248D/1377D/1439E, 63Q/171P/212A/260T/306G/320R/332P/387I/390A/393G/534I/558W/681G/732W/749F/750D/775G/1127V/1148N/1248D/1377D/1439E, 63Q/171P/212A/260T/306G/320R/332P/387I/390A/393G/534I/558W/681G/732W/749F/750D/775G/939S/1148N/1248D/1377D/1439E, 63Q/171P/178M/212A/260T/306G/320R/332P/387I/390A/393G/534I/558W/681G/732W/749F/750D/775G/1148N/1248D/1377D/1439E, 63Q/171P/212A/260T/306G/320R/332P/387I/390A/393G/534I/558W/681G/731R/732W/749F/750D/775G/1148N/1248D/1377D/1439E, 63Q/171P/212A/260T/306G/320R/332P/387I/390A/393G/534I/558W/681G/686W/732W/749F/750D/775G/1148N/1248D/1377D/1439E, 63Q/171P/212A/260T/306G/320R/332P/387I/390A/393G/534I/543P/558W/681G/732W/749F/750D/775G/1148N/1248D/1377D/1439E, 63Q/171P/212A/260T/306G/320R/332P/387I/390A/393G/534I/558W/681G/732W/736G/749F/750D/775G/1148N/1248D/1377D/1439E, 63Q/171P/212A/260T/306G/320R/332P/387I/390A/393G/534I/558W/681G/732W/749F/750D/775G/1148N/1129P/1248D/1377D/1439E, 63Q/171P/212A/260T/306G/320R/332P/387I/390A/393G/534I/558W/681G/732W/749F/750D/775G/1138Q/1148N/1248D/1377D/1439E, 63Q/171P/212A/260T/306G/320R/332P/387I/390A/393G/534I/558W/681G/732W/749F/750D/775G/812V/1148N/1248D/1377D/1439E, 63Q/171P/212A/260T/306G/320R/332P/387I/390A/393G/534I/558W/681G/732W/749F/750D/775G/786D/821Q/1148N/1248D/1377D/1439E, 63Q/171P/212A/260T/306G/320R/332P/387I/390A/393G/534I/535C/558W/681G/732W/749F/750D/775G/1148N/1248D/1377D/1439E, 63Q/171P/212A/260T/306G/320R/332P/387I/390A/393G/534I/558W/680R/681G/732W/749F/750D/775G/1148N/1248D/1377D/1439E, 63Q/171P/212A/260T/306G/320R/332P/387I/390A/393G/534I/558W/681G/732W/749F/750D/775G/1116I/1148N/1248D/1377D/1439E, 63Q/171P/212A/260T/306G/320R/332P/387I/390A/393G/534I/558W/681G/732W/749F/750D/775G/1089F/1148N/1248D/1377D/1439E, 63Q/171P/212A/260T/304E/306G/320R/332P/387I/390A/393G/534I/558W/681G/732W/749F/750D/775G/1148N/1248D/1377D/1439E, 63Q/171P/178W/212A/260T/306G/320R/332P/387I/390A/393G/534I/558W/681G/732W/749F/750D/775G/1148N/1248D/1377D/1439E, 63Q/171P/212A/260T/306G/320R/332P/387I/390A/393G/534I/558W/681G/732W/749F/750D/775G/1104C/1148N/1248D/1377D/1439E, 63Q/171P/212A/260T/306G/320R/332P/387I/390A/393G/534I/558W/681G/732W/744R/749F/750D/775G/1148N/1248D/1377D/1439E, 63Q/171P/212A/260T/306G/320R/332P/387I/390A/393G/534I/558W/681G/732W/738R/749F/750D/775G/1148N/1248D/1377D/1439E, 63Q/171P/212A/260T/306G/320R/332P/387I/390A/393G/534I/558W/681G/732W/749F/750D/775G/1093 S/1148N/1248D/1377D/1439E, 63Q/171P/212A/260T/306G/320R/332P/387I/390A/393G/534I/558W/681G/712 S/732W/749F/750D/775G/1148N/1248D/1377D/1439E, 63Q/171P/187G/212A/260T/306G/320R/332P/387I/390A/393G/534I/558W/681G/732W/749F/750D/775G/1148N/1248D/1377D/1439E, 63Q/171P/212A/260T/306G/132P/320R/332P/387I/390A/393G/534I/558W/681G/732W/749F/750D/775G/1148N/1248D/1377D/1439E, 63Q/171P/212A/260T/306G/320R/332P/387I/390A/393G/534I/558W/681G/732W/749F/750D/775G/812I/1148N/1248D/1377D/1439E, 63Q/171P/212A/260T/306G/320R/332P/387I/390A/393G/534I/558W/681G/732W/749F/750D/775G/1080G/1148N/1248D/1377D/1439E, 63Q/171P/212A/260T/306G/320R/332P/387I/390A/393G/534I/558W/681G/732W/749F/750D/775G/800C/1148N/1248D/1377D/1439E, 63Q/171P/212A/260T/306G/320R/332P/387I/390A/393G/534I/558W/681G/732W/749F/750D/775G/1101G/1148N/1248D/1377D/1439E, 63Q/171P/212A/260T/306G/320R/332P/387I/390A/393G/534I/558W/681G/732W/749F/750D/775G/808K/1148N/1248D/1377D/1439E, 63Q/171P/212A/260T/306G/320R/332P/387I/390A/393G/534I/558W/681G/732W/749F/750D/775G/808S/1148N/1248D/1377D/1439E, 63Q/171P/212A/260T/306G/320R/332P/387I/390A/393G/534I/558W/681G/732W/749F/750D/775G/790A/1148N/1248D/1377D/1439E, 63Q/171P/212A/260T/306G/320R/332P/387I/390A/393G/534I/558W/681G/732W/749F/750D/775G/800V/1148N/1248D/1377D/1439E, 63Q/171P/212A/260T/306G/320R/332P/387I/390A/393G/534I/558W/680L/681G/732W/749F/750D/775G/1148N/1248D/1377D/1439E, 63Q/167R/171P/212A/260T/306G/320R/332P/387I/390A/393G/534I/558W/681G/732W/749F/750D/775G/1148N/1248D/1377D/1439E, 63Q/171P/212A/260T/306G/320R/332P/387I/390A/393G/534I/558W/681G/732W/749F/750D/752E/775G/1148N/1248D/1377D/1439E, 63Q/171P/212A/260T/306G/320R/332P/387I/390A/393G/534I/558W/681G/732W/749F/750D/775G/1093N/1148N/1248D/1377D/1439E, 63Q/119G/171P/212A/260T/306G/320R/332P/387I/390A/393G/534I/558W/681G/732W/749F/750D/775G/1148 N/1248D/1377D/1439E, 63Q/171P/212A/260T/306G/320R/332P/387I/390A/393G/534I/558W/681G/732W/739G/749F/750D/775G/1148N/1248D/1377D/1439E, 63Q/171P/212A/260T/306G/320R/332P/387I/390A/393G/534I/558W/681G/732W/749F/750D/775G/1116R/1148N/1248D/1377D/1439E, 63Q/171P/212A/260T/306G/320R/332P/387I/390A/393G/534I/558W/580Y/681G/732W/749F/750D/775G/1148N/1248D/1377D/1439E, 63Q/171P/212A/260T/304A/306G/320R/332P/387I/390A/393G/534I/558W/681G/732W/749F/750D/775G/1148N/1248D/1377D/1439E, 63Q/171P/212A/260T/306G/320R/332P/387I/390A/393G/534I/558W/681G/712Q/732W/749F/750D/775G/1148N/1248D/1377D/1439E, 63Q/171P/212A/260T/306G/320R/332P/387I/390A/393G/534I/558W/681G/732W/749F/750D/775G/806S/1148N/1248D/1377D/1439E, 63Q/171P/212A/260T/306G/320R/332P/387I/390A/393G/534I/558W/681G/712G/732W/749F/750D/775G/1148N/1248D/1377D/1439E, 63Q/171P/212A/260T/306G/320R/332P/387I/390A/393G/534I/558W/681G/732W/749F/750D/775G/790G/1148N/1248D/1377D/1439E, 63Q/171P/212A/260T/306G/320R/332P/387I/390A/393G/534I/558W/681G/732W/749F/750D/775G/1108V/1148N/1248D/1377D/1439E, 63Q/171P/212A/260T/306G/320R/332P/387I/390A/393G/534I/558W/681G/731L/732W/749F/750D/775G/1148N/1248D/1377D/1439E, 63Q/171P/212A/260T/306G/320R/332P/387I/390A/393G/534I/558W/681G/732W/749F/750D/775G/1084N/1148N/1248D/1377D/1439E, 63Q/171P/212A/260T/306G/320R/332P/387I/390A/393G/534I/558W/681G/732W/749F/750D/775G/1127L/1148N/1248D/1377D/1439E, 63Q/171P/212A/260T/306G/308P/320R/332P/387I/390A/393G/534I/558W/681G/732W/749F/750D/775G/1148N/1248D/1377D/1439E, 63Q/171P/212A/260T/306G/320R/332P/387I/390A/393G/534I/558W/681G/732W/749F/750D/775G/1076S/1148N/1248D/1377D/1439E, 63Q/171P/212A/260T/306G/320R/332P/387I/390A/393G/534I/558W/681G/732W/749F/750D/775G/1093P/1148N/1248D/1377D/1439E, 63Q/171P/212A/260T/306G/320R/332P/387I/390A/393G/534I/558W/681G/732W/749F/750D/775G/1093Y/1148N/1248D/1377D/1439E, 63Q/171P/212A/260T/306G/320R/332P/387I/390A/393G/534I/558W/681G/732W/739R/749F/750D/775G/1148N/1248D/1377D/1439E, 63Q/171P/212A/260T/306G/320R/332P/387I/390A/393G/534I/558W/681G/732W/739P/749F/750D/775G/1148N/1248D/1377D/1439E, 63Q/171P/212A/260T/306G/310V/320R/332P/387I/390A/393G/534I/558W/681G/732W/749F/750D/775G/1148N/1248D/1377D/1439E, 63Q/171P/212A/260T/306G/320R/332P/387I/390A/393G/534I/558W/681G/712T/732W/749F/750D/775G/1148N/1248D/1377D/1439E, 63Q/167H/171P/212A/260T/306G/320R/332P/387I/390A/393G/534I/558W/681G/732W/749F/750D/775G/1148N/1248D/1377D/1439E, 63Q/171P/212A/260T/306G/320R/332P/387I/390A/393G/534I/558W/681G/732W/749F/750D/775G/1093R/1148N/1248D/1377D/1439E, 63Q/171P/212A/260T/306G/320R/332P/387I/390A/393G/534I/536P/555E/558W/619E/681G/749F/750D/775G/799S/805Q/1148N/1248D/1377D/1439E, 63Q/171P/212A/260T/306G/320R/332P/387I/390A/393G/534I/555E/558W/619E/681G/732W/749F/750D/775G/801G/1148N/1248D/1377D/1439E, 63Q/171P/212A/260T/306G/320R/332P/387I/390A/393G/534I/555E/558W/619E/681G/732W/749F/750D/775G/799S/1148N/1248D/1377D/1439E, 63Q/171P/212A/260T/306G/320R/332P/387I/390A/393G/534I/558W/619E/681G/732W/749F/750D/775G/799S/801G/805Q/1148N/1248D/1377D/1439E, 63Q/171P/212A/260T/306G/320R/332P/387I/390A/393G/534I/536P/555E/558W/619E/681G/749F/750D/775G/799S/1148N/1248D/1377D/1439E, 63Q/171P/212A/260T/306G/320R/332P/387I/390A/393G/534I/558W/681G/732W/749F/750D/775G/799S/805Q/1148N/1248D/1377D/1439E, 63Q/171P/212A/260T/306G/320R/332P/387I/390A/393G/534I/558W/681G/732W/749F/750D/775G/801G/1148N/1248D/1377D/1439E, 63Q/171P/212A/246D/260T/306G/320R/332P/387I/390A/393G/534I/558W/619E/681G/732W/749F/750D/775G/799S/801G/1148N/1248D/1377D/1439E, 63Q/171P/212A/260T/306G/320R/332P/387I/390A/393G/534I/536P/555E/558W/619E/681G/732W/749F/75 OD/775G/1148N/1248D/1377D/1439E, 63Q/171P/212A/260T/306G/320R/332P/387I/390A/393G/534I/558W/619E/681G/732W/749F/750D/775G/839K/1148N/1248D/1377D/1439E, 63Q/171P/212A/260T/306G/320R/332P/387I/390A/393G/534I/558W/619E/681G/732W/749F/750D/775G/799S/805Q/1148N/1248D/1377D/1439E, 63Q/171P/212A/260T/306G/320R/332P/387I/390A/393G/534I/536P/558W/681G/732W/749F/750D/775G/801G/805Q/1148N/1248D/1377D/1439E, 63Q/171P/212A/260T/306G/320R/332P/387I/390A/393G/534I/555E/558W/619E/681G/732W/749F/750D/775G/799S/805Q/1148N/1248D/1377D/1439E, 63Q/171P/212A/260T/306G/320R/332P/387I/390A/393G/534I/558W/619E/681G/732W/749F/750D/775G/801G/805Q/1148N/1248D/1377D/1439E, 63Q/171P/212A/260T/306G/320R/332P/387I/390A/393G/534I/555E/558W/619E/681G/732W/749F/750D/775G/1148N/1248D/1377D/1439E, 63Q/171P/212A/260T/306G/320R/332P/387I/390A/393G/534I/536P/558W/619E/681G/732W/749F/750D/775G/801G/1148N/1248D/1377D/1439E, 63Q/171P/212A/260T/306G/320R/332P/387I/390A/393G/534I/558W/681G/732W/749F/750D/775G/801G/805Q/1148N/1248D/1377D/1439E, 63Q/171P/212A/260T/306G/320R/332P/387I/390A/393G/534I/536P/558W/619E/681G/732W/749F/750D/775G/799S/805Q/1148N/1248D/1377D/1439E, 63Q/171P/212A/260T/306G/320R/332P/387I/390A/393G/534I/555E/558W/619E/681G/749F/750D/775G/799S/801G/805Q/1148N/1248D/1377D/1439E, 63Q/171P/212A/260T/306G/320R/332P/387I/390A/393G/534I/558W/681G/732W/749F/750D/775G/1148N/1248D/1281H/1377D/1439E, 63Q/171P/212A/260T/306G/320R/332P/387I/390A/393G/534I/558W/681G/732W/750D/775G/1148N/1248 D/1377D/1439E, 63Q/171P/212A/260T/306G/320R/332P/387I/390A/393G/534I/558W/614H/681G/732W/749F/750D/775G/1148N/1248D/1377D/1439E, 63Q/171P/212A/260T/306G/320R/332P/387I/390A/393G/534I/558W/616D/681G/732W/749F/750D/775G/1148N/1248D/1377D/1439E, 63Q/171P/212A/260T/306G/320R/332P/387I/390A/393G/534I/558W/621K/681G/732W/749F/750D/775G/1148N/1248D/1377D/1439E, 63Q/171P/212A/260T/306G/320R/332P/387I/390A/393G/534I/558W/681G/732W/749F/750D/775G/1050E/1148N/1248D/1377D/1439E, 63Q/171P/212A/260T/306G/320R/332P/387I/390A/393G/534I/558W/610H/681G/732W/749F/750D/775G/1148N/1248D/1377D/1439E, 63Q/171P/212A/260T/306G/320R/332P/387I/390A/393G/534I/558W/611D/681G/732W/749F/750D/775G/1148N/1248D/1377D/1439E, 63Q/171P/212A/260T/306G/320R/332P/387I/390A/393G/534I/558W/681G/732W/749F/750D/775G/1042T/1148N/1248D/1377D/1439E, 63Q/171P/212A/260T/306G/320R/332P/387I/390A/393G/534I/558W/616Q/681G/732W/749F/750D/775G/1148N/1248D/1377D/1439E, 63Q/171P/212A/260T/306G/320R/332P/387I/390A/393G/534I/558W/614N/681G/732W/749F/750D/775G/1148N/1248D/1377D/1439E, 63Q/171P/212A/260T/306G/320R/332P/370A/387I/390A/393G/534I/558W/614A/681G/732W/749F/750D/775G/1148N/1248D/1377D/1439E, 63Q/171P/212A/260T/306G/320R/332P/387I/390A/393G/534I/558W/681G/732W/749F/750D/775G/1148N/1156D/1248D/1377D/1439E, 63Q/171P/212A/260T/306G/320R/332P/387I/390A/393G/534I/558W/681G/732W/749F/750D/775G/1148N/1210V/1248D/1377D/1439E, 63Q/171P/212A/260T/306G/320R/332P/387I/390A/393G/534I/558W/614T/681G/732W/749F/750D/775G/1148N/1248D/1377D/1439E, 63Q/171P/212A/260T/306G/320R/332P/387I/390A/393G/534I/558W/681G/732W/749F/750D/775G/1148N/1158N/1248D/1377D/1439E, 63Q/171P/212A/260T/306G/320R/332P/387I/390A/393G/534I/558W/681G/732W/749F/750D/775G/1148N/1248D/1281S/1377D/1439E, 63Q/171P/212A/260T/306G/320R/332P/387I/390A/393G/534I/558W/618E/681G/732W/749F/750D/775G/1148N/1248D/1377D/1439E, 63Q/171P/212A/260T/306G/320R/332P/387I/390A/393G/534I/555E/558W/681N/732W/737K/749F/750D/775G/799Q/1148N/1248D/1377D/1439E, 63Q/171P/212A/260T/306G/320R/332P/387I/390A/393G/534I/536P/558W/619E/681G/732W/749F/750D/775G/809G/1109G/1148N/1248D/1377D/1439E, 63Q/171P/212A/260T/306G/320R/332P/387I/390A/393G/534I/536K/555G/558W/619E/681G/732W/737K/749F/750D/775G/799Q/809G/839K/916T/921R/1148N/1248D/1377D/1439E, 63Q/171P/212A/260T/306G/320R/332P/387I/390A/393G/534I/558W/681G/732W/749F/750D/775G/916T/1109G/1148N/1248D/1377D/1439E, 63Q/171P/212A/260T/306G/320R/332P/387I/390A/393G/534I/536R/558W/619E/681N/732W/749F/750D/775G/799Q/916T/1109G/1148N/1248D/1377D/1439E, 63Q/171P/212A/260T/306G/320R/332P/387I/390A/393G/534I/555G/558W/619E/681N/732W/749F/750D/775G/807R/1109G/1148N/1248D/1377D/1439E, 63Q/171P/212A/260T/306G/320R/332P/387I/390A/393G/534I/555E/558W/619E/681N/749F/750D/775G/799Q/1148N/1248D/1377D/1439E, 63Q/171P/212A/260T/306G/320R/332P/387I/390A/393G/534I/558W/619E/681N/732W/749F/750D/775G/799S/916T/1109G/1148N/1248D/1377D/1439E, 63Q/171P/212A/260T/306G/320R/332P/387I/390A/393G/534I/558W/619E/681N/732W/749F/750D/775G/1148N/1248D/1377D/1439E, 63Q/171P/212A/260T/306G/320R/332P/387I/390A/393G/534I/555G/558W/681G/732W/749F/750D/775G/921R/1148N/1248D/1377D/1439E, 63Q/171P/212A/260T/306G/320R/332P/387I/390A/393G/534I/558W/619E/681N/732W/749F/750D/775G/916T/1148N/1248D/1377D/1439E, 63Q/171P/212A/260T/306G/320R/332P/387I/390A/393G/534I/555G/558W/619E/681N/732W/749F/750D/775G/799S/1148N/1248D/1377D/1439E, 63Q/171P/212A/260T/306G/320R/332P/387I/390A/393G/534I/555E/558W/681G/732W/749F/750D/775G/1148N/1248D/1377D/1439E, 63Q/171P/212A/260T/306G/320R/332P/387I/390A/393G/534I/558W/681G/749F/750D/775G/1148N/1248D/1377D/1439E, 63Q/171P/212A/260T/306G/320R/332P/387I/390A/393G/534I/558W/619E/681G/732W/749F/750D/775G/799S/1148N/1248D/1377D/1439E, 63Q/171P/212A/260T/306G/320R/332P/387I/390A/393G/534I/558W/619E/681G/732W/749F/750D/775G/1148N/1248D/1377D/1439E, 63Q/171P/212A/260T/306G/320R/332P/387I/390A/393G/534I/558W/681N/732W/749F/750D/775G/1148N/1248D/1377D/1439E, 63Q/171P/212A/260T/306G/320R/332P/387I/390A/393G/534I/555G/558W/681G/732W/749F/750D/775G/916T/1148N/1248D/1377D/1439E, 63Q/171P/212A/260T/306G/320R/332P/387I/390A/393G/534I/558W/681G/732W/749F/750D/775G/839K/1148N/1248D/1377D/1439E, or 63Q/171P/212A/260T/306G/320R/332P/387I/390A/393G/534I/558W/681G/732W/749F/750D/775G/799Q/1148N/1248D/1377D/1439E, wherein the amino acid positions are relative to the reference sequence corresponding to SEQ ID NO: 2.

[0185] In some embodiments, the amino acid sequence of the recombinant factor VIII polypeptide comprises at least a substitution or substitution set at amino acid position(s) 63/167/171/212/260/306/318/320/332/387/390/393/534/558/681/732/738/749/750/775/1148/1248/1377/1439, 63/167/171/212/260/306/318/320/332/387/390/393/534/558/681/732/749/750/775/1076/1093/1148/1248/1377/1439, 63/167/171/212/260/306/318/320/332/387/390/393/534/558/681/732/749/750/752/775/800/805/808/809/1116/1148/1248/1377/1439, 63/167/171/212/260/306/318/320/332/387/390/393/534/558/681/732/738/749/750/775/800/809/1076/1148/1248/1377/1439, 63/167/171/212/260/306/320/332/387/390/393/534/558/681/732/738/749/750/775/1148/1248/1377/1439, 63/167/171/212/260/306/320/332/387/390/393/534/558/681/732/738/749/750/775/800/805/808/809/1148/1248/1377/1439, 63/167/171/212/260/306/320/332/387/390/393/534/558/681/700/732/738/749/750/775/805/808/809/1076/1116/1148/1248/1377/1439, 63/167/171/212/260/306/320/332/387/390/393/534/558/681/700/732/738/749/750/775/1148/1248/1377/1439, 63/167/171/212/260/306/320/332/387/390/393/534/558/681/700/732/738/749/750/775/1076/1148/1248/1377/1439, 63/167/171/212/260/306/320/332/387/390/393/534/558/681/700/732/739/749/750/775/1076/1148/1248/1377/1439, 63/167/171/212/260/306/318/320/332/387/390/393/534/558/681/732/749/750/775/800/808/809/1148/1248/1377/1439, 63/167/171/L178/212/260/306/318/320/332/387/390/393/534/558/681/700/732/738/749/750/752/775/1093/1148/1248/1377/1439, 63/167/171/212/260/306/318/320/332/387/390/393/534/558/681/700/732/738/749/750/775/1148/1248/1377/1439, 63/167/171/212/260/306/318/320/332/387/390/393/534/558/681/700/732/739/749/750/775/1093/1148/1248/1377/1439, 63/167/171/212/260/306/318/320/332/387/390/393/534/558/681/700/732/749/750/752/775/1093/1148/1248/1377/1439, 63/167/171/212/260/306/318/320/332/387/390/393/534/558/681/700/732/749/750/752/775/805/808/809/1093/1116/1148/1248/1377/1439, 63/171/212/260/306/318/320/332/387/390/393/534/558/681/732/738/749/750/775/808/809/1148/1248/1377/1439, 63/171/212/260/306/318/320/332/387/390/393/534/558/681/732/738/749/750/775/1076/1148/1248/1377/1439, 63/171/212/260/306/318/320/332/387/390/393/534/558/681/732/749/750/775/1148/1248/1377/1439, 63/171/212/260/306/318/320/332/387/390/393/534/558/681/732/749/750/775/808/809/1148/1248/1377/1439, 63/171/212/260/306/318/320/332/387/390/393/534/558/681/732/749/750/775/1076/1148/1248/1377/1439, 63/171/212/260/306/318/320/332/387/390/393/534/558/681/732/739/749/750/775/1148/1248/1377/1439, 63/171/212/260/306/318/320/332/387/390/393/534/558/681/732/739/749/750/775/809/1148/1248/1377/1439, 63/171/212/260/306/318/320/332/387/390/393/534/558/681/732/739/749/750/775/809/1093/1116/1148/1248/1377/1439, 63/171/212/260/306/318/320/332/387/390/393/534/558/681/732/739/749/750/775/1093/1148/1248/1377/1439, 63/171/212/260/306/318/320/332/387/390/393/534/558/681/732/739/749/750/752/775/1093/1148/1248/1377/1439, 63/171/212/260/306/318/320/332/387/390/393/534/558/681/732/739/749/750/775/799/800/1093/1148/1248/1377/1439, 63/171/212/260/306/318/320/332/387/390/393/534/558/681/732/739/749/750/775/1116/1148/1248/1377/1439, 63/171/212/260/306/318/320/332/387/390/393/534/558/681/732/749/750/775/800/1148/1248/1377/1439, 63/171/212/260/306/318/320/332/387/390/393/534/558/681/732/749/750/775/1093/1148/1248/1377/1439, 63/171/212/260/306/318/320/332/387/390/393/534/558/681/732/749/750/752/775/1148/1248/1377/1439, 63/171/212/260/306/318/320/332/387/390/393/534/558/681/732/749/750/752/775/1093/1148/1248/1377/1439, 63/171/212/260/306/318/320/332/387/390/393/534/558/681/732/749/750/752/775/799/1148/1248/1377/1439, 63/171/212/260/306/318/320/332/387/390/393/534/558/681/732/749/750/775/799/809/1093/1148/1248/1377/1439, 63/171/212/260/306/318/320/332/387/390/393/534/558/681/732/749/750/775/799/1093/1148/1248/1377/1439, 63/171/212/260/306/318/320/332/387/390/393/534/558/681/732/738/739/749/750/775/1148/1248/1377/1439, 63/171/212/260/306/318/320/332/387/390/393/534/558/681/732/738/739/749/750/775/800/809/1148/1248/1377/1439, 63/171/212/260/306/318/320/332/387/390/393/534/558/681/732/738/749/750/775/800/1148/1248/1377/1439, 63/171/212/260/306/318/320/332/387/390/393/534/558/681/732/738/749/750/775/800/805/809/1148/1248/1377/1439, 63/171/212/260/306/318/320/332/387/390/393/534/558/681/732/738/749/750/775/809/1148/1248/1377/1439, 63/171/212/260/306/318/320/332/387/390/393/534/558/681/732/738/749/750/775/809/1093/1148/1248/1377/1439, 63/171/212/260/306/318/320/332/387/390/393/534/558/681/732/738/749/750/775/809/1093/1116/1148/1248/1377/1439, 63/171/212/260/306/318/320/332/387/390/393/534/558/681/732/738/749/750/775/809/1116/1148/1248/1377/1439, 63/171/212/260/306/320/332/387/390/393/534/558/681/732/738/749/750/775/1148/1248/1377/1439, 63/171/212/260/306/320/332/387/390/393/534/558/681/732/738/749/750/775/1076/1148/1248/1377/1439, 63/171/212/260/306/320/332/387/390/393/534/558/681/732/738/749/750/775/1076/1116/1148/1248/1377/1439, 63/171/212/260/306/320/332/387/390/393/534/558/681/732/738/739/749/750/775/805/808/809/1076/1148/1248/1377/1439, 63/171/212/260/306/320/332/387/390/393/499/534/558/681/700/732/749/750/775/809/1148/1248/1377/1439, 63/171/212/260/306/320/332/387/390/393/534/558/681/732/738/749/750/775/1093/1148/1248/1377/1439, 63/171/212/260/306/320/332/387/390/393/534/558/681/732/738/749/750/752/775/1093/1148/1248/1377/1439, 63/171/212/260/306/320/332/387/390/393/534/558/681/732/738/749/750/775/1116/1148/1248/1377/1439, 63/171/212/260/306/320/332/387/390/393/534/543P/558/681/732/738/739/749/750/775/1148/1248/1377/1439, 63/171/212/260/306/320/332/387/390/393/534/543/558/681/732/738/749/750/752/775/1116/1148/1248/1377/1439, 63/171/212/260/306/320/332/387/390/393/534/543/558/681/732/738/749/750/775/1093/1148/1248/1377/1439, 63/171/212/260/306/320/332/387/390/393/534/558/681/700/732/749/750/775/1093/1148/1248/1377/1414/1439, 63/171/212/260/306/318/320/332/387/390/393/534/558/681/732/738/749/750/775/1148/1248/1377/1439, 63/171/212/260/306/318/320/332/387/390/393/534/558/681/732/749/750/775/1148/1248/1377/1439, 63/171/212/260/306/318/320/332/387/390/393/534/558/681/732/739/749/750/752/775/799/800/809/1116/1148/1248/1339/1377/1439, 63/171/212/260/306/318/320/332/387/390/393/534/558/681/732/749/750/775/800/1148/1248/1377/1439, 63/171/212/260/306/318/320/332/387/390/393/534/558/681/732/738/749/750/752/775/1093/1148/1248/1377/1439, 63/171/212/260/306/318/320/332/387/390/393/534/558/681/700/732/738/749/750/775/1148/1248/1377/1439, 63/171/212/260/306/318/320/332/387/390/393/534/558/681/700/732/739/749/750/775/1093/1116/1148/1248/1377/1439, 63/171/212/260/306/318/320/332/387/390/393/534/558/681/700/732/738/749/750/775/809/1148/1248/1377/1439, 63/171/212/260/306/318/320/332/387/390/393/534/558/681/700/732/738/749/750/775/1093/1148/1248/1377/1439, 63/171/212/260/306/318/320/332/387/390/393/534/558/681/700/732/738/749/750/752/775/808/809/1093/1116/1148/1248/1377/1439, 63/171/212/260/306/318/320/332/387/390/393/534/558/681/700/732/738/749/750/752/775/1093/1148/1248/1377/1439, 63/171/212/260/306/318/320/332/387/390/393/534/558/681/700/732/738/749/750/775/844/1148/1248/1377/1439, 63/171/212/260/306/318/320/332/387/390/393/534/558/681/700/732/738/749/750/775/805/809/1148/1248/1377/1439, 63/171/212/260/306/318/320/332/387/390/393/534/558/681/732/738/749/750/775/1093/1148/1248/1377/1439, 63/171/212/260/306/318/320/332/387/390/393/534/558/681/732/738/749/750/775/1093/1116/1148/1248/1377/1439, 63/171/212/260/306/318/320/332/387/390/393/534/558/681/732/738/749/750/752/775/1148/1248/1377/1439, 63/171/212/260/306/318/320/332/387/390/393/534/558/681/732/738/749/750/752/775/1076/1148/1248/1377/1439, 63/171/212/260/306/318/320/332/387/390/393/534/558/681/732/738/749/750/752/775/800/809/1148/1248/1377/1439, 63/171/212/260/306/318/320/332/387/390/393/534/558/681/732/738/749/750/752/775/800/1093/1148/1248/1377/1439, 63/171/212/260/306/318/320/332/387/390/393/534/558/681/732/738/749/750/752/775/809/1148/1248/1377/1439, 63/171/212/260/306/318/320/332/387/390/393/534/558/681/732/738/749/750/752/775/866/1148/1248/1377/1439, 63/171/212/260/306/318/320/332/387/390/393/534/558/681/732/738/749/750/752/775/1116/1148/1248/1377/1439, 63/171/178/212/260/306/320/332/387/390/393/534/558/681/732/738/739/749/750/752/775/809/1076/1116/1148/1248/1377/1439, 63/171/178/212/260/306/320/332/387/390/393/534/558/681/732/738/749/750/775/800/809/1148/1248/1377/1439, 63/171/178/212/260/306/320/332/387/390/393/534/558/681/732/738/749/750/775/800/808/809/1076/1148/1248/1377/1439, 63/171/178/212/260/306/318/320/332/387/390/393/534/558/681/732/738/749/750/775/1148/1248/1377/1439, 63/171/178/212/260/306/318/320/332/387/390/393/534/558/681/732/749/750/775/1116/1148/1248/1377/1439, 63/171/178/212/260/306/318/320/332/387/390/393/534/558/681/732/738/749/750/752/775/809/1148/1248/1377/1439, 63/171/178/212/260/306/318/320/332/387/390/393/534/558/681/700/732/738/749/750/775/800/805/808/809/1148/1248/1377/1439, 63/171/178/212/260/306/318/320/332/387/390/393/534/558/681/732/738/749/750/775/805/809/866/1148/1248/1377/1439, 63/171/212/260/306/318/320/332/387/390/393/534/558/681/732/738/749/750/775/1116/1148/1248/1377/1439, 63/171/212/260/306/318/320/332/387/390/393/534/543/558/681/732/738/749/750/775/1148/1248/1377/1439, 63/171/212/260/306/318/320/332/387/390/393/534/543/558/681/732/739/749/750/775/809/1148/1248/1377/1439, 63/171/212/260/306/318/320/332/387/390/393/534/543/558/681/732/749/750/775/809/1093/1148/1248/1377/1439, 63/171/212/260/306/318/320/332/387/390/393/534/543/558/681/732/738/739/749/750/775/1093/1148/1248/1377/1439, 63/171/212/260/306/318/320/332/387/390/393/534/543/558/681/732/738/749/750/775/800/1093/1116/1148/1248/1377/1439, 63/171/212/260/306/318/320/332/387/390/393/534/543/558/681/732/738/749/750/775/809/1093/1148/1248/1377/1439, 63/171/212/260/306/318/320/332/387/390/393/534/543/558/681/732/738/749/750/775/809/1093/1116/1148/1248/1377/1439, 63/171/212/260/306/318/320/332/387/390/393/534/543/558/681/732/739/749/750/752/775/809/1093/1148/1248/1377/1439, 63/171/212/260/306/318/320/332/387/390/393/534/543/558/681/732/739/749/750/752/775/1093/1148/1248/1377/1439, 63/171/212/260/306/318/320/332/387/390/393/534/543/558/681/732/738/739/749/750/752/775/800/805/809/1093/1148/1248/1377/1439, 63/171/212/260/306/318/320/332/387/390/393/534/543/558/681/700/732/739/749/750/775/800/1093/1116/1148/1248/1377/1439, 63/171/212/260/306/318/320/332/387/390/393/534/543/558/681/700/732/739/749/750/775/805/808/809/1148/1248/1377/1439, 63/171/212/260/306/318/320/332/387/390/393/534/543/558/681/700/732/738/749/750/752/775/1148/1248/1377/1439, 63/171/212/260/306/318/320/332/387/390/393/534/543/558/681/700/732/738/749/750/752/775/809/1093/1148/1248/1377/1439, 63/171/212/260/306/318/320/332/387/390/393/534/543/558/681/732/738/749/750/775/1093/1148/1248/1377/1439, 63/171/212/260/306/318/320/332/387/390/393/534/543/558/681/700/732/738/749/750/775/1148/1248/1377/1439, 63/171/212/260/306/318/320/332/387/390/393/534/543/558/681/700/732/739/749/750/752/775/800/1093/1116/1148/1248/1377/1439, 63/171/212/260/306/318/320/332/387/390/393/534/543/558/681/700/732/738/749/750/775/809/1148/1248/1377/1439, 63/171/212/260/306/318/320/332/387/390/393/534/543/558/681/700/732/738/749/750/775/1093/1148/1248/1377/1439, 63/171/212/260/306/318/320/332/387/390/393/534/543/558/681/700/732/738/749/750/752/775/800/1093/1148/1248/1377/1439, 63/171/212/260/306/318/320/332/387/390/393/534/543/558/681/700/732/738/749/750/752/775/809/1116/1148/1248/1377/1439, 63/171/212/260/306/318/320/332/387/390/393/534/543/558/681/700/732/738/749/750/752/775/1093/1148/1248/1377/1439, 63/171/212/260/306/318/320/332/387/390/393/534/558/681/700/732/739/749/750/775/800/1093/1148/1248/1377/1439, 63/171/212/260/306/318/320/332/387/390/393/534/558/681/700/732/739/749/750/775/799/1093/1148/1248/1377/1439, 63/171/212/260/306/318/320/332/387/390/393/534/558/681/700/732/749/750/775/800/1093/1148/1248/1377/1439, 63/171/212/260/306/318/320/332/387/390/393/534/558/681/700/732/749/750/775/1116/1148/1248/1377/1439, 63/171/212/260/306/318/320/332/387/390/393/534/558/681/700/732/738/749/750/775/809/1093/1148/1248/1377/1439, 63/171/212/260/306/318/320/332/387/390/393/534/558/681/700/732/738/749/750/775/1093/1116/1148/1248/1377/1439, 63/171/212/260/306/318/320/332/387/390/393/534/558/681/700/732/738/749/750/752/775/1148/1248/1377/1439, 63/171/212/260/306/318/320/332/387/390/393/534/558/681/700/732/738/749/750/752/775/809/1093/1148/1248/1377/1439, 63/171/212/260/306/318/320/332/387/390/393/534/558/681/700/732/738/749/750/752/775/799/1116/1148/1248/1377/1439, 63/171/212/260/306/318/320/332/387/390/393/534/558/681/700/732/738/749/750/752/775/805/809/1093/1148/1248/1377/1439, 63/171/212/260/306/318/320/332/387/390/393/534/558/681/700/732/738/749/750/775/799/800/1148/1248/1377/1439, 63/171/212/260/306/318/320/332/387/390/393/534/558/681/700/732/738/749/750/775/1116/1148/1248/1377/1439, 63/171/212/260/306/318/320/332/387/390/393/534/558/681/700/732/738/749/750/775/805/808/809/1076/1148/1248/1377/1439, 63/171/212/260/306/318/320/332/387/390/393/514/534/543/558/681/732/738/749/750/775/805/808/809/1148/1248/1377/1439, 63/171/212/260/306/318/320/332/387/390/393/534/558/681/732/738/749/750/775/805/808/809/1148/1248/1377/1439, or 63/171/212/260/306/318/320/332/387/390/393/534/558/681/732/738/749/750/775/805/809/1116/1148/1248/1377/1439, wherein the amino acid positions are relative to the reference sequence corresponding to SEQ ID NO: 2.

[0186] In some embodiments, the amino acid sequence of the recombinant factor VIII polypeptide comprises at least a substitution or substitution set 63Q/167G/171P/212A/260T/306G/318G/320R/332P/387I/390A/393G/534I/558W/681G/732W/738E/749F/750D/775G/1148N/1248D/1377D/1439E, 63Q/167G/171P/212A/260T/306G/318G/320R/332P/387I/390A/393G/534I/558W/681G/732W/749F/750D/775G/1076S/1093G/1148N/1248D/1377D/1439E, 63Q/167G/171P/212A/260T/306G/318G/320R/332P/387I/390A/393G/534I/558W/681G/732W/749F/750D/752E/775G/800V/805Q/808S/809G/1116I/1148N/1248D/1377D/1439E, 63Q/167G/171P/212A/260T/306G/318G/320R/332P/387I/390A/393G/534I/558W/681G/732W/738E/749F/750D/775G/800V/809G/1076S/1148N/1248D/1377D/1439E, 63Q/167G/171P/212A/260T/306G/320R/332P/387I/390A/393G/534I/558W/681G/732W/738E/749F/750D/775G/1148N/1248D/1377D/1439E, 63Q/167G/171P/212A/260T/306G/320R/332P/387I/390A/393G/534I/558W/681G/732W/738E/749F/750D/775G/800V/805Q/808S/809G/1148N/1248D/1377D/1439E, 63Q/167G/171P/212A/260T/306G/320R/332P/387I/390A/393G/534I/558W/681N/732W/738E/749F/750D/775G/1148N/1248D/1377D/1439E, 63Q/167G/171P/212A/260T/306G/320R/332P/387I/390A/393G/534I/558W/681N/700E/732W/738E/749F/75 OD/775G/805Q/808S/809G/1076S/1116I/1148N/1248D/1377D/1439E, 63Q/167G/171P/212A/260T/306G/320R/332P/387I/390A/393G/534I/558W/681G/700E/732W/738E/749F/75 OD/775G/1148N/1248D/1377D/1439E, 63Q/167G/171P/212A/260T/306G/320R/332P/387I/390A/393G/534I/558W/681G/700E/732W/738E/749F/75 OD/775G/1076S/1148N/1248D/1377D/1439E, 63Q/167G/171P/212A/260T/306G/320R/332P/387I/390A/393G/534I/558W/681G/700E/732W/739G/749F/750D/775G/1076S/1148N/1248D/1377D/1439E, 63Q/167G/171P/212A/260T/306G/318G/320R/332P/387I/390A/393G/534I/558W/681N/732W/749F/750D/775G/800V/808S/809G/1148N/1248D/1377D/1439E, 63Q/167G/171P/178Q/212A/260T/306G/318G/320R/332P/387I/390A/393G/534I/558W/681G/700E/732W/738E/749F/750D/752E/775G/1093G/1148N/1248D/1377D/1439E, 63Q/167G/171P/212A/260T/306G/318G/320R/332P/387I/390A/393G/534I/558W/681G/700E/732W/738E/749F/750D/775G/1148N/1248D/1377D/1439E, 63Q/167G/171P/212A/260T/306G/318G/320R/332P/387I/390A/393G/534I/558W/681G/700E/732W/739G/749F/750D/775G/1093G/1148N/1248D/1377D/1439E, 63Q/167G/171P/212A/260T/306G/318G/320R/332P/387I/390A/393G/534I/558W/681G/700E/732W/749F/750D/752E/775G/1093G/1148N/1248D/1377D/1439E, 63Q/167G/171P/212A/260T/306G/318G/320R/332P/387I/390A/393G/534I/558W/681G/700E/732W/749F/750D/752E/775G/805Q/808S/809G/1093A/1116I/1148N/1248D/1377D/1439E, 63Q/171P/212A/260T/306G/318G/320R/332P/387I/390A/393G/534I/558W/681G/732W/738E/749F/750D/775G/808S/809G/1148N/1248D/1377D/1439E, 63Q/171P/212A/260T/306G/318G/320R/332P/387I/390A/393G/534I/558W/681G/732W/738E/749F/750D/775G/1076S/1148N/1248D/1377D/1439E, 63Q/171P/212A/260T/306G/318G/320R/332P/387I/390A/393G/534I/558W/681G/732W/749F/750D/775G/1148N/1248D/1377D/1439E, 63Q/171P/212A/260T/306G/318G/320R/332P/387I/390A/393G/534I/558W/681G/732W/749F/750D/775G/808S/809G/1148N/1248D/1377D/1439E, 63Q/171P/212A/260T/306G/318G/320R/332P/387I/390A/393G/534I/558W/681G/732W/749F/750D/775G/1076S/1148N/1248D/1377D/1439E, 63Q/171P/212A/260T/306G/318G/320R/332P/387I/390A/393G/534I/558W/681G/732W/739G/749F/750D/775G/1148N/1248D/1377D/1439E, 63Q/171P/212A/260T/306G/318G/320R/332P/387I/390A/393G/534I/558W/681G/732W/739G/749F/750D/775G/809G/1148N/1248D/1377D/1439E, 63Q/171P/212A/260T/306G/318G/320R/332P/387I/390A/393G/534I/558W/681G/732W/739G/749F/750D/775G/809G/1093G/1116I/1148N/1248D/1377D/1439E, 63Q/171P/212A/260T/306G/318G/320R/332P/387I/390A/393G/534I/558W/681G/732W/739G/749F/750D/775G/1093G/1148N/1248D/1377D/1439E, 63Q/171P/212A/260T/306G/318G/320R/332P/387I/390A/393G/534I/558W/681G/732W/739G/749F/750D/752E/775G/1093G/1148N/1248D/1377D/1439E, 63Q/171P/212A/260T/306G/318G/320R/332P/387I/390A/393G/534I/558W/681G/732W/739G/749F/750D/775G/799S/800V/1093G/1148N/1248D/1377D/1439E, 63Q/171P/212A/260T/306G/318G/320R/332P/387I/390A/393G/534I/558W/681G/732W/739G/749F/750D/775G/1116I/1148N/1248D/1377D/1439E, 63Q/171P/212A/260T/306G/318G/320R/332P/387I/390A/393G/534I/558W/681G/732W/749F/750D/775G/800V/1148N/1248D/1377D/1439E, 63Q/171P/212A/260T/306G/318G/320R/332P/387I/390A/393G/534I/558W/681G/732W/749F/750D/775G/1093G/1148N/1248D/1377D/1439E, 63Q/171P/212A/260T/306G/318G/320R/332P/387I/390A/393G/534I/558W/681G/732W/749F/750D/752E/775G/1148N/1248D/1377D/1439E, 63Q/171P/212A/260T/306G/318G/320R/332P/387I/390A/393G/534I/558W/681G/732W/749F/750D/752E/775G/1093G/1148N/1248D/1377D/1439E, 63Q/171P/212A/260T/306G/318G/320R/332P/387I/390A/393G/534I/558W/681G/732W/749F/750D/752E/775G/799S/1148N/1248D/1377D/1439E, 63Q/171P/212A/260T/306G/318G/320R/332P/387I/390A/393G/534I/558W/681G/732W/749F/750D/775G/799S/809G/1093G/1148N/1248D/1377D/1439E, 63Q/171P/212A/260T/306G/318G/320R/332P/387I/390A/393G/534I/558W/681G/732W/749F/750D/775G/799S/1093G/1148N/1248D/1377D/1439E, 63Q/171P/212A/260T/306G/318G/320R/332P/387I/390A/393G/534I/558W/681G/732W/738E/739G/749F/750D/775G/1148N/1248D/1377D/1439E, 63Q/171P/212A/260T/306G/318G/320R/332P/387I/390A/393G/534I/558W/681G/732W/738E/739G/749F/750D/775G/800V/809G/1148N/1248D/1377D/1439E, 63Q/171P/212A/260T/306G/318G/320R/332P/387I/390A/393G/534I/558W/681G/732W/738E/749F/750D/775G/800V/1148N/1248D/1377D/1439E, 63Q/171P/212A/260T/306G/318G/320R/332P/387I/390A/393G/534I/558W/681G/732W/738E/749F/750D/775G/800V/805Q/809G/1148N/1248D/1377D/1439E, 63Q/171P/212A/260T/306G/318G/320R/332P/387I/390A/393G/534I/558W/681G/732W/738E/749F/750D/775G/809G/1148N/1248D/1377D/1439E, 63Q/171P/212A/260T/306G/318G/320R/332P/387I/390A/393G/534I/558W/681G/732W/738E/749F/750D/775G/809G/1093G/1148N/1248D/1377D/1439E, 63Q/171P/212A/260T/306G/318G/320R/332P/387I/390A/393G/534I/558W/681G/732W/738E/749F/750D/775G/809G/1093G/1116I/1148N/1248D/1377D/1439E, 63Q/171P/212A/260T/306G/318G/320R/332P/387I/390A/393G/534I/558W/681G/732W/738E/749F/750D/775G/809G/1116111148N/1248D/1377D/1439E, 63Q/171P/212A/260T/306G/320R/332P/387I/390A/393G/534I/558W/681G/732W/738E/749F/750D/775G/1148N/1248D/1377D/1439E, 63Q/171P/212A/260T/306G/320R/332P/387I/390A/393G/534I/558W/681G/732W/738E/749F/750D/775G/1076S/1148N/1248D/1377D/1439E, 63Q/171P/212A/260T/306G/320R/332P/387I/390A/393G/534I/558W/681G/732W/738E/749F/750D/775G/1076S/1116I/1148N/1248D/1377D/1439E, 63Q/171P/212A/260T/306G/320R/332P/387I/390A/393G/534I/558W/681G/732W/738E/739G/749F/750D/775G/805Q/808S/809G/1076S/1148N/1248D/1377D/1439E, 63Q/171P/212A/260T/306G/320R/332P/387I/390A/393G/I499L/534I/558W/681G/700E/732W/749F/750D/775G/809G/1148N/1248D/1377D/1439E, 63Q/171P/212A/260T/306G/320R/332P/387I/390A/393G/534I/558W/681G/732W/738E/749F/750D/775G/1093A/1148N/1248D/1377D/1439E, 63Q/171P/212A/260T/306G/320R/332P/387I/390A/393G/534I/558W/681G/732W/738E/749F/750D/752E/775G/1093A/1148N/1248D/1377D/1439E, 63Q/171P/212A/260T/306G/320R/332P/387I/390A/393G/534I/558W/681G/732W/738E/749F/750D/775G/1116I/1148N/1248D/1377D/1439E, 63Q/171P/212A/260T/306G/320R/332P/387I/390A/393G/534I/543P/558W/681G/732W/738E/739G/749F/75 OD/775G/1148N/1248D/1377D/1439E, 63Q/171P/212A/260T/306G/320R/332P/387I/390A/393G/534I/543P/558W/681N/732W/738E/749F/750D/752E/775G/1116I/1148N/1248D/1377D/1439E, 63Q/171P/212A/260T/306G/320R/332P/387I/390A/393G/534I/543P/558W/681G/732W/738E/749F/750D/775G/1093A/1148N/1248D/1377D/1439E, 63Q/171P/212A/260T/306G/320R/332P/387I/390A/393G/534I/558W/681G/700E/732W/749F/750D/775G/1093A/1148N/1248D/1377D/1414N/1439E, 63Q/171P/212A/260T/306G/318G/320R/332P/387I/390A/393G/534I/558W/681N/732W/738E/749F/750D/775G/1148N/1248D/1377D/1439E, 63Q/171P/212A/260T/306G/318G/320R/332P/387I/390A/393G/534I/558W/681N/732W/749F/750D/775G/1148N/1248D/1377D/1439E, 63Q/171P/212A/260T/306G/318G/320R/332P/387I/390A/393G/534I/558W/681N/732W/739G/749F/750D/775G/1093G/1148N/1248D/1377D/1439E, 63Q/171P/212A/260T/306G/318G/320R/332P/387I/390A/393G/534I/558W/681N/732W/739G/749F/750D/752E/775G/799S/800V/809G/1116I/1148N/1248D/1339C/1377D/1439E, 63Q/171P/212A/260T/306G/318G/320R/332P/387I/390A/393G/534I/558W/681N/732W/739G/749F/750D/775G/1116I/1148N/1248D/1377D/1439E, 63Q/171P/212A/260T/306G/318G/320R/332P/387I/390A/393G/534I/558W/681N/732W/749F/750D/775G/800V/1148N/1248D/1377D/1439E, 63Q/171P/212A/260T/306G/318G/320R/332P/387I/390A/393G/534I/558W/681N/732W/738E/749F/750D/775G/800V/805Q/809G/1148N/1248D/1377D/1439E, 63Q/171P/212A/260T/306G/318G/320R/332P/387I/390A/393G/534I/558W/681N/732W/738E/749F/750D/775G/809G/1093G/1148N/1248D/1377D/1439E, 63Q/171P/212A/260T/306G/318G/320R/332P/387I/390A/393G/534I/558W/681N/732W/738E/749F/750D/752E/775G/1093A/1148N/1248D/1377D/1439E, 63Q/171P/212A/260T/306G/318G/320R/332P/387I/390A/393G/534I/558W/681N/732W/738E/749F/750D/752E/775G/1093G/1148N/1248D/1377D/1439E, 63Q/171P/212A/260T/306G/318G/320R/332P/387I/390A/393G/534I/558W/681N/700E/732W/738E/749F/75 OD/775G/1148N/1248D/1377D/1439E, 63Q/171P/212A/260T/306G/318G/320R/332P/387I/390A/393G/534I/558W/681N/700E/732W/739G/749F/750D/775G/1093G/1116I/1148N/1248D/1377D/1439E, 63Q/171P/212A/260T/306G/318G/320R/332P/387I/390A/393G/534I/558W/681N/700E/732W/738E/749F/75 OD/775G/809G/1148N/1248D/1377D/1439E, 63Q/171P/212A/260T/306G/318G/320R/332P/387I/390A/393G/534I/558W/681N/700E/732W/738E/749F/75 OD/775G/1093G/1148N/1248D/1377D/1439E, 63Q/171P/212A/260T/306G/318G/320R/332P/387I/390A/393G/534I/558W/681N/700E/732W/738E/749F/75 OD/752E/775G/808S/809G/1093G/1116I/1148N/1248D/1377D/1439E, 63Q/171P/212A/260T/306G/318G/320R/332P/387I/390A/393G/534I/558W/681N/700E/732W/738E/749F/75 OD/752E/775G/1093G/1148N/1248D/1377D/1439E, 63Q/171P/212A/260T/306G/318G/320R/332P/387I/390A/393G/534I/558W/681N/700E/732W/738E/749F/75 OD/775G/844H/1148N/1248D/1377D/1439E, 63Q/171P/212A/260T/306G/318G/320R/332P/387I/390A/393G/534I/558W/681N/700E/732W/738E/749F/75 OD/775G/805Q/809G/1148N/1248D/1377D/1439E, 63Q/171P/212A/260T/306G/318G/320R/332P/387I/390A/393G/534I/558W/681G/732W/738E/749F/750D/775G/1093A/1148N/1248D/1377D/1439E, 63Q/171P/212A/260T/306G/318G/320R/332P/387I/390A/393G/534I/558W/681G/732W/738E/749F/750D/775G/1093G/1148N/1248D/1377D/1439E, 63Q/171P/212A/260T/306G/318G/320R/332P/387I/390A/393G/534I/558W/681G/732W/738E/749F/750D/775G/1093G/1116I/1148N/1248D/1377D/1439E, 63Q/171P/212A/260T/306G/318G/320R/332P/387I/390A/393G/534I/558W/681G/732W/738E/749F/750D/752E/775G/1148N/1248D/1377D/1439E, 63Q/171P/212A/260T/306G/318G/320R/332P/387I/390A/393G/534I/558W/681G/732W/738E/749F/750D/752E/775G/1076S/1148N/1248D/1377D/1439E, 63Q/171P/212A/260T/306G/318G/320R/332P/387I/390A/393G/534I/558W/681G/732W/738E/749F/750D/752E/775G/800V/809G/1148N/1248D/1377D/1439E, 63Q/171P/212A/260T/306G/318G/320R/332P/387I/390A/393G/534I/558W/681G/732W/738E/749F/750D/752E/775G/800V/1093G/1148N/1248D/1377D/1439E, 63Q/171P/212A/260T/306G/318G/320R/332P/387I/390A/393G/534I/558W/681G/732W/738E/749F/750D/752E/775G/809G/1148N/1248D/1377D/1439E, 63Q/171P/212A/260T/306G/318G/320R/332P/387I/390A/393G/534I/558W/681G/732W/738E/749F/750D/752E/775G/866A/1148N/1248D/1377D/1439E, 63Q/171P/212A/260T/306G/318G/320R/332P/387I/390A/393G/534I/558W/681G/732W/738E/749F/750D/752E/775G/1093G/1148N/1248D/1377D/1439E, 63Q/171P/212A/260T/306G/318G/320R/332P/387I/390A/393G/534I/558W/681G/732W/738E/749F/750D/752E/775G/1116I/1148N/1248D/1377D/1439E, 63Q/171P/178Q/212A/260T/306G/320R/332P/387I/390A/393G/534I/558W/681G/732W/738E/739G/749F/750D/752E/775G/809G/1076S/1116I/1148N/1248D/1377D/1439E, 63Q/171P/178Q/212A/260T/306G/320R/332P/387I/390A/393G/534I/558W/681G/732W/738E/749F/750D/775G/800V/809G/1148N/1248D/1377D/1439E, 63Q/171P/178Q/212A/260T/306G/320R/332P/387I/390A/393G/534I/558W/681N/732W/738E/749F/750D/775G/800V/808S/809G/1076S/1148N/1248D/1377D/1439E, 63Q/171P/178Q/212A/260T/306G/318G/320R/332P/387I/390A/393G/534I/558W/681N/732W/738E/749F/750D/775G/1148N/1248D/1377D/1439E, 63Q/171P/178Q/212A/260T/306G/318G/320R/332P/387I/390A/393G/534I/558W/681N/732W/749F/750D/775G/1116I/1148N/1248D/1377D/1439E, 63Q/171P/178Q/212A/260T/306G/318G/320R/332P/387I/390A/393G/534I/558W/681G/732W/738E/749F/750D/752E/775G/809G/1148N/1248D/1377D/1439E, 63Q/171P/178Q/212A/260T/306G/318G/320R/332P/387I/390A/393G/534I/558W/681G/700E/732W/738E/749F/750D/775G/800V/805Q/808S/809G/1148N/1248D/1377D/1439E, 63Q/171P/178Q/212A/260T/306G/318G/320R/332P/387I/390A/393G/534I/558W/681G/732W/738E/749F/750D/775G/805Q/809G/866A/1148N/1248D/1377D/1439E, 63Q/171P/212A/260T/306G/318G/320R/332P/387I/390A/393G/534I/558W/681G/732W/738E/749F/750D/775G/1116I/1148N/1248D/1377D/1439E, 63Q/171P/212A/260T/306G/318G/320R/332P/387I/390A/393G/534I/543P/558W/681G/732W/738E/749F/75 OD/775G/1148N/1248D/1377D/1439E, 63Q/171P/212A/260T/306G/318G/320R/332P/387I/390A/393G/534I/543P/558W/681G/732W/739G/749F/75 OD/775G/809G/1148N/1248D/1377D/1439E, 63Q/171P/212A/260T/306G/318G/320R/332P/387I/390A/393G/534I/543P/558W/681G/732W/749F/750D/775G/809G/1093G/1148N/1248D/1377D/1439E, 63Q/171P/212A/260T/306G/318G/320R/332P/387I/390A/393G/534I/543P/558W/681G/732W/738E/739G/749F/750D/775G/1093A/1148N/1248D/1377D/1439E, 63Q/171P/212A/260T/306G/318G/320R/332P/387I/390A/393G/534I/543P/558W/681G/732W/738E/749F/75 OD/775G/800V/1093G/1116I/1148N/1248D/1377D/1439E, 63Q/171P/212A/260T/306G/318G/320R/332P/387I/390A/393G/534I/543P/558W/681G/732W/738E/749F/75 OD/775G/809G/1093G/1148N/1248D/1377D/1439E, 63Q/171P/212A/260T/306G/318G/320R/332P/387I/390A/393G/534I/543P/558W/681G/732W/738E/749F/75 OD/775G/809G/1093G/1116I/1148N/1248D/1377D/1439E, 63Q/171P/212A/260T/306G/318G/320R/332P/387I/390A/393G/534I/543P/558W/681N/732W/739G/749F/75 OD/752E/775G/809G/1093G/1148N/1248D/1377D/1439E, 63Q/171P/212A/260T/306G/318G/320R/332P/387I/390A/393G/534I/543P/558W/681N/732W/739G/749F/75 OD/752E/775G/1093G/1148N/1248D/1377D/1439E, 63Q/171P/212A/260T/306G/318G/320R/332P/387I/390A/393G/534I/543P/558W/681N/732W/738E/739G/749F/750D/752E/775G/800V/805Q/809G/1093G/1148N/1248D/1377D/1439E, 63Q/171P/212A/260T/306G/318G/320R/332P/387I/390A/393G/534I/543P/558W/681N/700E/732W/739G/749F/750D/775G/800V/1093G/1116I/1148N/1248D/1377D/1439E, 63Q/171P/212A/260T/306G/318G/320R/332P/387I/390A/393G/534I/543P/558W/681N/700E/732W/739G/749F/750D/775G/805Q/808S/809G/1148N/1248D/1377D/1439E, 63Q/171P/212A/260T/306G/318G/320R/332P/387I/390A/393G/534I/543P/558W/681N/700E/732W/738E/749F/750D/752E/775G/1148N/1248D/1377D/1439E, 63Q/171P/212A/260T/306G/318G/320R/332P/387I/390A/393G/534I/543P/558W/681N/700E/732W/738E/749F/750D/752E/775G/809G/1093G/1148N/1248D/1377D/1439E, 63Q/171P/212A/260T/306G/318G/320R/332P/387I/390A/393G/534I/543P/558W/681G/732W/738E/749F/75 OD/775G/1093G/1148N/1248D/1377D/1439E, 63Q/171P/212A/260T/306G/318G/320R/332P/387I/390A/393G/534I/543P/558W/681G/700E/732W/738E/749F/750D/775G/1148N/1248D/1377D/1439E, 63Q/171P/212A/260T/306G/318G/320R/332P/387I/390A/393G/534I/543P/558W/681G/700E/732W/739G/749F/750D/752E/775G/800V/1093G/1116I/1148N/1248D/1377D/1439E, 63Q/171P/212A/260T/306G/318G/320R/332P/387I/390A/393G/534I/543P/558W/681G/700E/732W/738E/749F/750D/775G/809G/1148N/1248D/1377D/1439E, 63Q/171P/212A/260T/306G/318G/320R/332P/387I/390A/393G/534I/543P/558W/681G/700E/732W/738E/749F/750D/775G/1093G/1148N/1248D/1377D/1439E, 63Q/171P/212A/260T/306G/318G/320R/332P/387I/390A/393G/534I/543P/558W/681G/700E/732W/738E/749F/750D/752E/775G/1148N/1248D/1377D/1439E, 63Q/171P/212A/260T/306G/318G/320R/332P/387I/390A/393G/534I/543P/558W/681G/700E/732W/738E/749F/750D/752E/775G/800V/1093G/1148N/1248D/1377D/1439E, 63Q/171P/212A/260T/306G/318G/320R/332P/387I/390A/393G/534I/543P/558W/681G/700E/732W/738E/749F/750D/752E/775G/809G/1116I/1148N/1248D/1377D/1439E, 63Q/171P/212A/260T/306G/318G/320R/332P/387I/390A/393G/534I/543P/558W/681G/700E/732W/738E/749F/750D/752E/775G/1093G/1148N/1248D/1377D/1439E, 63Q/171P/212A/260T/306G/318G/320R/332P/387I/390A/393G/534I/558W/681G/700E/732W/738E/749F/75 OD/775G/1148N/1248D/1377D/1439E, 63Q/171P/212A/260T/306G/318G/320R/332P/387I/390A/393G/534I/558W/681G/700E/732W/739G/749F/750D/775G/800V/1093G/1148N/1248D/1377D/1439E, 63Q/171P/212A/260T/306G/318G/320R/332P/387I/390A/393G/534I/558W/681G/700E/732W/739G/749F/750D/775G/799S/1093G/1148N/1248D/1377D/1439E, 63Q/171P/212A/260T/306G/318G/320R/332P/387I/390A/393G/534I/558W/681G/700E/732W/749F/750D/775G/800V/1093G/1148N/1248D/1377D/1439E, 63Q/171P/212A/260T/306G/318G/320R/332P/387I/390A/393G/534I/558W/681G/700E/732W/749F/750D/775G/1116I/1148N/1248D/1377D/1439E, 63Q/171P/212A/260T/306G/318G/320R/332P/387I/390A/393G/534I/558W/681G/700E/732W/738E/749F/75 OD/775G/809G/1148N/1248D/1377D/1439E, 63Q/171P/212A/260T/306G/318G/320R/332P/387I/390A/393G/534I/558W/681G/700E/732W/738E/749F/75 OD/775G/809G/1093G/1148N/1248D/1377D/1439E, 63Q/171P/212A/260T/306G/318G/320R/332P/387I/390A/393G/534I/558W/681G/700E/732W/738E/749F/75 OD/775G/1093G/1148N/1248D/1377D/1439E, 63Q/171P/212A/260T/306G/318G/320R/332P/387I/390A/393G/534I/558W/681G/700E/732W/738E/749F/75 OD/775G/1093G/1116I/1148N/1248D/1377D/1439E, 63Q/171P/212A/260T/306G/318G/320R/332P/387I/390A/393G/534I/558W/681G/700E/732W/738E/749F/75 OD/752E/775G/1148N/1248D/1377D/1439E, 63Q/171P/212A/260T/306G/318G/320R/332P/387I/390A/393G/534I/558W/681G/700E/732W/738E/749F/75 OD/752E/775G/808S/809G/1093G/1116I/1148N/1248D/1377D/1439E, 63Q/171P/212A/260T/306G/318G/320R/332P/387I/390A/393G/534I/558W/681G/700E/732W/738E/749F/75 OD/752E/775G/809G/1093G/1148N/1248D/1377D/1439E, 63Q/171P/212A/260T/306G/318G/320R/332P/387I/390A/393G/534I/558W/681G/700E/732W/738E/749F/75 OD/752E/775G/799S/1116I/1148N/1248D/1377D/1439E, 63Q/171P/212A/260T/306G/318G/320R/332P/387I/390A/393G/534I/558W/681G/700E/732W/738E/749F/75 OD/752E/775G/805Q/809G/1093A/1148N/1248D/1377D/1439E, 63Q/171P/212A/260T/306G/318G/320R/332P/387I/390A/393G/534I/558W/681G/700E/732W/738E/749F/75 OD/775G/799S/800V/1148N/1248D/1377D/1439E, 63Q/171P/212A/260T/306G/318G/320R/332P/387I/390A/393G/534I/558W/681G/700E/732W/738E/749F/75 OD/775G/1116I/1148N/1248D/1377D/1439E, 63Q/171P/212A/260T/306G/318G/320R/332P/387I/390A/393G/534I/558W/681G/700E/732W/738E/749F/75 OD/775G/805Q/808S/809G/1076S/1148N/1248D/1377D/1439E, 63Q/171P/212A/260T/306G/318G/320R/332P/387I/390A/393G/514L/534I/543P/558W/681N/732W/738E/749F/750D/775G/805Q/808S/809G/1148N/1248D/1377D/1439E, 63Q/171P/212A/260T/306G/318G/320R/332P/387I/390A/393G/534I/558W/681G/732W/738E/749F/750D/775G/805Q/808S/809G/1148N/1248D/1377D/1439E, or 63Q/171P/212A/260T/306G/318G/320R/332P/387I/390A/393G/534I/558W/681G/732W/738E/749F/750D/775G/805Q/809G/1116I/1148N/1248D/1377D/1439E, wherein the amino acid positions are relative to the reference sequence corresponding to SEQ ID NO: 2.

[0187] In some embodiments, the amino acid sequence of the recombinant factor VIII polypeptide comprises a substitution at an amino acid position set forth in Tables 4.1, 4.2, 5.1, 5.2, 6.1, 6.2, 7.1, 7.2, 8.1, 8.2, 9.1, 9.2, 10.1, 10.2, 11.1, and 15.1, wherein the amino acid positions are relative to the reference sequence corresponding to SEQ ID NO: 2.

[0188] In some embodiments, the amino acid sequence of the recombinant factor VIII polypeptide comprises at least one substitution set forth in Tables 4.1, 4.2, 5.1, 5.2, 6.1, 6.2, 7.1, 7.2, 8.1, 8.2, 9.1, 9.2, 10.1, 10.2, 11.1, and 15.1, wherein the amino acid positions are relative to the reference sequence corresponding to SEQ ID NO: 2.

[0189] In some embodiments, the amino acid sequence of the recombinant factor VIII polypeptide comprises at least a substitution or substitution set at the position(s) set forth in Tables 4.1, 4.2, 5.1, 5.2, 6.1, 6.2, 7.1, 7.2, 8.1, 8.2, 9.1, 9.2, 10.1, 10.2, 11.1, and 15.1, wherein the amino acid positions are relative to the reference sequence corresponding to SEQ ID NO: 2.

[0190] In some embodiments, the amino acid sequence of the recombinant factor VIII polypeptide comprises at least a substitution or substitution set of a variant set forth in Tables 4.1, 4.2, 5.1, 5.2, 6.1, 6.2, 7.1, 7.2, 8.1, 8.2, 9.1, 9.2, 10.1, 10.2, 11.1, and 15.1, wherein the amino acid positions are relative to the reference sequence corresponding to SEQ ID NO: 2.

[0191] In some embodiments, the recombinant factor VIII polypeptide comprises an amino acid sequence having at least 70%, 75%, 80%, 81%, 82%, 83%, 84%, 85%, 86%, 87%, 88%, 89%, 90%, 91%, 92%, 93%, 94%, 95%, 96%, 97%, 98%, or 99% or more sequence identity to the reference sequence corresponding to residues 20-1457 of SEQ ID NO: 252, 504, 706, 840, 1200, 1514, or 2072, or to the reference sequence corresponding to SEQ ID NO: 252, 504, 706, 840, 1200, 1514, or 2072.

[0192] In some embodiments, the recombinant factor VIII polypeptide comprises an amino acid sequence having at least 70%, 75%, 80%, 81%, 82%, 83%, 84%, 85%, 86%, 87%, 88%, 89%, 90%, 91%, 92%, 93%, 94%, 95%, 96%, 97%, 98%, or 99% or more sequence identity to the reference sequence corresponding to residues 20-1457 of SEQ ID NO: 252, 504, 706, 840, 1200, 1514, or 2072, or to the reference sequence corresponding to SEQ ID NO: 252, 504, 706, 840, 1200, 1514, or 2072, with the proviso that the recombinant factor VIII polypeptide does not include the amino acid sequence of SEQ ID NO: 2.

[0193] In some embodiments, the recombinant factor VIII polypeptide comprises an amino acid sequence having at least 70%, 75%, 80%, 81%, 82%, 83%, 84%, 85%, 86%, 87%, 88%, 89%, 90%, 91%, 92%, 93%, 94%, 95%, 96%, 97%, 98%, or 99% or more sequence identity to the reference sequence corresponding to residues 20-1457 of an even-numbered SEQ ID NO. of SEQ ID NOs. 4-2346 and 2360-2870, or to the reference sequence corresponding to an even-numbered SEQ ID NO. of SEQ ID NOs. 4-2346 and 2350-2870.

[0194] In some embodiments, the recombinant factor VIII polypeptide comprises an amino acid sequence having at least 70%, 75%, 80%, 81%, 82%, 83%, 84%, 85%, 86%, 87%, 88%, 89%, 90%, 91%, 92%, 93%, 94%, 95%, 96%, 97%, 98%, or 99% or more sequence identity to the reference sequence corresponding to residues 20-1457 of SEQ ID NO: 252, 504, 706, 840, 1200, 1514, or 2072, or to the reference sequence corresponding to SEQ ID NO: 252, 504, 706, 840, 1200, 1514, or 2072, wherein the amino acid sequence comprises one or more substitutions relative to the reference sequence corresponding to residues 20-1457 of SEQ ID NO: 252, 504, 706, 840, 1200, 1514, or 2072, or relative to the reference sequence corresponding to SEQ ID NO: 252, 504, 706, 840, 1200, 1514, or 2072.

[0195] In some embodiments, the amino acid sequence of the recombinant factor VIII polypeptide comprises at least a substitution at amino acid position 13, 14, 15, 16, 17, 18, 19, 20, 21, 24, 37, 56, 57, 58, 59, 61, 63, 64, 65, 85, 96, 104, 110, 119, 127, 132, 158, 160, 164, 167, 168, 171, 175, 178, 186, 187, 205, 210, 211, 212, 215, 225, 246, 257, 260, 265, 281, 292, 294, 301, 303, 304, 306, 308, 310, 311, 312, 318, 320, 321, 325, 328, 332, 334, 335, 344, 346, 347, 349, 351, 353, 354, 355, 356, 358, 359, 362, 370, 387, 388, 390, 392, 393, 397, 407, 428, 429, 433, 435, 436, 481, 487, 488, 489, 491, 498, 499, 503, 514, 527, 533, 534, 535, 536, 538, 543, 550, 551, 555, 558, 569, 580, 581, 584, 610, 611, 612, 613, 614, 615, 616, 617, 618, 619, 620, 621, 622, 643, 646, 650, 665, 667, 676, 680, 681, 682, 683, 684, 686, 693, 696, 698, 700, 706, 707, 708, 712, 716, 724, 726, 729, 731, 732, 734, 735, 736, 737, 738, 739, 740, 744, 746, 747, 748, 749, 750, 751, 752, 753, 754, 755, 756, 757, 759, 770, 773, 775, 785, 786, 787, 790, 791, 792, 793, 794, 795, 797, 798, 799, 800, 801, 802, 805, 806, 807, 808, 809, 810, 811, 812, 815, 816, 817, 818, 819, 821, 822, 824, 825, 826, 828, 830, 831, 836, 837, 838, 839, 840, 841, 844, 866, 873, 879, 892, 896, 897, 903, 907, 914, 916, 917, 918, 919, 921, 922, 923, 924, 926, 929, 938, 939, 945, 948, 951, 968, 999, 1037, 1040, 1041, 1042, 1043, 1049, 1050, 1051, 1053, 1054, 1076, 1078, 1080, 1084, 1088, 1089, 1092, 1093, 1094, 1095, 1098, 1099, 1100, 1101, 1104, 1108, 1109, 1113, 1114, 1116, 1127, 1129, 1138, 1145, 1148, 1151, 1156, 1158, 1160, 1186, 1192, 1193, 1194, 1205, 1210, 1218, 1220, 1221, 1222, 1224, 1229, 1245, 1248, 1250, 1259, 1264, 1269, 1270, 1274, 1281, 1283, 1292, 1297, 1339, 1352, 1373, 1377, 1378, 1380, 1389, 1414, 1422, 1427, 1428, 1439, 1440, 1442, or 1452, or combinations thereof, wherein the amino acid positions are relative to the reference sequence corresponding to SEQ ID NO: 252, 504, 706, 840, 1200, 1514, or 2072.

[0196] In some embodiments, the amino acid sequence of the recombinant factor VIII polypeptide comprises at least a substitution or an amino acid residue 13G/Y, 14G/M/V, 15G/S, 16A/D/G/P/V, 17S/V, 18L/R, 19G, 20L, 21M, 24V, 37H, 56E/P, 57A/L/S/T/V, 58K, 59D/G/L/M/Q/R/S/V/W, 61Q/S, 63C/E/F/G/H/I/K/L/M/N/Q/R/S/T/W/Y, 64D/G, 65A, 85Q, 96I/L/R/V/W, 104S, 110H, 119G/V, 127V, 132P/R, 158G, 160E/T, 164E, 167G/H/R, 168G/R, 171A/D/E/F/H/K/N/M/P/Q/R/S/T/V/W/Y, 175A/G/H, 178C/M/Q/V/W, 186A, 187C/G, 205R, 210P, 211G/K/P/Q/R, 212A/F/G/L/K/M/N/P/R/S/V/Y, 215E/P/S, 225R, 246D, 257I, 260E/K/T, 265R/S/W, 281A/S, 292D, 294G, 301K/M, 303G/T, 304A/E/G, 306A/D/G/P/S/T, 308P, 310G/V, 311E/G, 312L, 318C/G/K/L/M/Q/R/T/V, 320G/I/L/P/Q/R/S/T/V, 321Y, 325Y, 328G/Q/S, 332A/F/G/H/N/P/Q/R/T/V/W/Y, 334G, 335E/P, 344A/E/L, 346R/V, 347N, 349G, 351S, 353S, 354R, 355C, 356L/N, 358K/S, 359E/G, 362E/G/N/P/T/V/W, 370A, 387A/G/I/L/Q/R/S/T/V/W, 388A/P, 390A/E/G/L/M/P/S/T/V, 392A, 393A/F/G/H/M/Q/R/W/Y, 397G/N, 407V, 428F, 429L/S, 433A/G, 435Q, 436D/G, 481V, 487N, 488G, 489E/F/Q/R, 491E, 498A, 499C/L, 503S, 514L, 527A, 533R/V/Y, 534I/F/L/M, 535C/G/N, 536A/G/K/L/M/P/R/W, 538V, 543G/L/P/W, 550G, 551W, 555E/G/R/T, 558A/E/G/L/P/Q/R/S/T/V/W, 569T, 580S/Y, 581K/V, 584A, 610H/K/L/R/S/T, 611D/E, 612G/S/T, 613S, 614A/F/H/I/N/T, 615D/N, 616D/E/G/Q/W, 617D/E/G/N, 618C/E/G/P/Y, 619E, 620N/P, 621K/M/R/T/W, 622D, 643N, 646I, 650M, 665G, 667I, 676Q, 680L/R, 681A/C/E/F/G/L/N/R/Q/S/T/W, 682R, 683W, 684G/K, 686W, 693T, 696E, 698D/S/W/Y, 700A/E/Q/T/V, 706A/G/M/Y, 707H, 708A/K/T/V, 712G/L/M/Q/S/T/Y, 716K/L/W, 724I, 726A/L, 729T, 731I/L/R, 732C/D/E/G/L/R/W/K/M/Q/S/T/V/Y, 734I/R/S, 735D/S/V, 736F/G, 737F/G/K/L/M/N/S/V, 738A/D/E/F/H/K/N/P/R/S/T/Y, 739G/P/R, 740G, 744A/R, 746P, 747D, 748F/G/K/N/S/V, 749A/C/D/F/G/I/K/L/M/P/Q/R/S/T/V/Y, 750A/D/G/K/M/N/P/Q/R/S/T/V/W, 751A/D/E/Y, 752D/E/F/G/L/M/Q/R/S/V, 753D, 754W, 755G/L/P/Q/S/Y, 756G/P/R/T, 757A/G/K/T, 759S, 770W, 773H, 775E/G/K/N/P/S/V, 785V, 786C/D/L, 787W, 790A/G/I/M/P/W, 791M/T, 792H/W/Y, 793G, 794R, 795C/N/S/T, 797C/G/P/Q/T/W/Y, 798C/R/T, 799A/E/G/M/P/Q/R/S/V, 800C/G/I/L/M/N/P/Q/R/T/V/W/Y, 801A/G/I/R, 802S/V, 805C/G/H/K/L/M/P/Q/R/S/V/W, 806E/G/R/S, 807C/L/P/R, 808K/S, 809A/C/G/I/K/L/N/Q/R/S/T/V/W, 810V, 811F, 812G/I/V, 815I, 816V/W, 817A/D, 818A/E/G/P/S/V/W, 819V, 821Q, 822S/T, 824W, 825L, 826G, 828K, 830M/V, 831W, 836G/R/V/W, 837G, 838G/T, 839A/G/K/P, 840G, 841W, 844H, 866A, 873L/Q/T, 879Q, 892T, 896L/V, 897G/K/R, 903E, 907D, 914V, 916C/E/I/K/L/M/Q/T, 917G, 918M/S, 919G, 921R/W, 922W, 923M, 924I/M/P/Q/W, 926T/V, 929A/Q/V, 938R/V, 939E/S, 945K, 948S, 951V, 968A/P, 999R, 1037H/M/N/P, 1040E, 1041G/H/N, 1042A/E/T, 1043E/R, 1049G/W, 1050E/P/Q/S/T, 1051E/H/K/R/S/W, 1053A/R, 1054C, 1076G/S, 1078S, 1080G/V, 1084L/N, 1088G/S, 1089F/S, 1092G, 1093A/E/G/M/N/P/Q/R/S/T/V/W/Y, 1094S, 1095G, 1098G, 1099G, 1100I/S, 1101G, 1104C/E, 1108M/S/V/W, 1109G, 1113F, 1114A/M, 1116A/G/I/L/R, 1127L/V, 1129P, 1138Q, 1145R, 1148A/C/E/L/M/N/Q/R/S, 1151S, 1156D/G/N/R, 1158N, 1160R, 1186E, 1192D, 1193A/E/G/I/L, 1194P, 1205L, 1210M/T/V/W, 1218A/G/L/M/P, 1220D/E/L/T, 1221G/S/T/V, 1222F, 1224P, 1229D, 1245R, 1248A/C/D/E/F/G/H/I/K/M/P/Q/R/S/T/W/Y, 1250A/P/S/T, 1259T, 1264L/R/W, 1269F, 1270V, 1274N/V, 1281H/K/P/Q/R/S, 1283E/H/L/S/T, 1292Y, 1297A, 1339C, 1352E, 1373S, 1377A/C/D/E/G/H/I/M/P/R/S/V/T/Y, 1378A/C/D/E, 1380A/G/W, 1389W, 1414A/C/D/E/G/H/N/P/T/W, 1422I, 1427Y, 1428G, 1439A/E/H/L/S/T, 1440A/C/E/G/S/T, or 1442T, or combinations thereof, wherein the amino acid positions are relative to the reference sequence corresponding to SEQ ID NO: 252, 504, 706, 840, 1200, 1514, or 2072.

[0197] In some embodiments, the amino acid sequence of the recombinant factor VIII polypeptide comprises at least a substitution at amino acid position 63, 171, 212, 260, 306, 317, 320, 332, 387, 390, 393, 534, 558, 681, 732, 738, 749, 750, 775, 1148, 1248, 1377, or 1439, or combinations thereof, wherein the amino acid positions are relative to the reference sequence corresponding to SEQ ID NO: 252, 504, 706, 840, 1200, 1514, or 2072.

[0198] In some embodiments, the amino acid sequence of the recombinant factor VIII polypeptide comprises at least a substitution or an amino acid residue 63C/E/F/G/H/I/K/L/M/N/Q/R/S/T/W/Y, 171A/D/E/F/H/K/N/M/P/Q/R/S/T/V/W/Y, 212A/F/G/L/K/M/N/P/R/S/V/Y, 260E/K/T, 306A/D/G/P/S/T, 318C/G/K/L/M/Q/R/T/V, 320G/I/L/P/Q/R/S/T/V, 332A/F/G/H/N/P/Q/R/T/V/W/Y, 387A/G/I/L/Q/R/S/T/V/W, 390A/E/G/L/M/P/S/T/V, 393A/F/G/H/M/Q/R/W/Y, 499C/L, 534I/F/L/M, 558A/E/G/L/P/Q/R/S/T/V/W, 681A/C/E/F/G/L/N/R/Q/S/T/W, 700A/E/Q/T/V, 732C/D/E/G/L/R/W/K/M/Q/S/T/V/Y, 738A/D/E/F/H/K/N/P/R/S/T/Y, 749A/C/D/F/G/I/K/L/M/P/Q/R/S/T/V/Y, 750A/D/G/K/M/N/P/Q/R/S/T/V/W, 752D/E/F/G/L/M/Q/R/S/V, 775E/G/K/N/P/S/V, 800C/G/I/L/M/N/P/Q/R/T/V/W/Y, 805C/G/H/K/L/M/P/Q/R/S/V/W, 809A/C/G/I/K/L/N/Q/R/S/T/V/W, 1093A/E/G/M/N/P/Q/R/S/T/V/W/Y, 1148A/C/E/L/M/N/Q/R/S, 1248A/C/D/E/F/G/H/I/K/M/P/Q/R/S/T/W/Y, 1377A/C/D/E/G/H/I/M/P/R/S/V/T/Y, 1414A/C/D/E/G/H/N/P/T/W, or 1439A/E/H/L/S/T, or combinations thereof, wherein the amino acid positions are relative to the reference sequence corresponding to SEQ ID NO: 252, 504, 706, 840, 1200, 1514, or 2072.

[0199] In some embodiments, the amino acid sequence of the recombinant factor VIII polypeptide comprises at least a substitution or an amino acid residue 63Q, 171P, 212A, 260T, 306G, 317G, 320R, 332P, 387I, 390A, 393G, 534I, 558W, 681G, 732W, 7338E, 749F, 750D, 775G, 1148N, 1248D, 1377D, or 1439E, or combinations thereof, wherein the amino acid positions are relative to the reference sequence corresponding to SEQ ID NO: 252, 504, 706, 840, 1200, 1514, or 2072.

[0200] In some embodiments, the recombinant factor VIII polypeptide comprises an amino acid sequence having at least 70%, 75%, 80%, 81%, 82%, 83%, 84%, 85%, 86%, 87%, 88%, 89%, 90%, 91%, 92%, 93%, 94%, 95%, 96%, 97%, 98%, or 99% or more sequence identity to the reference sequence corresponding to residues 20-1457 of SEQ ID NO: 252, or to the reference sequence corresponding to SEQ ID NO: 252, wherein the amino acid sequence comprises one or more substitutions relative to the reference sequence corresponding to residues 20-1457 of SEQ ID NO: 252, or relative to the reference sequence corresponding to SEQ ID NO: 252.

[0201] In some embodiments, the amino acid sequence of the recombinant factor VIII polypeptide comprises at least a substitution or substitution set at amino acid position(s) 1380, 388, 1043, 610, 1274, 1220, 1442, 1193, 621, 1054, 755, 1041, 748, 1049, 1221, 1051, 612, 1037, 616, 387, 489, 750, 1224, 618, 1050, 1053, 896, 897, 749, 260, 481, 613, 756, 63, 265, 752, 1218, 1378, 614, 1440, 1439, 1205, 1222, 1389, 1269, 390, 397/1218, 757, 1373, 346, 63/1248, 349, 306/355/1422, 1422, 306/346/708, 1148, 171/346/1248, 63/797/799/1248/1422, 171/799, 362, 1248, 171/306/346/999/1248, 171/1148, 734/799/1248/1422, 63/732, 63/171/306/346/732, 171, 171/1422, 63/362/732/799/1248, 999/1148/1422, 346/349, 306/349, 63/171/1148/1151, 306, 344/349/354/1250, 1250, 63/306/344/349/354/503/1248, 59/63/332/349/503/706/708, 63/306/344/349/354/706/1248, 59/63, 332/706/708/1248/1250, 503, 59/63/349/354, 59/349/708, 59/306/344/1248, 344/1248/1250, 708, 63/344/349, 59, 63/344/349/354, 706, 59/306/770, 63/347/354/1248, or 354/503, wherein the amino acid positions are relative to the reference sequence corresponding to SEQ ID NO: 252.

[0202] In some embodiments, the amino acid sequence of the recombinant factor VIII polypeptide comprises at least a substitution or substitution set 1380W, 388A, 1043E, 1043R, 610R, 1274N, 1220T, 1442T, 1193L, 621T, 1054C, 755Q, 1041G, 748S, 1049G, 1221V, 1051E, 612G, 1037H, 616E, 1041H, 387S, 489R, 621M, 489Q, 750G, 1224P, 618C, 616G, 612T, 1050Q, 1053A, 616W, 896V, 489F, 1050P, 897G, 749T, 1274V, 1220L, 260E, 481V, 613S, 387G, 621R, 756R, 63R, 265S, 1221T, 1380G, 752G, 748K, 755L, 1218A, 748N, 1378E, 614I, 749F, 387V, 750T, 1193G, 749V, 1378A, 750V, 387T, 387Q, 750A, 1037N, 1440A, 1051S, 1221G, 1378D, 1440S, 387R, 1193A, 387I, 1218M, 265W, 1440E, 1439L, 1440T, 612S, 1049W, 1221S, 1220D, 749G, 749S, 1218G, 1205L, 1222F, 1193E, 1050S, 1389W, 1439E, 260T, 1037P, 1051K, 1269F, 265R, 1051R, 1218L, 897R, 388P, 748G, 756P, 748F, 390A, 610L, 755G, 749R, 748V, 1380A, 1440C, 397N/1218M, 1037M, 1218P, 757K, 1373S, 1440G, 1193I, 1439T, 750D, 390G, 756G, 1220E, 1378C, 618G, 346R, 63Q/1248D, 349G, 306G/355C/1422I, 1422I, 306G/346R/708T, 1148N, 171P/346R/1248D, 63Q/797T/799R/1248D/1422I, 171P/799R, 362P, 1248D, 63Q, 171P/306G/346R/999R/1248D, 171P/1148N, 734S/799R/1248D/1422I, 63Q/732E, 63Q/171P/306G/346R/732G, 171P, 171P/1422I, 63Q/362P/732G/799R/1248D, 999R/1148N/1422I, 346R/349G, 306G/349G, 63Q/171P/1148N/1151S, 306G, 344E/349G/354R/1250T, 63G, 1250T, 63R/306G/344E/349G/354R/503S/1248R, 59D/63S/332P/349G/503S/706M/708K, 63S/306G/344A/349G/354R/706M/1248R, 1248R, 59D/63G, 332P/706M/708K/1248R/1250T, 503S, 59D/63R/349G/354R, 59D/349G/708K, 59D/306G/344E/1248R, 344E/1248R/1250T, 708K, 63R/344E/349G, 59D, 63S/344A/349G/354R, 706M, 59D/306G/770W, 63G/347N/354R/1248R, or 354R/503S, wherein the amino acid positions are relative to the reference sequence corresponding to SEQ ID NO: 252.

[0203] In some embodiments, the amino acid sequence of the recombinant factor VIII polypeptide comprises at least a substitution or substitution set M1380W, I388A, F1043E, F1043R, I610R, I1274N, S1220T, I1442T, F1193L, Q621T, L1054C, A755Q, Y1041G, Y748S, Y1049G, L1221V, M1051E, R612G, F1037H, N616E, Y1041H, F387S, S489R, Q621M, S489Q, L750G, S1224P, A618C, N616G, R612T, I1050Q, T1053A, N616W, I896V, S489F, I1050P, M897G, L749T, I1274V, S1220L, S260E, L481V, F613S, F387G, Q621R, I756R, V63R, I265S, L1221T, M1380G, K752G, Y748K, A755L, F1218A, Y748N, T1378E, L614I, L749F, F387V, L750T, F1193G, L749V, T1378A, L750V, F387T, F387Q, L750A, F1037N, H1440A, M1051S, L1221G, T1378D, H1440S, F387R, F1193A, F387I, F1218M, I265W, H1440E, V1439L, H1440T, R612S, Y1049W, L1221S, S1220D, L749G, L749S, F1218G, I1205L, Y1222F, F1193E, I1050S, S1389W, V1439E, S260T, F1037P, M1051K, I1269F, I265R, M1051R, F1218L, M897R, I388P, Y748G, I756P, Y748F, I390A, I610L, A755G, L749R, Y748V, M1380A, H1440C, H397N/F1218M, F1037M, F1218P, E757K, V1373S, H1440G, F1193I, V1439T, L750D, I390G, I756G, S1220E, T1378C, A618G, D346R, V63Q/L1248D, P349G, E306G/R355C/L1422I, L1422I, E306G/D346R/I708T, T1148N, L171P/D346R/L1248D, V63Q/M797T/K799R/L1248D/L1422I, L171P/K799R, A362P, L1248D, V63Q, L171P/E306G/D346R/Q999R/L1248D, L171P/T1148N, T734S/K799R/L1248D/L1422I, V63Q/K732E, V63Q/L171P/E306G/D346R/K732G, L171P, L171P/L1422I, V63Q/A362P/K732G/K799R/L1248D, Q999R/T1148N/L1422I, D346R/P349G, E306G/P349G, V63Q/L171P/T1148N/G1151S, E306G, K344E/P349G/L354R/V1250T, V63G, V1250T, V63R/E306G/K344E/P349G/L354R/R503S/L1248R, F59D/V63S/S332P/P349G/R503S/L706M/I708K, V63S/E306G/K344A/P349G/L354R/L706M/L1248R, L1248R, F59D/V63G, S332P/L706M/I708K/L1248R/V1250T, R503S, F59D/V63R/P349G/L354R, F59D/P349G/I708K, F59D/E306G/K344E/L1248R, K344E/L1248R/V1250T, I708K, V63R/K344E/P349G, F59D, V63S/K344A/P349G/L354R, L706M, F59D/E306G/R770W, V63G/S347N/L354R/L1248R, or L354R/R503S, wherein the amino acid positions are relative to the reference sequence corresponding to SEQ ID NO: 252.

[0204] In some embodiments, the recombinant factor VIII polypeptide comprises an amino acid sequence having at least 70%, 75%, 80%, 81%, 82%, 83%, 84%, 85%, 86%, 87%, 88%, 89%, 90%, 91%, 92%, 93%, 94%, 95%, 96%, 97%, 98%, or 99% or more sequence identity to the reference sequence corresponding to residues 20-1457 of SEQ ID NO: 504, or to the reference sequence corresponding to SEQ ID NO: 504, wherein the amino acid sequence comprises one or more substitutions relative to the reference sequence corresponding to residues 20-1457 of SEQ ID NO: 504, or relative to the reference sequence corresponding to SEQ ID NO: 504.

[0205] In some embodiments, the amino acid sequence of the recombinant factor VIII polypeptide comprises at least a substitution or substitution set at amino acid position(s) 750, 1051, 260, 756, 1193, 332, 897, 387, 1037, 306/749, 1270, 489, 487, 488, 903, 171/1248/1440, 260/1148/1378, 171/260/387/750/1248, 171/260, 171/260/387/750/1051/1148, 171, 750/1051/1148, 171/260/756, 171/1248, 171/1148, 59, 1440, 332/750/1248, 756/1248, 1248, 171/387/1248/1440, 750/1440, 59/171/750, 171/1193/1248, 750/1148/1193/1440, 1148, 171/387/1051, 748, 306, 306/387/390/749/1220, 390, 306/390/1037, 306/612/749, 387/390/749, 63/390/503/749, 1220, 63/306, 749, 306/390/749/1037, 306/749/1220, 306/387/390/612/749/1037, or 328, wherein the amino acid positions are relative to the reference sequence corresponding to SEQ ID NO: 504.

[0206] In some embodiments, the amino acid sequence of the recombinant factor VIII polypeptide comprises at least a substitution or substitution set 750D, 1051K, 1051S, 260T, 756P, 1193A, 332P, 897R, 387Q, 1037N, 387R, 306G/749F, 1270V, 489E, 487N, 488G, 903E, 171P/1248D/1440T, 260T/1148N/1378D, 171P/260T/387I/750D/1248D, 171P/260T, 171P/260T/387I/750D/1051S/1148N, 171P, 750D/1051S/1148N, 171P/260T/756P, 171P/1248D, 171P/1148N, 387I, 59D, 1440S, 332P/750D/1248D, 756P/1248D, 1248D, 171P/387I/1248D/1440S, 750D/1440S, 59D/171P/750D, 171P/1193A/1248D, 750D/1148N/1193A/1440S, 1148N, 171P/387I/1051K, 748G, 306G, 306G/387R/390A/749F/1220D, 390A, 306G/390A/1037N, 306G/612S/749F, 387V/390A/749F, 63S/390A/503S/749F, 387R/390A/749R, 1220D, 63S/306G, 749F, 306G/390A/749F/1037N, 387V, 306G/749F/1220D, 306G/387V/390A/612S/749F/1037N, or 328S, wherein the amino acid positions are relative to the reference sequence corresponding to SEQ ID NO: 504.

[0207] In some embodiments, the amino acid sequence of the recombinant factor VIII polypeptide comprises at least a substitution or substitution set L750D, M1051K, M1051S, S260T, I756P, F1193A, S332P, M897R, F387Q, F1037N, F387R, E306G/L749F, I1270V, S489E, Q487N, A488G, Q903E, L171P/L1248D/H1440T, S260T/T1148N/T1378D, L171P/S260T/F387I/L750D/L1248D, L171P/S260T, L171P/S260T/F387I/L750D/M1051S/T1148N, L171P, L750D/M1051S/T1148N, L171P/S260T/I756P, L171P/L1248D, L171P/T1148N, F387I, F59D, H1440S, S332P/L750D/L1248D, I756P/L1248D, L1248D, L171P/F387I/L1248D/H1440S, L750D/H1440S, F59D/L171P/L750D, L171P/F1193A/L1248D, L750D/T1148N/F1193A/H1440S, T1148N, L171P/F387I/M1051K, Y748G, E306G, E306G/F387R/I390A/L749F/S1220D, I390A, E306G/I390A/F1037N, E306G/R612S/L749F, F387V/I390A/L749F, V63S/I390A/R503S/L749F, F387R/I390A/L749R, S1220D, V63S/E306G, L749F, E306G/I390A/L749F/F1037N, F387V, E306G/L749F/S1220D, E306G/F387V/I390A/R612S/L749F/F1037N, or F328S, wherein the amino acid positions are relative to the reference sequence corresponding to SEQ ID NO: 504.

[0208] In some embodiments, the recombinant factor VIII polypeptide comprises an amino acid sequence having at least 70%, 75%, 80%, 81%, 82%, 83%, 84%, 85%, 86%, 87%, 88%, 89%, 90%, 91%, 92%, 93%, 94%, 95%, 96%, 97%, 98%, or 99% or more sequence identity to the reference sequence corresponding to residues 20-1457 of SEQ ID NO: 706, or to the reference sequence corresponding to SEQ ID NO: 706, wherein the amino acid sequence comprises one or more substitutions relative to the reference sequence corresponding to residues 20-1457 of SEQ ID NO: 706, or relative to the reference sequence corresponding to SEQ ID NO: 706.

[0209] In some embodiments, the amino acid sequence of the recombinant factor VIII polypeptide comprises at least a substitution or substitution set at amino acid position(s) 1051, 1221, 1218, 387, 749/1218, 332, 897, 696, 816, 824, 826, 393, 825, 698, 332/387/390/1148, 328/387/749, 749, 306/328/332/390/1051/1193/1218, 63/306/332/1051/1148, 63/306/332/387/1051, 387/390/1051, 186/306/328/332/390/749/1051/1148/1193, 387/390/756/1051, 306/390/1051, 306/332/390/749, 306/387/390/1148, 306/328/332/387/390/749/1051/1148/1193, 332/387/390/749/1148, 387/390/749, 306/387/749/1051/1148, 387/749, 306/945/1051/1193/1221, 306/390/749/1051, 63/306/332/390, 306/387/390/749/1148/1193/1221, 306/332/387/390/749/1218, 63/306/332/390/1051/1148/1193/1218, 924, 755, 752, 751, 923, 797, 754, 793, 753, 922, 896, 938, 775, 732, 810, 747, 393/407, 819, 787, 802, 811, 392, or 397, wherein the amino acid positions are relative to the reference sequence corresponding to SEQ ID NO: 706.

[0210] In some embodiments, the recombinant factor VIII polypeptide comprises an amino acid sequence having at least a substitution or substitution set 1051K, 1221G, 1218G, 387R, 1051R, 749F/1218G, 387T, 332P, 897K, 696E, 816W, 824W, 826G, 393W, 825L, 897R, 816V, 698W, 393Q, 332P/387R/390A/1148N, 328S/387R/749F, 749F, 306G/328S/332P/390A/1051R/1193A/1218G, 63Q/306G/332P/1051R/1148N, 63Q/306G/332P/387T/1051K, 387T/390A/1051R, 186A/306G/328S/332P/390A/749F/1051K/1148N/1193A, 387T/390A/756P/1051R, 306G/390A/1051R, 306G/332P/390A/749F, 306G/387R/390A/1148N, 306G/328S/332P/387T/390A/749F/1051R/1148N/1193A, 332P/387R/390A/749F/1148N, 387R/390A/749F, 306G/387T/749F/1051K/1148N, 387R/749F, 306G/945K/1051R/1193A/1221G, 306G/390A/749F/1051K, 63Q/306G/332P/390A, 306G/387T/390A/749F/1148N/1193A/1221G, 306G/332P/387R/390A/749F/1218M, 63Q/306G/332P/390A/1051R/1148N/1193A/1218G, 924I, 755S, 752F, 751Y, 923M, 797Y, 754W, 793G, 753D, 922W, 896L, 938R, 775G, 751E, 732W, 752G, 810V, 938V, 747D, 755G, 393G/407V, 797W, 819V, 393G, 787W, 393R, 802V, 775E, 924P, 732G, 811F, 802S, 752L, 392A, or 397G, wherein the amino acid positions are relative to the reference sequence corresponding to SEQ ID NO: 706.

[0211] In some embodiments, the amino acid sequence of the recombinant factor VIII polypeptide comprises at least a substitution or substitution set M1051K, L1221G, F1218G, I387R, M1051R, L749F/F1218G, I387T, S332P, M897K, T696E, F816W, F824W, A826G, V393W, I825L, M897R, F816V, F698W, V393Q, S332P/I387R/I390A/T1148N, F328S/I387R/L749F, L749F, E306G/F328S/S332P/I390A/M1051R/F1193A/F1218G, V63Q/E306G/S332P/M1051R/T1148N, V63Q/E306G/S332P/I387T/M1051K, I387T/I390A/M1051R, D186A/E306G/F328S/S332P/I390A/L749F/M1051K/T1148N/F1193A, I387T/I390A/I756P/M1051R, E306G/I390A/M1051R, E306G/S332P/I390A/L749F, E306G/I387R/I390A/T1148N, E306G/F328S/S332P/I387T/I390A/L749F/M1051R/T1148N/F1193A, S332P/I387R/I390A/L749F/T1148N, I387R/I390A/L749F, E306G/I387T/L749F/M1051K/T1148N, I387R/L749F, E306G/Q945K/M1051R/F1193A/L1221G, E306G/I390A/L749F/M1051K, V63Q/E306G/S332P/I390A, E306G/I387T/I390A/L749F/T1148N/F1193A/L1221G, E306G/S332P/I387R/I390A/L749F/F1218M, V63Q/E306G/S332P/I390A/M1051R/T1148N/F1193A/F1218G, G924I, A755S, K752F, S751Y, Q923M, M797Y, N754W, I793G, N753D, R922W, I896L, K938R, I775G, S751E, K732W, K752G, N810V, K938V, A747D, A755G, V393G/A407V, M797W, K819V, V393G, I787W, V393R, F802V, I775E, G924P, K732G, Q811F, F802S, K752L, S392A, or H397G, wherein the amino acid positions are relative to the reference sequence corresponding to SEQ ID NO: 706.

[0212] In some embodiments, the recombinant factor VIII polypeptide comprises an amino acid sequence having at least 70%, 75%, 80%, 81%, 82%, 83%, 84%, 85%, 86%, 87%, 88%, 89%, 90%, 91%, 92%, 93%, 94%, 95%, 96%, 97%, 98%, or 99% or more sequence identity to the reference sequence corresponding to residues 20-1457 of SEQ ID NO: 840, or to the reference sequence corresponding to SEQ ID NO: 840, wherein the amino acid sequence comprises one or more substitutions relative to the reference sequence corresponding to residues 20-1457 of SEQ ID NOs: 840, or relative to the reference sequence corresponding to SEQ ID NO: 840.

[0213] In some embodiments, the amino acid sequence of the recombinant factor VIII polypeptide comprises at least a substitution or substitution set at amino acid position(s) 620, 491, 1229, 615, 1283, 822, 328, 212, 818, 555/684, 828, 550, 830, 839, 13, 14, 17, 836, 1210, 1281, 64, 682, 318, 20, 21, 325, 533, 19, 817, 831, 225, 1156, 393/747, 753, 393/732/751, 63/797, 622, 617, 907, 1040, 611, 488, 1192, 1194, 619, 16, 802, 211, 555, 536, 527, 841, 320, 837, 558, 914, 312, 681, 838, 15, 1427, 18, 683, 24, 534, 840, 1160, 551, 393, 393/747/752/811/819/923/1148, 393/751/775, 63/393/732/775/1148, 393/732/1148, 775/1148, 393/752/753/775/793/797, 393/923, 393/923/1148, 393/747/751, 393/747/753/775/1148, 752/923/1051, 63/775, 63/393/752/775/793/1051/1053, 752/753/775/793/819, 63/1051, 63/747/752/753/775/811/819/923/1051, 393/752/787, 751, 63/1148, 63/747/752/753/819/923/1148, 1148, 747/752/753/793/811, 63, 797/1148, 751/752/753/1051, 63/732/1051, 752/797/815/923/1051/1148, or 747/753, wherein the amino acid positions are relative to the reference sequence corresponding to SEQ ID NO: 840.

[0214] In some embodiments, the amino acid sequence of the recombinant factor VIII polypeptide comprises at least a substitution or substitution set 620N, 491E, 1229D, 615N, 1283S, 822S, 328G, 212L, 818W, 1283L, 555G/684G, 828K, 550G, 830M, 839A, 822T, 13Y, 14G, 17V, 836V, 839P, 1210W, 1281R, 64D, 212G, 682R, 14M, 318C, 17S, 20L, 818G, 836G, 21M, 836R, 325Y, 533V, 19G, 14V, 817D, 831W, 225R, 1156R, 830V, 393G/747D, 753D, 393G/732W/751Y, 63Q/797W, 622D, 617E, 617N, 907D, 1040E, 617D, 611E, 620P, 617G, 488G, 1192D, 1194P, 619E, 615D, 16A, 802S, 818V, 211K, 836W, 555R, 536A, 527A, 555E, 841W, 320Q, 837G, 558R, 555G, 211R, 64G, 320R, 533Y, 914V, 16V, 1283E, 536M, 312L, 681N, 838T, 536R, 15G, 536P, 558W, 558E, 1427Y, 839G, 18L, 13G, 1210M, 1156G, 558L, 839K, 211P, 211G, 211Q, 16D, 320G, 683W, 24V, 534I, 681A, 840G, 1160R, 681C, 328Q, 15S, 536K, 536G, 533R, 681E, 536W, 1156N, 16P, 817A, 18R, 551W, 555T, 681G, 212A, 16G, 838G, 681R, 393G, 393G/747D/752G/811F/819V/923M/1148N, 393G/751Y/775G, 63Q/393G/732W/775G/1148N, 393G/732W/1148N, 775G/1148N, 393G/752L/753D/775G/793G/797W, 393G/923M, 393G/923M/1148N, 393G/747D/751Y, 393G/747D/753D/775G/1148N, 752L/923M/1051R, 63Q/775G, 63Q/393G/752L/775G/793G/1051R/1053R, 752G/753D/775G/793G/819V, 63Q/1051R, 63Q/747D/752G/753D/775G/811F/819V/923M/1051R, 393G/752G/787W, 751Y, 63Q/1148N, 63H/747D/752G/753D/819V/923M/1148N, 1148N, 747D/752L/753D/793G/811F, 63Q, 797W/1148N, 751Y/752L/753D/1051R, 63Q/732W/1051R, 752G/797W/815I/923M/1051R/1148N, or 747D/753D, wherein the amino acid positions are relative to the reference sequence corresponding to SEQ ID NO: 840.

[0215] In some embodiments, the amino acid sequence of the recombinant factor VIII polypeptide comprises at least a substitution or substitution set V620N, P491E, M1229D, P615N, I1283S, H822S, F328G, H212L, K818W, I1283L, F555G/E684G, V828K, R550G, R830M, S839A, H822T, L13Y, L14G, C17V, M836V, S839P, K1210W, Y1281R, V64D, H212G, V682R, L14M, L318C, C17S, A20L, K818G, M836G, T21M, M836R, F325Y, T533V, S19G, L14V, Q817D, L831W, K225R, H1156R, R830V, V393G/A747D, N753D, V393G/K732W/S751Y, V63Q/M797W, L622D, P617E, P617N, P907D, N1040E, P617D, Q611E, V620P, P617G, A488G, P1192D, S1194P, G619E, P615D, F16A, F802S, K818V, L211K, M836W, F555R, V536A, I527A, F555E, H841W, M320Q, S837G, M558R, F555G, L211R, V64G, M320R, T533Y, L914V, F16V, I1283E, V536M, F312L, M681N, S838T, V536R, R15G, V536P, M558W, M558E, L1427Y, S839G, F18L, L13G, K1210M, H1156G, M558L, S839K, L211P, L211G, L211Q, F16D, M320G, Y683W, Y24V, V534I, M681A, P840G, F1160R, M681C, F328Q, R15S, V536K, V536G, T533R, M681E, V536W, H1156N, F16P, Q817A, F18R, Y551W, F555T, M681G, H212A, F16G, S838G, M681R, V393G, V393G/A747D/K752G/Q811F/K819V/Q923M/T1148N, V393G/S751Y/I775G, V63Q/V393G/K732W/I775G/T1148N, V393G/K732W/T1148N, I775G/T1148N, V393G/K752L/N753D/I775G/I793G/M797W, V393G/Q923M, V393G/Q923M/T1148N, V393G/A747D/S751Y, V393G/A747D/N753D/I775G/T1148N, K752L/Q923M/M1051R, V63Q/I775G, V63Q/V393G/K752L/I775G/I793G/M1051R/T1053R, K752G/N753D/I775G/I793G/K819V, V63Q/M1051R, V63Q/A747D/K752G/N753D/I775G/Q811F/K819V/Q923M/M1051R, V393G/K752G/I787W, S751Y, V63Q/T1148N, V63H/A747D/K752G/N753D/K819V/Q923M/T1148N, T1148N, A747D/K752L/N753D/I793G/Q811F, V63Q, M797W/T1148N, S751Y/K752L/N753D/M1051R, V63Q/K732W/M1051R, K752G/M797W/S815I/Q923M/M1051R/T1148N, or A747D/N753D, wherein the amino acid positions are relative to the reference sequence corresponding to SEQ ID NO: 840.

[0216] In some embodiments, the recombinant factor VIII polypeptide comprises an amino acid sequence having at least 70%, 75%, 80%, 81%, 82%, 83%, 84%, 85%, 86%, 87%, 88%, 89%, 90%, 91%, 92%, 93%, 94%, 95%, 96%, 97%, 98%, or 99% or more sequence identity to the reference sequence corresponding to residues 20-1457 of SEQ ID NO: 1200, or to the reference sequence corresponding to SEQ ID NO: 1200, wherein the amino acid sequence comprises one or more substitutions relative to the reference sequence corresponding to residues 20-1457 of SEQ ID NOs: 1200, or relative to the reference sequence corresponding to SEQ ID NO: 1200.

[0217] In some embodiments, the amino acid sequence of the recombinant factor VIII polypeptide comprises at least a substitution or substitution set at amino acid position(s) 681, 622, 617, 558, 536, 211, 320, 839, 797, 533, 751, 303, 951, 164, 818, 807, 799, 735, 794, 926, 755, 921, 801, 1094, 968, 929, 924, 698, 168, 581, 916, 1428, 805, 1114, 311, 737, 693, 809, 757, 1099, 676, 740, 791, 211/536/622/681, 536/558, 211/536/555/617/732, 211/681/732, 211/536/555, 555, 211/536, 211/212, 211/536/617/681/732, 211/536/558/617/681, 555/732, 536/555/558/617/732, 536/617/681/732, 536/555, 536/622/681, 732, 212/320/533/617/681, 211/312/533/534/617/619/681/839, 212, 211/212/320/619/681/839, 797/839, 212/312/320/533/534/617/681, 558/619/681, 320/558/681, 212/320/534/619/681/797/839, 320/558/619/732/839, 211/212/312/534/558/619/681/732/839, 320/534/558/619/732/797, 558/617/619/681, 211/534/558/611/681, 211/320/617/619/681, 558/617/681/797, 320/534/619/732, 211/619/681, 211/212/534/558/619/732/839, 212/320/619/681/797/839, 212/320/611/839, 320/558/619/681, 312/533/617/681/797/839, 558/611/681, 312, 211/320/558/619/681/732/797/839, 320/558/732/797, 533/558/611/619/716/732/839, 312/681, 320/534/619/681, 211/320/533/536/619, 558/617/681/839, 212/320/534/558/681, 533/534/681/839, 212/534/619/681, 617/619/681, 211/212/320/558/617/681, 212/534/558/681/797, 212/320/534, 211/312/619, 212/312/619/839, 210/212/320/558/681, 212/312/534/681/797/839, 211/320/558/839, 294, 759, 538, or 1109, wherein the amino acid positions are relative to the reference sequence corresponding to SEQ ID NO: 1200.

[0218] In some embodiments, the amino acid sequence of the recombinant factor VIII polypeptide comprises at least a substitution or substitution set 681A, 622D, 617G, 558L, 536K, 681G, 211Q, 320R, 558W, 839K, 211K, 797W, 533R, 751A, 303T, 951V, 164E, 818G, 807L, 799A, 735S, 794R, 926V, 755P, 921W, 801A, 1094S, 968A, 929Q, 924W, 807P, 698D, 168G, 929V, 818A, 818S, 581K, 818P, 916K, 698S, 303G, 916C, 1428G, 805L, 924M, 1114M, 311G, 737N, 805V, 801I, 751D, 693T, 818E, 929A, 311E, 737L, 809W, 757A, 1099G, 799G, 916I, 805G, 737F, 737M, 799P, 807C, 916E, 676Q, 581V, 968P, 755Y, 916Q, 735D, 740G, 698Y, 757G, 791T, 1114A, 735V, 536P, 211R/536K/622D/681A, 536K/558L, 211R/536R/555G/617G/732K, 211R/681R/732K, 211R/536K/555E, 536R, 555E, 211R/536P, 211R/212P, 211R/536K, 211R/536K/617G/681A/732K, 211R, 211R/536P/558L/617G/681A, 555G/732K, 536P/555E/558L/617G/732K, 536K/617G/681A/732K, 536K/555G, 536P/622D/681A, 732K, 212A/320Q/533R/617E/681G, 211K/312L/533R/534I/617D/619E/681N/839K, 212A, 211K/212A/320Q/619E/681G/839K, 797W/S839K, 212A/312L/320Q/533R/534I/617E/681G, 558W/619E/681G, 320Q/558W/681G, 212A/320Q/534I/619E/681G/797W/839K, 320R/558W/619E/732K/839K, 211K/212A/312L/534I/558W/619E/681N/732K/839K, 320R/534I/558R/619E/732K/797W, 558W/617D/619E/681N, 211Q/534I/558W/611E/681N, 211K/320R/617E/619E/681G, 558W/617D/681G/797W, 320R/534I/619E/732K, 211K/619E/681N, 211K/212A/534I/558W/619E/732K/839K, 212A/320R/619E/681N/797W/839K, 212A/320R/611E/839K, 320Q/558W/619E/681N, 312L/533R/617D/681N/797W/839K, 558W/611E/681N, 312L, 211Q/320R/558W/619E/681G/732K/797W/839K, 320Q/558W/732K/797W, 533R/558W/611E/619E/716L/732K/839K, 312L/681G, 320Q/534I/619E/681N, 211K/320Q/533R/536L/619E, 558W/617E/681N/839K, 212A/320R/534I/558W/681G, 533R/534I/681N/839K, 212A/534I/619E/681G, 617E/619E/681G, 211Q/212A/320R/558W/617E/681N, 212A/534I/558W/681N/797W, 212A/320R/534I, 211K/312L/619E, 212A/312L/619E/839K, 210P/212A/320R/558W/681G, 212A/312L/534I/681N/797W/839K, 211K/320R/558W/839K, 924Q, 916L, 757T, 737K, 818V, 801G, 294G, 799S, 799E, 809G, 791M, 737V, 805Q, 799Q, 737S, 916M, 759S, 799V, 538V, 1109G, 168R, 921R, 926T, 916T, 737G, or 801R, wherein the amino acid positions are relative to the reference sequence corresponding to SEQ ID NO: 1200.

[0219] In some embodiments, the amino acid sequence of the recombinant factor VIII polypeptide comprises at least a substitution or substitution set M681A, L622D, P617G, M558L, V536K, M681G, L211Q, M320R, M558W, S839K, L211K, M797W, T533R, S751A, A303T, T951V, G164E, K818G, E807L, K799A, G735S, S794R, E926V, A755P, Q921W, D801A, E1094S, L968A, K929Q, G924W, E807P, F698D, S168G, K929V, K818A, K818S, R581K, K818P, S916K, F698S, A303G, S916C, T1428G, Y805L, G924M, L1114M, T311G, Y737N, Y805V, D801I, S751D, S693T, K818E, K929A, T311E, Y737L, E809W, E757A, A1099G, K799G, S916I, Y805G, Y737F, Y737M, K799P, E807C, S916E, T676Q, R581V, L968P, A755Y, S916Q, G735D, D740G, F698Y, E757G, D791T, L1114A, G735V, V536P, L211R/V536K/L622D/M681A, V536K/M558L, L211R/V536R/F555G/P617G/W732K, L211R/M681R/W732K, L211R/V536K/F555E, V536R, F555E, L211R/V536P, L211R/H212P, L211R/V536K, L211R/V536K/P617G/M681A/W732K, L211R, L211R/V536P/M558L/P617G/M681A, F555G/W732K, V536P/F555E/M558L/P617G/W732K, V536K/P617G/M681A/W732K, V536K/F555G, V536P/L622D/M681A, W732K, H212A/M320Q/T533R/P617E/M681G, L211K/F312L/T533R/V534I/P617D/G619E/M681N/S839K, H212A, L211K/H212A/M320Q/G619E/M681G/S839K, M797W/S839K, H212A/F312L/M320Q/T533R/V534I/P617E/M681G, M558W/G619E/M681G, M320Q/M558W/M681G, H212A/M320Q/V534I/G619E/M681G/M797W/S839K, M320R/M558W/G619E/W732K/S839K, L211K/H212A/F312L/V534I/M558W/G619E/M681N/W732K/S839K, M320R/V534I/M558R/G619E/W732K/M797W, M558W/P617D/G619E/M681N, L211Q/V534I/M558W/Q611E/M681N, L211K/M320R/P617E/G619E/M681G, M558W/P617D/M681G/M797W, M320R/V534I/G619E/W732K, L211K/G619E/M681N, L211K/H212A/V534I/M558W/G619E/W732K/S839K, H212A/M320R/G619E/M681N/M797W/S839K, H212A/M320R/Q611E/S839K, M320Q/M558W/G619E/M681N, F312L/T533R/P617D/M681N/M797W/S839K, M558W/Q611E/M681N, F312L, L211Q/M320R/M558W/G619E/M681G/W732K/M797W/S839K, M320Q/M558W/W732K/M797W, T533R/M558W/Q611E/G619E/F716L/W732K/S839K, F312L/M681G, M320Q/V534I/G619E/M681N, L211K/M320Q/T533R/V536L/G619E, M558W/P617E/M681N/S839K, H212A/M320R/V534I/M558W/M681G, T533R/V534I/M681N/S839K, H212A/V534I/G619E/M681G, P617E/G619E/M681G, L211Q/H212A/M320R/M558W/P617E/M681N, H212A/V534I/M558W/M681N/M797W, H212A/M320R/V534I, L211K/F312L/G619E, H212A/F312L/G619E/S839K, T210P/H212A/M320R/M558W/M681G, H212A/F312L/V534I/M681N/M797W/S839K, L211K/M320R/M558W/S839K, G924Q, S916L, E757T, Y737K, K818V, D801G, T294G, K799S, K799E, E809G, D791M, Y737V, Y805Q, K799Q, Y737S, S916M, R759S, K799V, D538V, E1109G, S168R, Q921R, E926T, S916T, Y737G, or D801R, wherein the amino acid positions are relative to the reference sequence of SEQ ID NO: 1200.

[0220] In some embodiments, the recombinant factor VIII polypeptide comprises an amino acid sequence having at least 70%, 75%, 80%, 81%, 82%, 83%, 84%, 85%, 86%, 87%, 88%, 89%, 90%, 91%, 92%, 93%, 94%, 95%, 96%, 97%, 98%, or 99% or more sequence identity to the reference sequence corresponding to residues 20-1457 of SEQ ID NO: 1514, or to the reference sequence corresponding to SEQ ID NO: 1514, wherein the amino acid sequence comprises one or more substitutions relative to the reference sequence corresponding to residues 20-1457 of SEQ ID NOs: 1514, or relative to the reference sequence corresponding to SEQ ID NO: 1514.

[0221] In some embodiments, the amino acid sequence of the recombinant factor VIII polypeptide comprises at least a substitution or substitution set at amino acid position(s) 1042, 1041, 1051, 1283, 1281, 916, 187, 215, 178, 1050, 1210, 104, 615, 610, 536, 618, 621, 614, 110, 301, 1078, 812, 786, 127, 175, 1093, 1088, 650, 535, 806, 738, 700, 132, 1076, 1084, 498, 756, 1108, 746, 160, 543, 310, 584, 918, 1452, 790, 292, 800, 167, 892, 304, 1116, 752, 281, 917, 712, 1080, 806/1352, 1095, 744, 1098, 948, 119, 785, 1113, 667, 158, 580, 707, 731, 1100, 1089, 1092, 939, 1104, 736, 1297, 1127, 686, 1129, 1138, 786/821, 680, 1101, 808, 739, 308, 536/555/619/732/799/805, 555/619/801, 555/619/799, 619/799/801/805, 536/555/619/732/799, 799/805, 801, 246/619/799/801, 536/555/619, 619/839, 619/799/805, 536/801/805, 555/619/799/805, 619/801/805, 555/619, 536/619/801, 801/805, 536/619/799/805, 555/619/732/799/801/805, 749, 616, 611, 370/614, 1156, 1158, 555/681/737/799, 536/619/809/1109, 536/555/619/737/799/809/839/916/921, 916/1109, 536/619/681/799/916/1109, 555/619/681/807/1109, 555/619/681/737/799, 619/681/799/916/1109, 619/681, 555/921, 619/681/916, 555/619/681/799, 555, 732, 619/799, 619, 681, 555/916, 839, or 799, wherein the amino acid positions are relative to the reference sequence corresponding to SEQ ID NO: 1514.

[0222] In some embodiments, the amino acid sequence of the recombinant factor VIII polypeptide comprises at least a substitution or substitution set 1042E, 1041N, 1051H, 1283H, 1283T, 1281Q, 1281P, 916E, 1051W, 187C, 215E, 215P, 215S, 178C, 1050T, 1210T, 1281K, 1042A, 104S, 615D, 610S, 610K, 610T, 536P, 618Y, 621W, 618P, 614F, 110H, 301K, 1078S, 812G, 786C, 127V, 175G, 1093W, 1088G, 1093T, 650M, 301M, 535N, 806R, 738E, 700E, 132R, 1076G, 1084L, 498A, 786L, 738F, 535G, 806E, 756G, 1108S, 1093V, 746P, 160E, 160T, 178V, 543L, 310G, 700Q, 1093A, 584A, 918S, 1452L, 738P, 790W, 790I, 292D, 800M, 1108M, 1088S, 167G, 892T, 790P, 800R, 738K, 304G, 1116G, 178Q, 1116A, 752G, 1108W, 738D, 281A, 917G, 712M, 1080V, 806G/1352E, 1095G, 1093G, 744A, 543G, 1098G, 281S, 756T, 948S, 119V, 1116L, 785V, 1113F, 700A, 786D, 175A, 790M, 667I, 158G, 580S, 707H, 731I, 918M, 1100S, 1089S, 712Y, 175H, 1092G, 939E, 1104E, 800G, 736F, 543W, 1297A, 712L, 1127V, 939S, 178M, 731R, 686W, 543P, 736G, 1129P, 1138Q, 812V, 786D/821Q, 535C, 680R, 1116I, 1089F, 304E, 178W, 1104C, 744R, 738R, 1093S, 712S, 187G, 132P, 812I, 1080G, 800C, 1101G, 808K, 808S, 790A, 800V, 680L, 167R, 752E, 1093N, 119G, 739G, 1116R, 580Y, 304A, 712Q, 806S, 712G, 790G, 1108V, 731L, 1084N, 1127L, 308P, 1076S, 1093P, 1093Y, 739R, 739P, 310V, 712T, 167H, 1093R, 536P/555E/619E/732K/799S/805Q, 555E/619E/801G, 555E/619E/799S, 619E/799S/801G/805Q, 536P/555E/619E/732K/799S, 799S/805Q, 801G, 246D/619E/799S/801G, 536P/555E/619E, 619E/839K, 619E/799S/805Q, 536P/801G/805Q, 555E/619E/799S/805Q, 619E/801G/805Q, 555E/619E, 536P/619E/801G, 801G/805Q, 536P/619E/799S/805Q, 555E/619E/732K/799S/801G/805Q, 1281H, 749L, 614H, 616D, 621K, 1050E, 610H, 611D, 1042T, 616Q, 614N, 370A/614A, 1156D, 1210V, 614T, 1158N, 1281S, 618E, 555E/681N/737K/799Q, 536P/619E/809G/1109G, 536K/555G/619E/737K/799Q/809G/839K/916T/921R, 916T/1109G, 536R/619E/681N/799Q/916T/1109G, 555G/619E/681N/807R/1109G, 555E/619E/681N/737K/799Q, 619E/681N/799S/916T/1109G, 619E/681N, 555G/921R, 619E/681N/916T, 555G/619E/681N/799S, 555E, 732K, 619E/799S, 619E, 681N, 555G/916T, 839K, or 799Q, wherein the amino acid positions are relative to the reference sequence corresponding to SEQ ID NO: 1514.

[0223] In some embodiments, the amino acid sequence of the recombinant factor VIII polypeptide comprises at least a substitution or substitution set R1042E, Y1041N, M1051H, I1283H, I1283T, Y1281Q, Y1281P, S916E, M1051W, L187C, I215E, I215P, I215S, L178C, I1050T, K1210T, Y1281K, R1042A, V104S, P615D, I610S, I610K, I610T, V536P, A618Y, Q621W, A618P, L614F, M110H, R301K, I1078S, S812G, E786C, A127V, Y175G, K1093W, F1088G, K1093T, L650M, R301M, T535N, D806R, Y738E, S700E, E132R, E1076G, S1084L, G498A, E786L, Y738F, T535G, D806E, I756G, F1108S, K1093V, S746P, L160E, L160T, L178V, S543L, 1310G, S700Q, K1093A, Q584A, E918S, E1452L, Y738P, D790W, D790I, G292D, E800M, F1108M, F1088S, A167G, V892T, D790P, E800R, Y738K, S304G, S1116G, L178Q, S1116A, K752G, F1108W, Y738D, T281A, Y917G, H712M, S1080V, D806G/K1352E, E1095G, K1093G, D744A, S543G, M1098G, T281S, I756T, M948S, A119V, S1116L, E785V, M1113F, S700A, E786D, Y175A, D790M, F667I, Q158G, Q580S, W707H, D731I, E918M, L1100S, T1089S, H712Y, Y175H, K1092G, T939E, Y1104E, E800G, D736F, S543W, N1297A, H712L, 11127V, T939S, L178M, D731R, T686W, S543P, D736G, E1129P, L1138Q, S812V, E786D/R821Q, T535C, K680R, S1116I, T1089F, S304E, L178W, Y1104C, D744R, Y738R, K1093S, H712S, L187G, E132P, S812I, S1080G, E800C, Y1101G, D808K, D808S, D790A, E800V, K680L, A167R, K752E, K1093N, A119G, E739G, S1116R, Q580Y, S304A, H712Q, D806S, H712G, D790G, F1108V, D731L, S1084N, I1127L, S308P, E1076S, K1093P, K1093Y, E739R, E739P, I310V, H712T, A167H, K1093R, V536P/F555E/G619E/W732K/K799S/Y805Q, F555E/G619E/D801G, F555E/G619E/K799S, G619E/K799S/D801G/Y805Q, V536P/F555E/G619E/W732K/K799S, K799S/Y805Q, D801G, A246D/G619E/K799S/D801G, V536P/F555E/G619E, G619E/S839K, G619E/K799S/Y805Q, V536P/D801G/Y805Q, F555E/G619E/K799S/Y805Q, G619E/D801G/Y805Q, F555E/G619E, V536P/G619E/D801G, D801G/Y805Q, V536P/G619E/K799S/Y805Q, F555E/G619E/W732K/K799S/D801G/Y805Q, Y1281H, F749L, L614H, N616D, Q621K, I1050E, I610H, Q611D, R1042T, N616Q, L614N, T370A/L614A, H1156D, K1210V, L614T, R1158N, Y1281S, A618E, F555E/G681N/Y737K/K799Q, V536P/G619E/E809G/E1109G, V536K/F555G/G619E/Y737K/K799Q/E809G/S839K/S916T/Q921R, S916T/E1109G, V536R/G619E/G681N/K799Q/S916T/E1109G, F555G/G619E/G681N/E807R/E1109G, F555E/G619E/G681N/Y737K/K799Q, G619E/G681N/K799S/S916T/E1109G, G619E/G681N, F555G/Q921R, G619E/G681N/S916T, F555G/G619E/G681N/K799S, F555E, W732K, G619E/K799S, G619E, G681N, F555G/S916T, S839K, or K799Q, wherein the amino acid positions are relative to the reference sequence corresponding to SEQ ID NO: 1514.

[0224] In some embodiments, the recombinant factor VIII polypeptide comprises an amino acid sequence having at least 70%, 75%, 80%, 81%, 82%, 83%, 84%, 85%, 86%, 87%, 88%, 89%, 90%, 91%, 92%, 93%, 94%, 95%, 96%, 97%, 98%, or 99% or more sequence identity to the reference sequence corresponding to residues 20-1457 of SEQ ID NO: 2072, or to the reference sequence corresponding to SEQ ID NO: 2072, wherein the amino acid sequence comprises one or more substitutions relative to the reference sequence corresponding to residues 20-1457 of SEQ ID NOs: 2072, or relative to the reference sequence corresponding to SEQ ID NO: 2072.

[0225] In some embodiments, the amino acid sequence of the recombinant factor VIII polypeptide comprises at least a substitution or substitution set at amino acid position(s) 167, 167/738/1076/1093, 167/738/752/800/805/808/809/1116, 167/800/809/1076, 167/318, 167/318/800/805/808/809, 167/318/681, 167/318/681/700/805/808/809/1076/1116, 167/318/700, 167, 167/738/1076/1093, 167/738/752/800/805/808/809/1116, 167/800/809/1076, 167/318, 167/318/800/805/808/809, 167/318/681, 167/318/681/700/805/808/809/1076/1116, 167/318/700, 167/318/700/1076, 167/318/700/738/739/1076, 167/681/738/800/808/809, 167/178/700/752/1093, 167/700, 167/700/738/739/1093, 167/700/738/752/1093, 167/700/738/752/805/808/809/1093/1116, 808/809, 1076, 738, 738/808/809, 738/1076, 738/739, 738/739/809, 738/739/809/1093/1116, 738/739/1093, 738/739/752/1093, 738/739/799/800/1093, 738/739/1116, 738/800, 738/1093, 738/752, 738/752/1093, 738/752/799, 738/799/809/1093, 738/799/1093, 739, 739/800/809, 800, 800/805/809, 809, 809/1093, 809/1093/1116, 809/1116, 318, 318/1076, 318/1076/1116, 318/739/805/808/809/1076, 318/499/700/738/809, 318/1093, 318/752/1093, 318/1116, 318/543/739, 318/543/681/752/1116, 318/543/1093, 318/700/738/1093/1414, 681, 681/738, 681/738/739/1093, 681/738/739/752/799/800/809/1116/1339, 681/738/739/1116, 681/738/800, 681/800/805/809, 681/809/1093, 681/752/1093, 681/752/1093, 681/700, 681/700/738/739/1093/1116, 681/700/809, 681/700/1093, 681/700/752/808/809/1093/1116, 681/700/752/1093, 681/700/844, 681/700/805/809, 1093, 1093/1116, 752, 752/1076, 752/800/809, 752/800/1093, 752/809, 752/866, 752/1093, 752/1116, 178/318/739/752/809/1076/1116, 178/318/800/809, 178/318/681/800/808/809/1076, 178/681, 178/681/738/1116, 178/752/809, 178/700/800/805/808/809, 178/805/809/866, 1116, 543, 543/738/739/809, 543/738/809/1093, 543/739/1093, 543/800/1093/1116, 543/809/1093, 543/809/1093/1116, 543/681/738/739/752/809/1093, 543/681/738/739/752/1093, 543/681/739/752/800/805/809/1093, 543/681/700/738/739/800/1093/1116, 543/681/700/738/739/805/808/809, 543/681/700/752, 543/681/700/752/809/1093, 543/1093, 543/700, 543/700/738/739/752/800/1093/1116, 543/700/809, 543/700/1093, 543/700/752, 543/700/752/800/1093, 543/700/752/809/1116, 543/700/752/1093, 700, 700/738/739/800/1093, 700/738/739/799/1093, 700/738/800/1093, 700/738/1116, 700/809, 700/809/1093, 700/1093, 700/1093/1116, 700/752, 700/752/808/809/1093/1116, 700/752/809/1093, 700/752/799/1116, 700/752/805/809/1093, 700/799/800, 700/1116, 700/805/808/809/1076, 514/543/681/805/808/809, 805/808/809, or 805/809/1116, wherein the amino acid positions are relative to the reference sequence corresponding to SEQ ID NO: 2072.

[0226] In some embodiments, the amino acid sequence of the recombinant factor VIII polypeptide comprises at least a substitution or substitution set 167G, 167G/738Y/1076S/1093G, 167G/738Y/752E/800V/805Q/808S/809G/1116I, 167G/800V/809G/1076S, 167G/318L, 167G/318L/800V/805Q/808S/809G, 167G/318L/681N, 167G/318L/681N/700E/805Q/808S/809G/1076S/1116I, 167G/318L/700E, 167G/318L/700E/1076S, 167G/318L/700E/738Y/739G/1076S, 167G/681N/738Y/800V/808S/809G, 167G/178Q/700E/752E/1093G, 167G/700E, 167G/700E/738Y/739G/1093G, 167G/700E/738Y/752E/1093G, 167G/700E/738Y/752E/805Q/808S/809G/1093A/1116I, 808S/809G, 1076S, 738Y, 738Y/808S/809G, 738Y/1076S, 738Y/739G, 738Y/739G/809G, 738Y/739G/809G/1093G/1116I, 738Y/739G/1093G, 738Y/739G/752E/1093G, 738Y/739G/799S/800V/1093G, 738Y/739G/1116I, 738Y/800V, 738Y/1093G, 738Y/752E, 738Y/752E/1093G, 738Y/752E/799S, 738Y/799S/809G/1093G, 738Y/799S/1093G, 739G, 739G/800V/809G, 800V, 800V/805Q/809G, 809G, 809G/1093G, 809G/1093G/1116I, 809G/1116I, 318L, 318L/1076S, 318L/1076S/1116I, 318L/739G/805Q/808S/809G/1076S, 318L/499L/700E/738Y/809G, 318L/1093A, 318L/752E/1093A, 318L/1116I, 318L/543P/739G, 318L/543P/681N/752E/1116I, 318L/543P/1093A, 318L/700E/738Y/1093A/1414N, 681N, 681N/738Y, 681N/738Y/739G/1093G, 681N/738Y/739G/752E/799S/800V/809G/1116I/1339C, 681N/738Y/739G/1116I, 681N/738Y/800V, 681N/800V/805Q/809G, 681N/809G/1093G, 681N/752E/1093A, 681N/752E/1093G, 681N/700E, 681N/700E/738Y/739G/1093G/1116I, 681N/700E/809G, 681N/700E/1093G, 681N/700E/752E/808S/809G/1093G/1116I, 681N/700E/752E/1093G, 681N/700E/844H, 681N/700E/805Q/809G, 1093A, 1093G, 1093G/1116I, 752E, 752E/1076S, 752E/800V/809G, 752E/800V/1093G, 752E/809G, 752E/866A, 752E/1093G, 752E/1116I, 178Q/318L/739G/752E/809G/1076S/1116I, 178Q/318L/800V/809G, 178Q/318L/681N/800V/808S/809G/1076S, 178Q/681N, 178Q/681N/738Y/1116I, 178Q/752E/809G, 178Q/700E/800V/805Q/808S/809G, 178Q/805Q/809G/866A, 1116I, 543P, 543P/738Y/739G/809G, 543P/738Y/809G/1093G, 543P/739G/1093A, 543P/800V/1093G/1116I, 543P/809G/1093G, 543P/809G/1093G/1116I, 543P/681N/738Y/739G/752E/809G/1093G, 543P/681N/738Y/739G/752E/1093G, 543P/681N/739G/752E/800V/805Q/809G/1093G, 543P/681N/700E/738Y/739G/800V/1093G/1116I, 543P/681N/700E/738Y/739G/805Q/808S/809G, 543P/681N/700E/752E, 543P/681N/700E/752E/809G/1093G, 543P/1093G, 543P/700E, 543P/700E/738Y/739G/752E/800V/1093G/1116I, 543P/700E/809G, 543P/700E/1093G, 543P/700E/752E, 543P/700E/752E/800V/1093G, 543P/700E/752E/809G/1116I, 543P/700E/752E/1093G, 700E, 700E/738Y/739G/800V/1093G, 700E/738Y/739G/799S/1093G, 700E/738Y/800V/1093G, 700E/738Y/1116I, 700E/809G, 700E/809G/1093G, 700E/1093G, 700E/1093G/1116I, 700E/752E, 700E/752E/808S/809G/1093G/1116I, 700E/752E/809G/1093G, 700E/752E/799S/1116I, 700E/752E/805Q/809G/1093A, 700E/799S/800V, 700E/1116I, 700E/805Q/808S/809G/1076S, 514L/543P/681N/805Q/808S/809G, 805Q/808S/809G, or 805Q/809G/1116I, wherein the amino acid positions are relative to the reference sequence corresponding to SEQ ID NO: 2072.

[0227] In some embodiments, the amino acid sequence of the recombinant factor VIII polypeptide comprises at least a substitution or substitution set A167G, A167G/E738Y/E1076S/K1093G, A167G/E738Y/K752E/E800V/Y805Q/D808S/E809G/S1116I, A167G/E800V/E809G/E1076S, A167G/G318L, A167G/G318L/E800V/Y805Q/D808S/E809G, A167G/G318L/G681N, A167G/G318L/G681N/S700E/Y805Q/D808S/E809G/E1076S/S1116I, A167G/G318L/S700E, A167G/G318L/S700E/E1076S, A167G/G318L/S700E/E738Y/E739G/E1076S, A167G/G681N/E738Y/E800V/D808S/E809G, A167G/L178Q/S700E/K752E/K1093G, A167G/S700E, A167G/S700E/E738Y/E739G/K1093G, A167G/S700E/E738Y/K752E/K1093G, A167G/S700E/E738Y/K752E/Y805Q/D808S/E809G/K1093A/S1116I, D808S/E809G, E1076S, E738Y, E738Y/D808S/E809G, E738Y/E1076S, E738Y/E739G, E738Y/E739G/E809G, E738Y/E739G/E809G/K1093G/S1116I, E738Y/E739G/K1093G, E738Y/E739G/K752E/K1093G, E738Y/E739G/K799S/E800V/K1093G, E738Y/E739G/S1116I, E738Y/E800V, E738Y/K1093G, E738Y/K752E, E738Y/K752E/K1093G, E738Y/K752E/K799S, E738Y/K799S/E809G/K1093G, E738Y/K799S/K1093G, E739G, E739G/E800V/E809G, E800V, E800V/Y805Q/E809G, E809G, E809G/K1093G, E809G/K1093G/S1116I, E809G/S1116I, G318L, G318L/E1076S, G318L/E1076S/S1116I, G318L/E739G/Y805Q/D808S/E809G/E1076S, G318L/I499L/S700E/E738Y/E809G, G318L/K1093A, G318L/K752E/K1093A, G318L/S1116I, G318L/S543P/E739G, G318L/S543P/G681N/K752E/S1116I, G318L/S543P/K1093A, G318L/S700E/E738Y/K1093A/S1414N, G681N, G681N/E738Y, G681N/E738Y/E739G/K1093G, G681N/E738Y/E739G/K752E/K799S/E800V/E809G/S1116I/G1339C, G681N/E738Y/E739G/S1116I, G681N/E738Y/E800V, G681N/E800V/Y805Q/E809G, G681N/E809G/K1093G, G681N/K752E/K1093A, G681N/K752E/K1093G, G681N/S700E, G681N/S700E/E738Y/E739G/K1093G/S1116I, G681N/S700E/E809G, G681N/S700E/K1093G, G681N/S700E/K752E/D808S/E809G/K1093G/S1116I, G681N/S700E/K752E/K1093G, G681N/S700E/R844H, G681N/S700E/Y805Q/E809G, K1093A, K1093G, K1093G/S1116I, K752E, K752E/E1076S, K752E/E800V/E809G, K752E/E800V/K1093G, K752E/E809G, K752E/G866A, K752E/K1093G, K752E/S1116I, L178Q/G318L/E739G/K752E/E809G/E1076S/S1116I, L178Q/G318L/E800V/E809G, L178Q/G318L/G681N/E800V/D808S/E809G/E1076S, L178Q/G681N, L178Q/G681N/E738Y/S1116I, L178Q/K752E/E809G, L178Q/S700E/E800V/Y805Q/D808S/E809G, L178Q/Y805Q/E809G/G866A, S1116I, S543P, S543P/E738Y/E739G/E809G, S543P/E738Y/E809G/K1093G, S543P/E739G/K1093A, S543P/E800V/K1093G/S1116I, S543P/E809G/K1093G, S543P/E809G/K1093G/S1116I, S543P/G681N/E738Y/E739G/K752E/E809G/K1093G, S543P/G681N/E738Y/E739G/K752E/K1093G, S543P/G681N/E739G/K752E/E800V/Y805Q/E809G/K1093G, S543P/G681N/S700E/E738Y/E739G/E800V/K1093G/S1116I, S543P/G681N/S700E/E738Y/E739G/Y805Q/D808S/E809G, S543P/G681N/S700E/K752E, S543P/G681N/S700E/K752E/E809G/K1093G, S543P/K1093G, S543P/S700E, S543P/S700E/E738Y/E739G/K752E/E800V/K1093G/S1116I, S543P/S700E/E809G, S543P/S700E/K1093G, S543P/S700E/K752E, S543P/S700E/K752E/E800V/K1093G, S543P/S700E/K752E/E809G/S1116I, S543P/S700E/K752E/K1093G, S700E, S700E/E738Y/E739G/E800V/K1093G, S700E/E738Y/E739G/K799S/K1093G, S700E/E738Y/E800V/K1093G, S700E/E738Y/S1116I, S700E/E809G, S700E/E809G/K1093G, S700E/K1093G, S700E/K1093G/S1116I, S700E/K752E, S700E/K752E/D808S/E809G/K1093G/S1116I, S700E/K752E/E809G/K1093G, S700E/K752E/K799S/S1116I, S700E/K752E/Y805Q/E809G/K1093A, S700E/K799S/E800V, S700E/S1116I, S700E/Y805Q/D808S/E809G/E1076S, V514L/S543P/G681N/Y805Q/D808S/E809G, Y805Q/D808S/E809G, or Y805Q/E809G/S1116I, wherein the amino acid positions are relative to the reference sequence corresponding to SEQ ID NO: 2072.

[0228] In some embodiments, the recombinant factor VIII polypeptide comprises an amino acid sequence comprising at least a substitution at an amino position set forth in Tables 4.1, 4.2, 5.1, 5.2, 6.1, 6.2, 7.1, 7.2, 8.1, 8.2, 9.1, 9.2, 10.1, 10.2, 11.1, and 15.1, wherein the amino acid positions are relative to the reference sequence corresponding to SEQ ID NO: 2, 252, 504, 706, 840, 1200, 1514, or 2072.

[0229] In some embodiments, the recombinant factor VIII polypeptide comprises an amino acid sequence comprising at least one substitution set forth in Tables 4.1, 4.2, 5.1, 5.2, 6.1, 6.2, 7.1, 7.2, 8.1, 8.2, 9.1, 9.2, 10.1, 10.2, 11.1, and 15.1, wherein the amino acid positions are relative to the reference sequence corresponding to SEQ ID NO: 2, 252, 504, 706, 840, 1200, 1514, or 2072.

[0230] In some embodiments, the recombinant factor VIII polypeptide comprises an amino acid sequence comprising at least a substitution or substitution set forth in Tables 4.1, 4.2, 5.1, 5.2, 6.1, 6.2, 7.1, 7.2, 8.1, 8.2, 9.1, 9.2, 10.1, 10.2, 11.1, and 15.1, wherein the amino acid positions are relative to the reference sequence corresponding to SEQ ID NO: 2, 252, 504, 706, 840, 1200, 1514, or 2072.

[0231] In some embodiments, the recombinant factor VIII polypeptide comprises an amino acid sequence comprising at least a substitution or substitution of a variant set forth in Tables 4.1, 4.2, 5.1, 5.2, 6.1, 6.2, 7.1, 7.2, 8.1, 8.2, 9.1, 9.2, 10.1, 10.2, 11.1, and 15.1, wherein the amino acid positions are relative to the reference sequence corresponding to SEQ ID NO: 2, 252, 504, 706, 840, 1200, 1514, or 2072.

[0232] In some embodiments, the recombinant factor VIII polypeptide comprises an amino acid sequence comprising residues 20-1457 of an even-numbered SEQ ID NO. of SEQ ID NOs: 4-2346 and 2360-2870, or an amino acid sequence comprising an even-numbered SEQ ID NO. of SEQ ID NOs: 4-2346 and 2350-2870, wherein optionally the amino acid sequence includes 1, 2, 3, 4, 5, 6, 7, 8, 9, or up to 10 amino acid substitutions, insertions or deletions. In some embodiments, the amino acid sequence optionally includes 1, 2, 3, 4, or 5 amino acid substitutions, insertions, or deletions. In some embodiments of the foregoing, the amino acid sequence optionally includes 1, 2, 3, 4, 5, 6, 7, 8, 9, or up to 10 amino acid substitutions, or 1, 2, 3, 4, or 5 substitutions. In some embodiments, the substitutions comprise non-conservative substitutions. In some embodiments, the substitutions comprise conservative substitutions.

[0233] In some embodiments, the recombinant factor VIII polypeptide comprises an amino acid sequence comprising residues 20-1457 of an even-numbered SEQ ID NO. of SEQ ID NOs: 4-316, or an amino acid sequence comprising an even-numbered SEQ ID NO. of SEQ ID NOs: 4-316. In some embodiments, the recombinant factor VIII polypeptide comprises an amino acid sequence comprising residues 20-1457 of an even-numbered SEQ ID NO. of SEQ ID NOs: 318-410 or 412-666, or an amino acid sequence comprising an even-numbered SEQ ID NO. of SEQ ID NOs: 318-410 or 412-666. In some embodiments, the recombinant factor VIII polypeptide comprises an amino acid sequence comprising residues 20-1457 of an even-numbered SEQ ID NO. of SEQ ID NOs: 668-700 or 702-780, or an amino acid sequence comprising an even-numbered SEQ ID NO. of SEQ ID NOs: 668-700 or 702-780. In some embodiments, the recombinant factor VIII polypeptide comprises an amino acid sequence comprising residues 20-1457 of an even-numbered SEQ ID NO. of SEQ ID NOs: 782-818 or 820-934, or an amino acid sequence comprising an even-numbered SEQ ID NO. of SEQ ID NOs: 782-818 or 820-934. In some embodiments, the recombinant factor VIII polypeptide comprises an amino acid sequence comprising residues 20-1457 of an even-numbered SEQ ID NO. of SEQ ID NOs: 936-1028 or 1030-1250, or an amino acid sequence comprising an even-numbered SEQ ID NO. of SEQ ID NOs: 936-1028 or 1030-1250. In some embodiments, the recombinant factor VIII polypeptide comprises an amino acid sequence comprising residues 20-1457 of an even-numbered SEQ ID NO. of SEQ ID NOs: 1252-1408 or 1410-1588, or an amino acid sequence comprising an even-numbered SEQ ID NO. of SEQ ID NOs: 1252-1408 or 1410-1588. In some embodiments, the recombinant factor VIII polypeptide comprises an amino acid sequence comprising residues 20-1457 of an even-numbered SEQ ID NO. of SEQ ID NOs: 1590-1648 or 1650-2068, or an amino acid sequence comprising an even-numbered SEQ ID NO. of SEQ ID NOs: 1590-1648 or 1650-2068. In some embodiments, the recombinant factor VIII polypeptide comprises an amino acid sequence comprising residues 20-1457 of an even-numbered SEQ ID NO. of SEQ ID NOs: 2070-2346, or an amino acid sequence comprising an even-numbered SEQ ID NO. of SEQ ID NOs: 2070-2346. In some embodiments, the recombinant factor VIII polypeptide comprises an amino acid sequence comprising residues 20-1457 of an even-numbered SEQ ID NO. of SEQ ID NOs: 2360-2870, or an amino acid sequence comprising an even-numbered SEQ ID NO. of SEQ ID NOs: 2350-2870. In some embodiments, the amino acid sequence optionally includes 1, 2, 3, 4, 5, 6, 7, 8, 9, or up to 10 amino acid substitutions, insertions or deletions. In some embodiments, the amino acid sequence of the recombinant factor VIII polypeptide optionally includes 1, 2, 3, 4, or 5 amino acid substitutions, insertions, or deletions. In some embodiments of the foregoing, the amino acid sequence optionally includes 1, 2, 3, 4, 5, 6, 7, 8, 9, or up to 10 amino acid substitutions, or 1, 2, 3, 4, or 5 amino acid substitutions. In some embodiments, the substitutions comprise non-conservative substitutions. In some embodiments, the substitutions comprise conservative substitutions.

[0234] In some embodiments, the recombinant factor VIII polypeptide comprises an amino acid sequence comprising residues 20-1457 of SEQ ID NO: 252, 504, 706, 840, 1200, 1514, or 2072, or an amino acid sequence comprising SEQ ID NO: 252, 504, 706, 840, 1200, 1514, or 2072. In some embodiments, the amino acid sequence optionally includes 1, 2, 3, 4, 5, 6, 7, 8, 9, or up to 10 amino acid substitutions, insertions or deletions. In some embodiments, optionally the amino acid sequence of the recombinant factor VIII polypeptide includes 1, 2, 3, 4, or 5 amino acid substitutions, insertions, or deletions. In some embodiments of the foregoing, optionally the amino acid sequence includes 1, 2, 3, 4, 5, 6, 7, 8, 9, or up to 10 amino acid substitutions, or 1, 2, 3, 4, or 5 amino acid substitutions. In some embodiments, the substitutions comprise non-conservative substitutions. In some embodiments, the substitutions comprise conservative substitutions.

[0235] In some embodiments, the recombinant factor VIII polypeptide described herein has clotting activity. In some embodiments, the recombinant factor VIII polypeptide has an improved property compared to a reference factor VIII polypeptide, wherein the reference factor VIII polypeptide has a sequence corresponding to residues 20-1457 of SEQ ID NO: 2, 252, 504, 706, 840, 1200, 1514, or 2072, or a sequence corresponding to SEQ ID NO: 2, 252, 504, 706, 840, 1200, 1514, or 2072.

[0236] In some embodiments, the recombinant factor VIII polypeptide has increased activity compared to the reference factor VIII polypeptide having a sequence corresponding to residues 20-1457 of SEQ ID NO: 2, 252, 504, 706, 840, 1200, 1514, or 2072, or a sequence corresponding to SEQ ID NO: 2, 252, 504, 706, 840, 1200, 1514, or 2072.

[0237] In some embodiments, the increased activity is clotting activity, particularly increased potency, compared to the reference factor VIII polypeptide having a sequence corresponding to residues 20-1457 of SEQ ID NO: 2, 252, 504, 706, 840, 1200, 1514, or 2072, or a sequence corresponding to SEQ ID NO: 2, 252, 504, 706, 840, 1200, 1514, or 2072.

[0238] In some embodiments, the recombinant factor VIII polypeptide has increased stability to serum and/or plasma exposure, particularly serum or plasma from a hemophilia A patient, compared to the reference factor VIII polypeptide having a sequence corresponding to residues 20-1457 of SEQ ID NO: 2, 252, 504, 706, 840, 1200, 1514, or 2072, or a sequence corresponding to SEQ ID NO: 2, 252, 504, 706, 840, 1200, 1514, or 2072.

[0239] In some embodiments, the recombinant factor VIII polypeptide is more stable at basic pH, e.g., about pH 7.4, than the reference factor VIII polypeptide having a sequence corresponding to residues 20-1457 of SEQ ID NO: 2, 252, 504, 706, 840, 1200, 1514, or 2072, or a sequence corresponding to SEQ ID NO: 2, 252, 504, 706, 840, 1200, 1514, or 2072.

[0240] In some embodiments, the recombinant factor VIII polypeptide has increased thermostability compared to the reference factor VIII polypeptide having a sequence corresponding to residues 20-1457 of SEQ ID NO: 2, 252, 504, 706, 840, 1200, 1514, or 2072, or a sequence corresponding to SEQ ID NO: 2, 252, 504, 706, 840, 1200, 1514, or 2072.

[0241] In some embodiments, the recombinant factor VIII polypeptide is characterized by increased expression and/or secretion from cells that are transfected with an expression vector as compared to a reference factor VIII polypeptide having a sequence corresponding to residues 20-1457 of SEQ ID NO: 2, 252, 504, 706, 840, 1200, 1514, or 2072, or a sequence corresponding to SEQ ID NO: 2, 252, 504, 706, 840, 1200, 1514, or 2072.

[0242] In some embodiments, the recombinant factor VIII polypeptide is characterized by increased transduction and/or secretion from cells that are transduced with a gene therapy composition (e.g., AAV, mRNA, or lipid nanoparticle) as compared to a reference factor VIII polypeptide having a sequence corresponding to residues 20-1457 of SEQ ID NO: 2, 252, 504, 706, 840, 1200, 1514, or 2072, or a sequence corresponding to SEQ ID NO: 2, 252, 504, 706, 840, 1200, 1514, or 2072.

[0243] In some embodiments, the improved property is in comparison to a reference factor VIII polypeptide having the sequence corresponding to residues 20-1457 of SEQ ID NO: 2, or the sequence corresponding to SEQ ID NO: 2.

[0244] In some embodiments, the recombinant factor VIII polypeptide of the present disclosure exhibits at least one improved property selected from: i) increased activity/potency; ii) increased clotting activity/potency; iii) increased stability to plasma or serum; iv) increased thermostability; v) reduced immunogenicity; vi) increased expression and/or secretion from cells that are transfected with an expression vector; vii) increased transduction and/or secretion from cells that are transduced with a gene therapy vector (e.g., AAV, mRNA, or lipid nanoparticle), or a combination of any of i), ii), iii), iv), v), vi, and/or vii), as compared to a reference factor VIII polypeptide having a sequence corresponding to residues 20-1457 of SEQ ID NO: 2, 252, 504, 706, 840, 1200, 1514, or 2072, or a sequence corresponding to SEQ ID NO: 2, 252, 504, 706, 840, 1200, 1514, or 2072. In some embodiments, the reference recombinant factor VIII polypeptide has the sequence corresponding to residues 20-1457 of SEQ ID NO: 2, or the sequence corresponding to SEQ ID NO: 2.

[0245] In some embodiments, the recombinant factor VIII polypeptide is a “deimmunized” recombinant factor VIII polypeptide (e.g., as presented in the Examples in Tables 12.1, 12.2, 12.3, 12.4, 12.5, 12.6, 12.7, 12.8, and 15.2). In some embodiments, the recombinant factor VIII polypeptide is characterized by a reduction of Total Immunogenicity Score (TIS) and/or Immunogenic Hit Count (IHC) as compared to a reference factor VIII polypeptide, wherein the reference factor VIII polypeptide has a sequence corresponding to SEQ ID NO: 2, 252, 504, 706, 840, 1200, 1514, or 2072, such as provided in Tables 12.1, 12.2, 12.3, 12.4, 12.5, 12.6, 12.7, 12.8, and 15.2 of the Examples.

[0246] In some embodiments, a “deimmunized” recombinant factor VIII polypeptide comprises an amino acid sequence comprising residues 20-1457 or residues 1-1457 of a sequence selected from SEQ ID NOs: 4, 6, 8, 10, 12, 14, 16, 18, 20, 26, 28, 32, 34, 36, 38, 40, 42, 44, 46, 48, 50, 52, 54, 56, 60, 64, 66, 68, 72, 74, 76, 78, 82, 84, 86, 88, 90, 92, 94, 96, 98, 100, 102, 104, 106, 108, 110, 112, 114, 116, 118, 120, 122, 130, 132, 134, 136, 138, 140, 142, 146, 148, 150, 152, 154, 156, 158, 160, 162, 164, 166, 168, 170, 172, 174, 176, 178, 180, 182, 184, 186, 188, 190, 192, 194, 196, 198, 200, 202, 204, 206, 208, 210, 212, 214, 216, 218, 220, 222, 224, 226, 228, 230, 232, 234, 236, 238, 242, 244, 248, 252, 260, 262, 266, 270, 274, 278, 280, 282, 284, 286, 288, 290, 292, 296, 298, 300, 302, 310, 312, 320, 322, 324, 326, 328, 330, 332, 334, 336, 338, 340, 342, 344, 346, 348, 350, 352, 354, 356, 358, 360, 362, 364, 366, 368, 370, 372, 374, 376, 378, 380, 382, 384, 386, 388, 390, 392, 394, 396, 398, 400, 402, 404, 406, 408, 410, 412, 414, 416, 418, 420, 424, 426, 428, 430, 432, 434, 436, 438, 442, 444, 446, 448, 452, 454, 456, 458, 460, 462, 464, 466, 468, 470, 472, 474, 476, 478, 480, 482, 484, 486, 488, 490, 492, 498, 500, 502, 504, 506, 508, 510, 512, 514, 516, 518, 520, 522, 524, 526, 530, 532, 534, 536, 538, 540, 542, 544, 546, 548, 550, 552, 554, 556, 558, 560, 562, 564, 566, 568, 570, 574, 578, 580, 582, 584, 586, 588, 590, 592, 594, 596, 598, 600, 602, 604, 606, 608, 610, 612, 614, 618, 620, 622, 624, 626, 628, 630, 632, 634, 636, 638, 640, 642, 644, 646, 648, 650, 652, 654, 656, 658, 660, 662, 664, 666, 668, 670, 672, 674, 676, 678, 680, 682, 684, 686, 688, 690, 692, 694, 696, 698, 700, 702, 704, 706, 708, 710, 712, 714, 716, 718, 720, 722, 724, 728, 730, 732, 734, 736, 738, 740, 742, 744, 746, 748, 750, 752, 754, 756, 758, 760, 762, 764, 766, 768, 770, 772, 774, 776, 778, 780, 782, 784, 786, 788, 790, 792, 794, 796, 798, 800, 802, 804, 806, 808, 810, 812, 814, 816, 818, 820, 822, 824, 826, 828, 830, 832, 834, 836, 838, 840, 842, 844, 846, 848, 850, 852, 854, 856, 858, 860, 862, 864, 868, 876, 878, 880, 882, 884, 886, 890, 892, 896, 900, 904, 906, 908, 910, 912, 914, 922, 932, 934, 936, 938, 940, 942, 944, 946, 948, 952, 956, 958, 960, 962, 964, 966, 970, 974, 976, 978, 980, 982, 986, 988, 990, 996, 998, 1002, 1006, 1008, 1012, 1014, 1018, 1020, 1022, 1024, 1026, 1028, 1030, 1032, 1034, 1036, 1038, 1040, 1042, 1044, 1046, 1048, 1050, 1052, 1054, 1056, 1058, 1064, 1066, 1068, 1070, 1072, 1074, 1076, 1078, 1080, 1082, 1084, 1086, 1088, 1090, 1092, 1096, 1098, 1100, 1102, 1104, 1108, 1110, 1112, 1114, 1116, 1120, 1124, 1126, 1128, 1130, 1132, 1134, 1136, 1138, 1140, 1142, 1144, 1146, 1148, 1150, 1152, 1154, 1156, 1158, 1160, 1162, 1164, 1166, 1168, 1170, 1172, 1174, 1176, 1178, 1180, 1182, 1184, 1186, 1188, 1190, 1192, 1194, 1196, 1198, 1200, 1202, 1204, 1206, 1208, 1210, 1212, 1214, 1216, 1218, 1220, 1222, 1224, 1226, 1228, 1232, 1234, 1236, 1238, 1240, 1242, 1244, 1246, 1248, 1250, 1252, 1254, 1256, 1258, 1260, 1262, 1264, 1266, 1268, 1270, 1272, 1274, 1276, 1278, 1280, 1286, 1300, 1306, 1310, 1314, 1316, 1320, 1322, 1324, 1326, 1328, 1330, 1332, 1334, 1336, 1344, 1352, 1356, 1368, 1370, 1372, 1380, 1384, 1386, 1388, 1390, 1392, 1394, 1400, 1406, 1410, 1412, 1414, 1416, 1418, 1420, 1422, 1424, 1426, 1428, 1430, 1432, 1434, 1436, 1438, 1440, 1442, 1444, 1446, 1448, 1450, 1452, 1454, 1456, 1458, 1460, 1462, 1464, 1466, 1468, 1470, 1472, 1474, 1476, 1478, 1480, 1482, 1484, 1486, 1488, 1490, 1492, 1494, 1496, 1498, 1500, 1502, 1504, 1506, 1508, 1510, 1512, 1514, 1516, 1518, 1520, 1522, 1524, 1526, 1528, 1530, 1532, 1534, 1536, 1540, 1550, 1552, 1554, 1564, 1568, 1570, 1584, 1590, 1592, 1594, 1596, 1598, 1600, 1602, 1604, 1606, 1608, 1610, 1612, 1614, 1616, 1618, 1620, 1622, 1624, 1626, 1628, 1630, 1632, 1634, 1636, 1638, 1640, 1642, 1644, 1646, 1648, 1650, 1654, 1658, 1660, 1662, 1664, 1666, 1670, 1676, 1690, 1694, 1698, 1706, 1710, 1712, 1714, 1720, 1724, 1726, 1728, 1732, 1734, 1740, 1746, 1748, 1750, 1752, 1754, 1756, 1760, 1762, 1772, 1778, 1782, 1784, 1786, 1788, 1792, 1794, 1796, 1798, 1806, 1810, 1814, 1820, 1826, 1846, 1854, 1858, 1860, 1868, 1870, 1872, 1878, 1880, 1882, 1898, 1906, 1908, 1910, 1920, 1924, 1926, 1930, 1932, 1940, 1942, 1950, 1954, 1956, 1958, 1960, 1962, 1964, 1966, 1970, 1972, 1974, 1976, 1978, 1980, 1982, 1984, 1986, 1990, 1992, 1994, 1998, 2000, 2002, 2004, 2006, 2008, 2010, 2012, 2014, 2016, 2018, 2020, 2022, 2024, 2026, 2028, 2030, 2032, 2034, 2038, 2040, 2042, 2044, 2046, 2050, 2052, 2054, 2056, 2058, 2060, 2064, 2066, 2068, 2070, 2098, 2102, 2104, 2106, 2122, 2138, 2142, 2190, 2204, 2206, 2210, 2212, 2214, 2216, 2220, 2226, 2228, 2234, 2236, 2242, 2250, 2252, 2254, 2266, 2268, 2272, 2276, 2278, 2280, 2282, 2284, 2288, 2290, 2302, 2306, 2308, 2310, 2314, 2316, 2318, 2320, 2322, 2324, 2326, 2330, 2334, 2336, 2338, 2340, 2370, 2372, 2374, 2380, 2382, 2386, 2390, 2392, 2394, 2396, 2398, 2402, 2406, 2408, 2412, 2420, 2422, 2432, 2436, 2440, 2446, 2448, 2450, 2454, 2456, 2460, 2464, 2466, 2468, 2472, 2476, 2478, 2484, 2486, 2488, 2494, 2496, 2498, 2500, 2504, 2506, 2510, 2518, 2520, 2526, 2530, 2534, 2542, 2544, 2554, 2556, 2560, 2562, 2564, 2570, 2574, 2576, 2578, 2586, 2588, 2590, 2592, 2594, 2598, 2600, 2602, 2604, 2610, 2614, 2618, 2622, 2628, 2632, 2638, 2644, 2646, 2648, 2650, 2652, 2654, 2656, 2662, 2664, 2672, 2674, 2676, 2682, 2684, 2688, 2690, 2694, 2702, 2704, 2708, 2710, 2712, 2714, 2728, 2734, 2736, 2738, 2742, 2748, 2750, 2754, 2760, 2762, 2764, 2766, 2768, 2770, 2774, 2776, 2778, 2780, 2782, 2784, 2790, 2794, 2798, 2800, 2802, 2804, 2806, 2808, 2810, 2818, 2820, 2824, 2826, 2828, 2830, 2832, 2834, 2836, 2840, 2842, 2844, 2848, 2850, 2852, 2854, 2856, 2858, 2860, 2862, 2864, 2866, 2868, or 2870.

[0247] In some embodiments, for any of the recombinant factor VIII polypeptide disclosed herein, the recombinant factor VIII polypeptide is purified or is a purified preparation.

[0248] In some embodiments, the recombinant factor VIII polypeptide comprises a full length recombinant factor VIII polypeptide of any of the recombinant factor VIII polypeptide described herein. In some embodiments, the recombinant factor VIII polypeptide comprises a “pre-pro-protein” or “pre-pro-polypeptide” of any of the recombinant factor VIII polypeptide described herein. In some embodiments, the signal sequence of the full length recombinant factor VIII polypeptide or “pre-pro-protein” or “pre-pro-polypeptide” thereof can comprise any compatible signal sequence, including synthetic, mouse (e.g., IgG), or human signal sequence. In some embodiments, the signal sequence present in the exemplary recombinant factor VIII polypeptide is replaced with a compatible signal sequence, e.g., synthetic or mouse. In some embodiments, the signal sequence comprises the signal sequence in the naturally occurring human factor VIII polypeptide.

[0249] In some embodiments, the recombinant factor VIII polypeptide is processed or cleaved to a pro-polypeptide or pro-protein form, for example, lacking the signal sequence. In some embodiments, the recombinant factor VIII polypeptide is processed or cleaved to a mature form of the recombinant factor VIII polypeptide, such as described herein. In some embodiments, the mature form of the recombinant factor VIII polypeptide comprises the active form of the recombinant factor VIII polypeptide, particularly the polypeptides (e.g., equivalent form for the light and heavy chain of factor VIII) that interact with FIX (see, e.g., Orlova et al., Acta Naturae, 2013, 5(2): 19-39:3983-3996; Lenting et al., Blood, 1998, 92(11); incorporated herein by reference).

[0250] Thus, for each and every recombinant factor VIII polypeptide described herein, the present disclosure provides a pre-pro-polypeptide, pro-polypeptide, or mature, biologically active form of the recombinant factor VIII polypeptide, including each recombinant factor VIII polypeptides disclosed in Tables 4.1, 4.2, 5.1, 5.2, 6.1, 6.2, 7.1, 7.2, 8.1, 8.2, 9.1, 9.2, 10.1, 10.2, 11.1, and 15.1.

[0251] In some embodiments, the present disclosure further provides a functional or biologically active fragment of a recombinant factor VIII polypeptide described herein. In some embodiments, functional or biologically active fragments have at least 80%, 81%, 82%, 83%, 84%, 85%, 86%, 87%, 88%, 89%, 90%, 91%, 92%, 93%, 94%, 95%, 96%, 97%, 98%, or 99% of the activity of the recombinant factor polypeptide from which is was derived (i.e., the parent engineered factor VIII). In some embodiments, a functional or biologically active fragment comprises at least 80%, 81%, 82%, 83%, 84%, 85%, 86%, 87%, 88%, 89%, 90%, 91%, 92%, 93%, 94%, 95%, 96%, 97%, 98%, or 99% of the parent sequence of the recombinant factor VIII polypeptide. In some embodiments the functional fragment is truncated by less than 5, less than 10, less than 15, less than 10, less than 25, less than 30, less than 35, less than 40, less than 45, and less than 50 amino acids. Exemplary biologically active or functional fragments of the recombinant factor VIII polypeptide include amino acid sequences comprising SEQ ID NO: 2350, 2352, 2354, 2356, or 2358, whose activities are shown in FIG. 3.

[0252] In some embodiments, the functional or biologically active fragment of the recombinant factor VIII polypeptide described herein include at least a mutation or mutation set in the amino acid sequence of the recombinant factor VIII described herein. Accordingly, in some embodiments, the functional or biologically active fragments of the recombinant factor VIII displays the enhanced or improved property associated with the mutation or mutation set in the parent recombinant factor VIII polypeptide.

[0253] In some further embodiments, as discussed herein, a functional fragment or a biologically active fragment encompasses biologically processed polypeptides of a recombinant factor VIII polypeptide, such as functional or biologically active fragments produced upon expression in a mammalian cell or in a patient, or when a recombinant factor VIII polypeptide in administered to a patient. In some embodiments, a biologically processed functional or biologically active fragments of a recombinant factor VIII polypeptide resulting from cleavage or cleavages occurring between residues 760 to 773, and in some embodiments, additional cleavage or cleavages occurring between residues 391 and 392, wherein the positions are relative to the reference sequence of SEQ ID NO: 2, 252, 504, 706, 840, 1200, 1514, or 2072. In some embodiments, the functional or biologically active fragment is derived from a recombinant factor VIII polypeptide presented in Tables 4.1, 4.2, 5.1, 5.2, 6.1, 6.2, 7.1, 7.2, 8.1, 8.2, 9.1, 9.2, 10.1, 10.2, 11.1, and 15.1. In some embodiments, the functional or biologically active fragment is derived from a recombinant factor VIII polypeptide comprising an amino acid sequence of an even-numbered SEQ ID NO. selected from SEQ ID NOs: 4-2346 and 2350-2870.

### Polynucleotides Encoding Recombinant Polypeptides, Expression Vectors, and Host Cells

[0254] In another aspect, the present disclosure provides polynucleotides encoding the engineered factor VIII polypeptides described herein. In some embodiments, the polynucleotides are operatively linked to one or more heterologous or homologous regulatory sequences that control gene expression to create a recombinant polynucleotide capable of expressing the polypeptide. Expression constructs containing a heterologous polynucleotide encoding the recombinant factor VIII polypeptides can be introduced into appropriate host cells to express the corresponding recombinant factor VIII polypeptide.

[0255] As will be apparent to the skilled artisan, availability of a protein sequence and the knowledge of the codons corresponding to the various amino acids provide a description of all the polynucleotides capable of encoding the subject polypeptides. The degeneracy of the genetic code, where the same amino acids are encoded by alternative or synonymous codons, allows an extremely large number of nucleic acids to be made, all of which encode the recombinant factor VIII polypeptide. Thus, having knowledge of a particular amino acid sequence, those skilled in the art could make any number of different nucleic acids by simply modifying the sequence of one or more codons in a way which does not change the amino acid sequence of the protein. In this regard, the present invention specifically contemplates each and every possible variation of polynucleotides that could be made encoding the polypeptides described herein by selecting combinations based on the possible codon choices, and all such variations are to be considered specifically disclosed for any polypeptide described herein, including the variants provided in Tables 4.1, 4.2, 5.1, 5.2, 6.1, 6.2, 7.1, 7.2, 8.1, 8.2, 9.1, 9.2, 10.1, 10.2, 11.1, and 15.1.

[0256] In some embodiments, the codons are preferably selected to fit the host cell in which the protein is being produced. For example, preferred codons used in bacteria are used for expression in bacteria, preferred codons used in fungi are typically used for expression in fungi, and preferred codons used in mammals are used for expression in mammals and mammalian cells. In some embodiments, codon optimized polynucleotides encoding the engineered factor polypeptides contain preferred codons at about 40%, 50%, 60%, 70%, 80%, or greater than 90% of codon positions of the full length coding region. In some embodiments, the present invention provides recombinant polynucleotide sequences in which the codons are optimized for expression in human cells or tissues.

[0257] As discussed above, it is to be understood that the present disclosure provides recombinant polynucleotides encoding each and every recombinant factor VIII polypeptide, or a biologically or functionally active fragment thereof, described herein.

[0258] Accordingly, by way of example and not limitation, in some embodiments, a recombinant polynucleotide comprises a polynucleotide sequence encoding the recombinant factor VIII, or biologically active recombinant factor VIII fragments thereof, comprising an amino acid sequence having at least 70%, 75%, 80%, 81%, 82%, 83%, 84%, 85%, 86%, 87%, 88%, 89%, 90%, 91%, 92%, 93%, 94%, 95%, 96%, 97%, 98%, or 99% or more sequence identity to a reference sequence corresponding to residues 20-1457 of SEQ ID NO: 2, 252, 504, 706, 840, 1200, 1514, or 2072, or to a reference sequence corresponding to SEQ ID NO: 2, 252, 504, 706, 840, 1200, 1514, or 2072, wherein the amino acid sequence comprises one or more substitutions relative to the reference sequence corresponding to residues 20-1457 of SEQ ID NO: 2, 252, 504, 706, 840, 1200, 1514, or 2072, or relative to the reference sequence corresponding to SEQ ID NO: 2, 252, 504, 706, 840, 1200, 1514, or 2072.

[0259] In some embodiments, the recombinant polynucleotide comprises a polynucleotide sequence encoding the recombinant factor VIII polypeptide comprising an amino acid sequence having at least 70%, 75%, 80%, 81%, 82%, 83%, 84%, 85%, 86%, 87%, 88%, 89%, 90%, 91%, 92%, 93%, 94%, 95%, 96%, 97%, 98%, or 99% or more sequence identity to the reference sequence corresponding to residues 20-1457 of SEQ ID NO: 2, or to the reference sequence corresponding to SEQ ID NO: 2, wherein the amino acid sequence comprises one or more substitutions relative to the reference sequence corresponding to residues 20-1457 of SEQ ID NO: 2, or relative to the reference sequence corresponding to SEQ ID NO: 2.

[0260] In some embodiments, the recombinant polynucleotide comprises a polynucleotide sequence encoding the recombinant factor VIII polypeptide comprising an amino acid sequence having at least 70%, 75%, 80%, 81%, 82%, 83%, 84%, 85%, 86%, 87%, 88%, 89%, 90%, 91%, 92%, 93%, 94%, 95%, 96%, 97%, 98%, or 99% or more sequence identity to the reference sequence corresponding to residues 20-1457 of SEQ ID NO: 252, 504, 706, 840, 1200, 1514, or 2072, or to the reference sequence corresponding to SEQ ID NO: 252, 504, 706, 840, 1200, 1514, or 2072, wherein the amino acid sequence comprises one or more substitutions relative to the reference sequence corresponding to residues 20-1457 of SEQ ID NO: 2, or relative to the reference sequence corresponding to SEQ ID NO: 2.

[0261] In some embodiments, the recombinant polynucleotide comprises a polynucleotide sequence encoding a recombinant factor VIII polypeptide comprising an amino acid sequence having at least 70%, 75%, 80%, 81%, 82%, 83%, 84%, 85%, 86%, 87%, 88%, 89%, 90%, 91%, 92%, 93%, 94%, 95%, 96%, 97%, 98%, or 99% or more sequence identity to the reference sequence corresponding to residues 20-1457 of an even-numbered SEQ ID NO. of SEQ ID NOs. 4-2346 and 2360-2870, or to the reference sequence corresponding to an even-numbered SEQ ID NO. of SEQ ID NOs. 4-2346 and 2350-2870, wherein the amino acid sequence comprises one or more substitutions relative to the reference sequence corresponding to residues 20-1457 of SEQ ID NO: 2 or relative to the reference sequence corresponding to SEQ ID NO: 2.

[0262] In some embodiments, the recombinant polynucleotide comprises a polynucleotide sequence encoding the recombinant factor VIII polypeptide comprising an amino acid sequence comprising at least a substitution at position 13, 14, 15, 16, 17, 18, 19, 20, 21, 24, 37, 56, 57, 58, 59, 61, 63, 64, 65, 85, 96, 104, 110, 119, 127, 132, 158, 160, 164, 167, 168, 171, 175, 178, 186, 187, 205, 210, 211, 212, 215, 225, 246, 257, 260, 265, 281, 292, 294, 301, 303, 304, 306, 308, 310, 311, 312, 318, 320, 321, 325, 328, 332, 334, 335, 344, 346, 347, 349, 351, 353, 354, 355, 356, 358, 359, 362, 370, 387, 388, 390, 392, 393, 397, 407, 428, 429, 433, 435, 436, 481, 487, 488, 489, 491, 498, 499, 503, 514, 527, 533, 534, 535, 536, 538, 543, 550, 551, 555, 558, 569, 580, 581, 584, 610, 611, 612, 613, 614, 615, 616, 617, 618, 619, 620, 621, 622, 643, 646, 650, 665, 667, 676, 680, 681, 682, 683, 684, 686, 693, 696, 698, 700, 706, 707, 708, 712, 716, 724, 726, 729, 731, 732, 734, 735, 736, 737, 738, 739, 740, 744, 746, 747, 748, 749, 750, 751, 752, 753, 754, 755, 756, 757, 759, 770, 773, 775, 785, 786, 787, 790, 791, 792, 793, 794, 795, 797, 798, 799, 800, 801, 802, 805, 806, 807, 808, 809, 810, 811, 812, 815, 816, 817, 818, 819, 821, 822, 824, 825, 826, 828, 830, 831, 836, 837, 838, 839, 840, 841, 844, 866, 873, 879, 892, 896, 897, 903, 907, 914, 916, 917, 918, 919, 921, 922, 923, 924, 926, 929, 938, 939, 945, 948, 951, 968, 999, 1037, 1040, 1041, 1042, 1043, 1049, 1050, 1051, 1053, 1054, 1076, 1078, 1080, 1084, 1088, 1089, 1092, 1093, 1094, 1095, 1098, 1099, 1100, 1101, 1104, 1108, 1109, 1113, 1114, 1116, 1127, 1129, 1138, 1145, 1148, 1151, 1156, 1158, 1160, 1186, 1192, 1193, 1194, 1205, 1210, 1218, 1220, 1221, 1222, 1224, 1229, 1245, 1248, 1250, 1259, 1264, 1269, 1270, 1274, 1281, 1283, 1292, 1297, 1339, 1352, 1373, 1377, 1378, 1380, 1389, 1414, 1422, 1427, 1428, 1439, 1440, 1442, or 1452, or combinations thereof, wherein the amino acid positions are relative to the reference sequence of SEQ ID NO: 2.

[0263] In some embodiments, the recombinant polynucleotide comprises a polynucleotide sequence encoding the recombinant factor VIII polypeptide comprising an amino acid sequence comprising at least a substitution or amino acid residue, 13G/Y, 14G/M/V, 15G/S, 16A/D/G/P/V, 17S/V, 18L/R, 19G, 20L, 21M, 24V, 37H, 56E/P, 57A/L/S/T/V, 58K, 59D/G/L/M/Q/R/S/V/W, 61Q/S, 63C/E/F/G/H/I/K/L/M/N/Q/R/S/T/W/Y, 64D/G, 65A, 85Q, 96I/L/R/V/W, 104S, 110H, 119G/V, 127V, 132P/R, 158G, 160E/T, 164E, 167G/H/R, 168G/R, 171A/D/E/F/H/K/N/M/P/Q/R/S/T/V/W/Y, 175A/G/H, 178C/M/Q/V/W, 186A, 187C/G, 205R, 210P, 211G/K/P/Q/R, 212A/F/G/K/L/M/N/P/R/S/V/Y, 215E/P/S, 225R, 246D, 257I, 260E/K/T, 265R/S/W, 281A/S, 292D, 294G, 301K/M, 303G/T, 304A/E/G, 306A/D/G/P/S/T, 308P, 310G/V, 311E/G, 312L, 318C/G/K/M/Q/R/T/V, 320G/I/L/P/Q/R/S/T/V, 321Y, 325Y, 328G/Q/S, 332A/F/G/H/N/P/Q/R/T/V/W/Y, 334G, 335E/P, 344A/E/L, 346R/V, 347N, 349G, 351S, 353S, 354R, 355C, 356L/N, 358K/S, 359E/G, 362E/G/N/P/T/V/W, 370A, 387A/G/I/L/Q/R/S/T/V/W, 388A/P, 390A/E/G/L/M/P/S/T/V, 392A, 393A/F/G/H/M/Q/R/W/Y, 397G/N, 407V, 428F, 429L/S, 433A/G, 435Q, 436D/G, 481V, 487N, 488G, 489E/F/Q/R, 491E, 498A, 499C/L, 503S, 514L, 527A, 533R/V/Y, 534F/I/L/M, 535C/G/N, 536A/G/K/L/M/P/R/W, 538V, 543G/L/P/W, 550G, 551W, 555E/G/R/T, 558A/E/G/L/P/Q/R/S/T/V/W, 569T, 580S/Y, 581K/V, 584A, 610H/K/L/R/S/T, 611D/E, 612G/S/T, 613S, 614A/F/H/I/N/T, 615D/N, 616D/E/G/Q/W, 617D/E/G/N, 618C/E/G/P/Y, 619E, 620N/P, 621K/M/R/T/W, 622D, 643N, 646I, 650M, 665G, 667I, 676Q, 680L/R, 681A/C/E/F/G/L/N/R/Q/S/T/W, 682R, 683W, 684G/K, 686W, 693T, 696E, 698D/S/W/Y, 700A/E/Q/T/V, 706A/G/M/Y, 707H, 708A/K/T/V, 712G/L/M/Q/S/T/Y, 716K/L/W, 724I, 726A/L, 729T, 731I/L/R, 732C/D/E/G/L/R/W/K/M/Q/S/T/V/Y, 734I/R/S, 735D/S/V, 736F/G, 737F/G/K/L/M/N/S/V, 738A/D/E/F/H/K/N/P/R/S/T, 739G/P/R, 740G, 744A/R, 746P, 747D, 748F/G/K/N/S/V, 749A/C/D/F/G/I/K/L/M/P/Q/R/S/T/V/Y, 750A/D/G/K/M/N/P/Q/R/S/T/V/W, 751A/D/E/Y, 752D/E/F/G/L/M/Q/R/S/V, 753D, 754W, 755G/L/P/Q/S/Y, 756G/P/R/T, 757A/G/K/T, 759S, 770W, 773H, 775E/G/K/N/P/S/V, 785V, 786C/D/L, 787W, 790A/G/I/M/P/W, 791M/T, 792H/W/Y, 793G, 794R, 795C/N/S/T, 797C/G/P/Q/T/W/Y, 798C/R/T, 799A/E/G/M/P/Q/R/S/V, 800C/G/I/L/M/N/P/Q/R/T/V/W/Y, 801A/G/I/R, 802S/V, 805C/G/H/K/L/M/P/Q/R/S/V/W, 806E/G/R/S, 807C/L/P/R, 808K/S, 809A/C/G/I/K/L/N/Q/R/S/T/V/W, 810V, 811F, 812G/I/V, 815I, 816V/W, 817A/D, 818A/E/G/P/S/V/W, 819V, 821Q, 822S/T, 824W, 825L, 826G, 828K, 830M/V, 831W, 836G/R/V/W, 837G, 838G/T, 839A/G/K/P, 840G, 841W, 844H, 866A, 873L/Q/T, 879Q, 892T, 896L/V, 897G/K/R, 903E, 907D, 914V, 916C/E/I/K/L/M/Q/T, 917G, 918M/S, 919G, 921R/W, 922W, 923M, 924I/M/P/Q/W, 926T/V, 929A/Q/V, 938R/V, 939E/S, 945K, 948S, 951V, 968A/P, 999R, 1037H/M/N/P, 1040E, 1041G/H/N, 1042A/E/T, 1043E/R, 1049G/W, 1050E/P/Q/S/T, 1051E/H/K/R/S/W, 1053A/R, 1054C, 1076G/S, 1078S, 1080G/V, 1084L/N, 1088G/S, 1089F/S, 1092G, 1093A/E/G/M/N/P/Q/R/S/T/V/W/Y, 1094S, 1095G, 1098G, 1099G, 1100I/S, 1101G, 1104C/E, 1108M/S/V/W, 1109G, 1113F, 1114A/M, 1116A/G/I/L/R, 1127L/V, 1129P, 1138Q, 1145R, 1148A/C/E/L/M/N/Q/R/S, 1151S, 1156D/G/N/R, 1158N, 1160R, 1186E, 1192D, 1193A/E/G/I/L, 1194P, 1205L, 1210M/T/V/W, 1218A/G/L/M/P, 1220D/E/L/T, 1221G/S/T/V, 1222F, 1224P, 1229D, 1245R, 1248A/C/D/E/F/G/H/I/K/M/P/Q/R/S/T/W/Y, 1250A/P/S/T, 1259T, 1264L/R/W, 1269F, 1270V, 1274N/V, 1281H/K/P/Q/R/S, 1283E/H/L/S/T, 1292Y, 1297A, 1339C, 1352E, 1373S, 1377A/C/D/E/G/H/I/M/P/R/S/V/T/Y, 1378A/C/D/E, 1380A/G/W, 1389W, 1414A/C/D/E/G/H/N/P/T/W, 1422I, 1427Y, 1428G, 1439A/E/H/L/S/T, 1440A/C/E/G/S/T, 1442T, or 1452L, or combinations thereof, wherein the amino acid positions are relative to the reference sequence corresponding to SEQ ID NO: 2.

[0264] In some embodiments, the recombinant polynucleotide comprises a polynucleotide sequence encoding the recombinant factor VIII polypeptide comprising an amino acid sequence comprising at least a substitution at amino acid position 63, 171, 212, 260, 306, 317, 320, 332, 387, 390, 393, 534, 558, 681, 732, 738, 749, 750, 775, 1148, 1248, 1377, or 1439, or combinations thereof, wherein the amino acid positions are relative to the reference sequence corresponding to SEQ ID NO: 2.

[0265] In some embodiments, the recombinant polynucleotide comprises a polynucleotide sequence encoding the recombinant factor VIII polypeptide comprising an amino acid sequence comprising at least a substitution or an amino acid residue 63C/E/F/G/H/I/K/L/M/N/Q/R/S/T/W/Y, 171A/D/E/F/H/K/N/M/P/Q/R/S/T/V/W/Y, 212A/F/G/L/K/M/N/P/R/S/V/Y, 260E/K/T, 306A/D/G/P/S/T, 318C/G/K/L/M/Q/R/T/V, 320G/I/L/P/Q/R/S/T/V, 332A/F/G/H/N/P/Q/R/T/V/W/Y, 387A/G/I/L/Q/R/S/T/V/W, 390A/E/G/L/M/P/S/T/V, 393A/F/G/H/M/Q/R/W/Y, 499C/L, 534I/F/L/M, 558A/E/G/L/P/Q/R/S/T/V/W, 681A/C/E/F/G/L/N/R/Q/S/T/W, 700A/E/Q/T/V, 732C/D/E/G/L/R/W/K/M/Q/S/T/V/Y, 738A/D/E/F/H/K/N/P/R/S/T/Y, 749A/C/D/F/G/I/K/L/M/P/Q/R/S/T/V/Y, 750A/D/G/K/M/N/P/Q/R/S/T/V/W, 752D/E/F/G/L/M/Q/R/S/V, 775E/G/K/N/P/S/V, 800C/G/I/L/M/N/P/Q/R/T/V/W/Y, 805C/G/H/K/L/M/P/Q/R/S/V/W, 809A/C/G/I/K/L/N/Q/R/S/T/V/W, 1093A/E/G/M/N/P/Q/R/S/T/V/W/Y, 1148A/C/E/L/M/N/Q/R/S, 1248A/C/D/E/F/G/H/I/K/M/P/Q/R/S/T/W/Y, 1377A/C/D/E/G/H/I/M/P/R/S/V/T/Y, 1414A/C/D/E/G/H/N/P/T/W, or 1439A/E/H/L/S/T, or combinations thereof, wherein the amino acid positions are relative to the reference sequence corresponding to SEQ ID NO: 2.

[0266] In some embodiments, the recombinant polynucleotide comprises a polynucleotide sequence encoding the recombinant factor VIII polypeptide comprising an amino acid sequence comprising at least a substitution or substitution set at amino acid position(s) 1148, 85/708/1148, 798, 706, 171, 335, 63, 344, 428, 879, 59, 429, 205, 1264, 797, 1248, 873, 792, 708, 57, 96, 362, 1292, 346, 433, 65, 795, 684/798, 353, 332, 1259, 356, 436, 1245, 1145, 716, 56, 773, 734, 358, 729, 665, 359, 61, 1250, 726, 37/96/171/429/708/799/1148, 171/429/732/1148, 96/171, 171/919/1151, 171/792/797/799/1148, 171/569/1148, 96/171/429/792/797/799, 171/429/708/1422, 171/429, 321/362/732/797/799, 171/1100, 708/1148/1186, 429/724/732/1148, 171/362/795/797/799, 171/429/732, 96/171/643/797/799, 171/792/797/799, 503, 171/732, 1148/1193, 96/171/362/429/732/795/797, 334, 732, 351, 1377, 999, 306, 349, 257, 646, 435, or 58, wherein the positions are relative to the reference sequence corresponding to SEQ ID NO: 2.

[0267] In some embodiments, the recombinant polynucleotide comprises a polynucleotide sequence encoding the recombinant factor VIII polypeptide comprising an amino acid sequence comprising a substitution at an amino acid position set forth in Tables 4.1, 4.2, 5.1, 5.2, 6.1, 6.2, 7.1, 7.2, 8.1, 8.2, 9.1, 9.2, 10.1, 10.2, 11.1, and 15.1, wherein the amino acid positions are relative to the reference sequence corresponding to SEQ ID NO: 2.

[0268] In some embodiments, the recombinant polynucleotide comprises a polynucleotide sequence encoding the recombinant factor VIII polypeptide comprising an amino acid sequence comprising at least one substitution set forth in Tables 4.1, 4.2, 5.1, 5.2, 6.1, 6.2, 7.1, 7.2, 8.1, 8.2, 9.1, 9.2, 10.1, 10.2, 11.1, and 15.1, wherein the amino acid positions are relative to the reference sequence corresponding to SEQ ID NO: 2.

[0269] In some embodiments, the recombinant polynucleotide comprises a polynucleotide sequence encoding the recombinant factor VIII polypeptide comprising an amino acid sequence comprising at least a substitution or substitution set at the position(s) set forth in Tables 4.1, 4.2, 5.1, 5.2, 6.1, 6.2, 7.1, 7.2, 8.1, 8.2, 9.1, 9.2, 10.1, 10.2, 11.1, and 15.1, wherein the amino acid positions are relative to the reference sequence corresponding to SEQ ID NO: 2.

[0270] In some embodiments, the recombinant polynucleotide comprises a polynucleotide sequence encoding the recombinant factor VIII polypeptide comprising an amino acid sequence comprising at least a substitution or substitution set of a variant set forth in Tables 4.1, 4.2, 5.1, 5.2, 6.1, 6.2, 7.1, 7.2, 8.1, 8.2, 9.1, 9.2, 10.1, 10.2, 11.1, and 15.1, wherein the amino acid positions are relative to the reference sequence corresponding to SEQ ID NO: 2.

[0271] In some embodiments, the recombinant polynucleotide comprises a polynucleotide sequence encoding the recombinant factor VIII polypeptide comprising an amino acid sequence having at least 70%, 75%, 80%, 81%, 82%, 83%, 84%, 85%, 86%, 87%, 88%, 89%, 90%, 91%, 92%, 93%, 94%, 95%, 96%, 97%, 98%, or 99% or more sequence identity to the reference sequence corresponding to residues 20-1457 of SEQ ID NO: 252, 504, 706, 840, 1200, 1514, or 2072, or to the reference sequence corresponding to SEQ ID NO: 252, 504, 706, 840, 1200, 1514, or 2072.

[0272] In some embodiments, the recombinant polynucleotide comprises a polynucleotide sequence encoding the recombinant factor VIII polypeptide comprising an amino acid sequence having at least 70%, 75%, 80%, 81%, 82%, 83%, 84%, 85%, 86%, 87%, 88%, 89%, 90%, 91%, 92%, 93%, 94%, 95%, 96%, 97%, 98%, or 99% or more sequence identity to the reference sequence corresponding to residues 20-1457 of an even-numbered SEQ ID NO. of SEQ ID NOs. 4-2346 and 2360-2870, or to the reference sequence corresponding to an even-numbered SEQ ID NO. of SEQ ID NOs. 4-2346 and 2350-2870.

[0273] In some embodiments, the recombinant polynucleotide comprises a polynucleotide sequence encoding the recombinant factor VIII polypeptide comprising an amino acid sequence having at least 75%, 80%, 81%, 82%, 83%, 84%, 85%, 86%, 87%, 88%, 89%, 90%, 91%, 92%, 93%, 94%, 95%, 96%, 97%, 98%, or 99% or more sequence identity to the reference sequence corresponding to residues 20-1457 of SEQ ID NO: 252, 504, 706, 840, 1200, 1514, or 2072, or to the reference sequence corresponding to SEQ ID NO: 252, 504, 706, 840, 1200, 1514, or 2072, wherein the amino acid sequence comprises one or more substitutions relative to the reference sequence corresponding to residues 20-1457 of SEQ ID NO: 252, 504, 706, 840, 1200, 1514, or 2072, or relative to the reference sequence corresponding to SEQ ID NO: 252, 504, 706, 840, 1200, 1514, or 2072.

[0274] In some embodiments, the recombinant polynucleotide comprises a polynucleotide sequence encoding the recombinant factor VIII polypeptide comprising an amino acid sequence comprising at least a substitution at amino acid position 13, 14, 15, 16, 17, 18, 19, 20, 21, 24, 37, 56, 57, 58, 59, 61, 63, 64, 65, 85, 96, 104, 110, 119, 127, 132, 158, 160, 164, 167, 168, 171, 175, 178, 186, 187, 205, 210, 211, 212, 215, 225, 246, 257, 260, 265, 281, 292, 294, 301, 303, 304, 306, 308, 310, 311, 312, 318, 320, 321, 325, 328, 332, 334, 335, 344, 346, 347, 349, 351, 353, 354, 355, 356, 358, 359, 362, 370, 387, 388, 390, 392, 393, 397, 407, 428, 429, 433, 435, 436, 481, 487, 488, 489, 491, 498, 499, 503, 514, 527, 533, 534, 535, 536, 538, 543, 550, 551, 555, 558, 569, 580, 581, 584, 610, 611, 612, 613, 614, 615, 616, 617, 618, 619, 620, 621, 622, 643, 646, 650, 665, 667, 676, 680, 681, 682, 683, 684, 686, 693, 696, 698, 700, 706, 707, 708, 712, 716, 724, 726, 729, 731, 732, 734, 735, 736, 737, 738, 739, 740, 744, 746, 747, 748, 749, 750, 751, 752, 753, 754, 755, 756, 757, 759, 770, 773, 775, 785, 786, 787, 790, 791, 792, 793, 794, 795, 797, 798, 799, 800, 801, 802, 805, 806, 807, 808, 809, 810, 811, 812, 815, 816, 817, 818, 819, 821, 822, 824, 825, 826, 828, 830, 831, 836, 837, 838, 839, 840, 841, 844, 866, 873, 879, 892, 896, 897, 903, 907, 914, 916, 917, 918, 919, 921, 922, 923, 924, 926, 929, 938, 939, 945, 948, 951, 968, 999, 1037, 1040, 1041, 1042, 1043, 1049, 1050, 1051, 1053, 1054, 1076, 1078, 1080, 1084, 1088, 1089, 1092, 1093, 1094, 1095, 1098, 1099, 1100, 1101, 1104, 1108, 1109, 1113, 1114, 1116, 1127, 1129, 1138, 1145, 1148, 1151, 1156, 1158, 1160, 1186, 1192, 1193, 1194, 1205, 1210, 1218, 1220, 1221, 1222, 1224, 1229, 1245, 1248, 1250, 1259, 1264, 1269, 1270, 1274, 1281, 1283, 1292, 1297, 1339, 1352, 1373, 1377, 1378, 1380, 1389, 1414, 1422, 1427, 1428, 1439, 1440, 1442, or 1452, or combinations thereof, wherein the amino acid positions are relative to the reference sequence corresponding to SEQ ID NO: 252, 504, 706, 840, 1200, 1514, or 2072.

[0275] In some embodiments, the recombinant polynucleotide comprises a polynucleotide sequence encoding the recombinant factor VIII polypeptide comprising an amino acid sequence comprising at least a substitution or an amino acid residue 13G/Y, 14G/M/V, 15G/S, 16A/D/G/P/V, 17S/V, 18L/R, 19G, 20L, 21M, 24V, 37H, 56E/P, 57A/L/S/T/V, 58K, 59D/G/L/M/Q/R/S/V/W, 61Q/S, 63C/E/F/G/H/I/K/L/M/N/Q/R/S/T/W/Y, 64D/G, 65A, 85Q, 96I/L/R/V/W, 104S, 110H, 119G/V, 127V, 132P/R, 158G, 160E/T, 164E, 167G/H/R, 168G/R, 171A/D/E/F/H/K/N/M/P/Q/R/S/T/V/W/Y, 175A/G/H, 178C/M/Q/V/W, 186A, 187C/G, 205R, 210P, 211G/K/P/Q/R, 212A/F/G/L/K/M/N/P/R/S/V/Y, 215E/P/S, 225R, 246D, 257I, 260E/K/T, 265R/S/W, 281A/S, 292D, 294G, 301K/M, 303G/T, 304A/E/G, 306A/D/G/P/S/T, 308P, 310G/V, 311E/G, 312L, 318C/G/K/L/M/Q/R/T/V, 320G/I/L/P/Q/R/S/T/V, 321Y, 325Y, 328G/Q/S, 332A/F/G/H/N/P/Q/R/T/V/W/Y, 334G, 335E/P, 344A/E/L, 346R/V, 347N, 349G, 351S, 353S, 354R, 355C, 356L/N, 358K/S, 359E/G, 362E/G/N/P/T/V/W, 370A, 387A/G/I/L/Q/R/S/T/V/W, 388A/P, 390A/E/G/L/M/P/S/T/V, 392A, 393A/F/G/H/M/Q/R/W/Y, 397G/N, 407V, 428F, 429L/S, 433A/G, 435Q, 436D/G, 481V, 487N, 488G, 489E/F/Q/R, 491E, 498A, 499C/L, 503S, 514L, 527A, 533R/V/Y, 534I/F/L/M, 535C/G/N, 536A/G/K/L/M/P/R/W, 538V, 543G/L/P/W, 550G, 551W, 555E/G/R/T, 558A/E/G/L/P/Q/R/S/T/V/W, 569T, 580S/Y, 581K/V, 584A, 610H/K/L/R/S/T, 611D/E, 612G/S/T, 613S, 614A/F/H/I/N/T, 615D/N, 616D/E/G/Q/W, 617D/E/G/N, 618C/E/G/P/Y, 619E, 620N/P, 621K/M/R/T/W, 622D, 643N, 646I, 650M, 665G, 667I, 676Q, 680L/R, 681A/C/E/F/G/L/N/R/Q/S/T/W, 682R, 683W, 684G/K, 686W, 693T, 696E, 698D/S/W/Y, 700A/E/Q/T/V, 706A/G/M/Y, 707H, 708A/K/T/V, 712G/L/M/Q/S/T/Y, 716K/L/W, 724I, 726A/L, 729T, 731I/L/R, 732C/D/E/G/L/R/W/K/M/Q/S/T/V/Y, 734I/R/S, 735D/S/V, 736F/G, 737F/G/K/L/M/N/S/V, 738A/D/E/F/H/K/N/P/R/S/T/Y, 739G/P/R, 740G, 744A/R, 746P, 747D, 748F/G/K/N/S/V, 749A/C/D/F/G/I/K/L/M/P/Q/R/S/T/V/Y, 750A/D/G/K/M/N/P/Q/R/S/T/V/W, 751A/D/E/Y, 752D/E/F/G/L/M/Q/R/S/V, 753D, 754W, 755G/L/P/Q/S/Y, 756G/P/R/T, 757A/G/K/T, 759S, 770W, 773H, 775E/G/K/N/P/S/V, 785V, 786C/D/L, 787W, 790A/G/I/M/P/W, 791M/T, 792H/W/Y, 793G, 794R, 795C/N/S/T, 797C/G/P/Q/T/W/Y, 798C/R/T, 799A/E/G/M/P/Q/R/S/V, 800C/G/I/L/M/N/P/Q/R/T/V/W/Y, 801A/G/I/R, 802S/V, 805C/G/H/K/L/M/P/Q/R/S/V/W, 806E/G/R/S, 807C/L/P/R, 808K/S, 809A/C/G/I/K/L/N/Q/R/S/T/V/W, 810V, 811F, 812G/I/V, 815I, 816V/W, 817A/D, 818A/E/G/P/S/V/W, 819V, 821Q, 822S/T, 824W, 825L, 826G, 828K, 830M/V, 831W, 836G/R/V/W, 837G, 838G/T, 839A/G/K/P, 840G, 841W, 844H, 866A, 873L/Q/T, 879Q, 892T, 896L/V, 897G/K/R, 903E, 907D, 914V, 916C/E/I/K/L/M/Q/T, 917G, 918M/S, 919G, 921R/W, 922W, 923M, 924I/M/P/Q/W, 926T/V, 929A/Q/V, 938R/V, 939E/S, 945K, 948S, 951V, 968A/P, 999R, 1037H/M/N/P, 1040E, 1041G/H/N, 1042A/E/T, 1043E/R, 1049G/W, 1050E/P/Q/S/T, 1051E/H/K/R/S/W, 1053A/R, 1054C, 1076G/S, 1078S, 1080G/V, 1084L/N, 1088G/S, 1089F/S, 1092G, 1093A/E/G/M/N/P/Q/R/S/T/V/W/Y, 1094S, 1095G, 1098G, 1099G, 1100I/S, 1101G, 1104C/E, 1108M/S/V/W, 1109G, 1113F, 1114A/M, 1116A/G/I/L/R, 1127L/V, 1129P, 1138Q, 1145R, 1148A/C/E/L/M/N/Q/R/S, 1151S, 1156D/G/N/R, 1158N, 1160R, 1186E, 1192D, 1193A/E/G/I/L, 1194P, 1205L, 1210M/T/V/W, 1218A/G/L/M/P, 1220D/E/L/T, 1221G/S/T/V, 1222F, 1224P, 1229D, 1245R, 1248A/C/D/E/F/G/H/I/K/M/P/Q/R/S/T/W/Y, 1250A/P/S/T, 1259T, 1264L/R/W, 1269F, 1270V, 1274N/V, 1281H/K/P/Q/R/S, 1283E/H/L/S/T, 1292Y, 1297A, 1339C, 1352E, 1373S, 1377A/C/D/E/G/H/I/M/P/R/S/V/T/Y, 1378A/C/D/E, 1380A/G/W, 1389W, 1414A/C/D/E/G/H/N/P/T/W, 1422I, 1427Y, 1428G, 1439A/E/H/L/S/T, 1440A/C/E/G/S/T, 1442T, or 1452L, or combinations thereof, wherein the amino acid positions are relative to the reference sequence corresponding to SEQ ID NO: 252, 504, 706, 840, 1200, 1514, or 2072.

[0276] In some embodiments, the recombinant polynucleotide comprises a polynucleotide sequence encoding the recombinant factor VIII polypeptide comprising an amino acid sequence comprising at least a substitution or substitution set at amino acid position 63, 171, 212, 260, 306, 317, 320, 332, 387, 390, 393, 534, 558, 681, 732, 738, 749, 750, 775, 1148, 1248, 1377, or 1439, or combinations thereof, wherein the amino acid positions are relative to the reference sequence corresponding to SEQ ID NO: 252, 504, 706, 840, 1200, 1514, or 2072.

[0277] In some embodiments, the recombinant polynucleotide comprises a polynucleotide sequence encoding the recombinant factor VIII polypeptide comprising an amino acid sequence having at least 70%, 75%, 80%, 81%, 82%, 83%, 84%, 85%, 86%, 87%, 88%, 89%, 90%, 91%, 92%, 93%, 94%, 95%, 96%, 97%, 98%, or 99% or more sequence identity to the reference sequence corresponding to residues 20-1457 of SEQ ID NO: 252, or to the reference sequence corresponding to SEQ ID NO: 252, wherein the amino acid sequence comprises one or more substitutions relative to the reference sequence corresponding to residues 20-1457 of SEQ ID NO: 252, or relative to the reference sequence corresponding to SEQ ID NO: 252.

[0278] In some embodiments, the recombinant polynucleotide comprises a polynucleotide sequence encoding the recombinant factor VIII polypeptide comprising an amino acid sequence comprising at least a substitution or substitution set at amino acid position(s) 1380, 388, 1043, 610, 1274, 1220, 1442, 1193, 621, 1054, 755, 1041, 748, 1049, 1221, 1051, 612, 1037, 616, 387, 489, 750, 1224, 618, 1050, 1053, 896, 897, 749, 260, 481, 613, 756, 63, 265, 752, 1218, 1378, 614, 1440, 1439, 1205, 1222, 1389, 1269, 390, 397/1218, 757, 1373, 346, 63/1248, 349, 306/355/1422, 1422, 306/346/708, 1148, 171/346/1248, 63/797/799/1248/1422, 171/799, 362, 1248, 171/306/346/999/1248, 171/1148, 734/799/1248/1422, 63/732, 63/171/306/346/732, 171, 171/1422, 63/362/732/799/1248, 999/1148/1422, 346/349, 306/349, 63/171/1148/1151, 306, 344/349/354/1250, 1250, 63/306/344/349/354/503/1248, 59/63/332/349/503/706/708, 63/306/344/349/354/706/1248, 59/63, 332/706/708/1248/1250, 503, 59/63/349/354, 59/349/708, 59/306/344/1248, 344/1248/1250, 708, 63/344/349, 59, 63/344/349/354, 706, 59/306/770, 63/347/354/1248, or 354/503, wherein the amino acid positions are relative to the reference sequence corresponding to SEQ ID NO: 252.

[0279] In some embodiments, the recombinant polynucleotide comprises a polynucleotide sequence encoding the recombinant factor VIII polypeptide comprising an amino acid sequence having at least 70%, 75%, 80%, 81%, 82%, 83%, 84%, 85%, 86%, 87%, 88%, 89%, 90%, 91%, 92%, 93%, 94%, 95%, 96%, 97%, 98%, or 99% or more sequence identity to the reference sequence corresponding to residues 20-1457 of SEQ ID NO: 504, or to the reference sequence corresponding to SEQ ID NO: 504, wherein the amino acid sequence comprises one or more substitutions relative to the reference sequence corresponding to residues 20-1457 of SEQ ID NO: 504, or relative to the reference sequence corresponding to SEQ ID NO: 504.

[0280] In some embodiments, the recombinant polynucleotide comprises a polynucleotide sequence encoding the recombinant factor VIII polypeptide comprising an amino acid sequence comprising at least a substitution or substitution set at amino acid position(s) 750, 1051, 260, 756, 1193, 332, 897, 387, 1037, 306/749, 1270, 489, 487, 488, 903, 171/1248/1440, 260/1148/1378, 171/260/387/750/1248, 171/260, 171/260/387/750/1051/1148, 171, 750/1051/1148, 171/260/756, 171/1248, 171/1148, 59, 1440, 332/750/1248, 756/1248, 1248, 171/387/1248/1440, 750/1440, 59/171/750, 171/1193/1248, 750/1148/1193/1440, 1148, 171/387/1051, 748, 306, 306/387/390/749/1220, 390, 306/390/1037, 306/612/749, 387/390/749, 63/390/503/749, 1220, 63/306, 749, 306/390/749/1037, 306/749/1220, 306/387/390/612/749/1037, or 328, wherein the amino acid positions are relative to the reference sequence corresponding to SEQ ID NO: 504.

[0281] In some embodiments, the recombinant polynucleotide comprises a polynucleotide sequence encoding the recombinant factor VIII polypeptide comprising an amino acid sequence having at least 70%, 75%, 80%, 81%, 82%, 83%, 84%, 85%, 86%, 87%, 88%, 89%, 90%, 91%, 92%, 93%, 94%, 95%, 96%, 97%, 98%, or 99% or more sequence identity to the reference sequence corresponding to residues 20-1457 of SEQ ID NO: 706, or to the reference sequence corresponding to SEQ ID NO: 706, wherein the amino acid sequence comprises one or more substitutions relative to the reference sequence corresponding to residues 20-1457 of SEQ ID NO: 706, or relative to the reference sequence corresponding to SEQ ID NO: 706.

[0282] In some embodiments, the recombinant polynucleotide comprises a polynucleotide sequence encoding the recombinant factor VIII polypeptide comprising an amino acid sequence comprising at least a substitution or substitution set at amino acid position(s) 1051, 1221, 1218, 387, 749/1218, 332, 897, 696, 816, 824, 826, 393, 825, 698, 332/387/390/1148, 328/387/749, 749, 306/328/332/390/1051/1193/1218, 63/306/332/1051/1148, 63/306/332/387/1051, 387/390/1051, 186/306/328/332/390/749/1051/1148/1193, 387/390/756/1051, 306/390/1051, 306/332/390/749, 306/387/390/1148, 306/328/332/387/390/749/1051/1148/1193, 332/387/390/749/1148, 387/390/749, 306/387/749/1051/1148, 387/749, 306/945/1051/1193/1221, 306/390/749/1051, 63/306/332/390, 306/387/390/749/1148/1193/1221, 306/332/387/390/749/1218, 63/306/332/390/1051/1148/1193/1218, 924, 755, 752, 751, 923, 797, 754, 793, 753, 922, 896, 938, 775, 732, 810, 747, 393/407, 819, 787, 802, 811, 392, or 397, wherein the amino acid positions are relative to the reference sequence corresponding to SEQ ID NO: 706.

[0283] In some embodiments, the recombinant polynucleotide comprises a polynucleotide sequence encoding the recombinant factor VIII polypeptide comprising an amino acid sequence having at least 70%, 75%, 80%, 81%, 82%, 83%, 84%, 85%, 86%, 87%, 88%, 89%, 90%, 91%, 92%, 93%, 94%, 95%, 96%, 97%, 98%, or 99% or more sequence identity to the reference sequence corresponding to residues 20-1457 of SEQ ID NO: 840, or to the reference sequence corresponding to SEQ ID NO: 840, wherein the amino acid sequence comprises one or more substitutions relative to the reference sequence corresponding to residues 20-1457 of SEQ ID NOs: 840, or relative to the reference sequence corresponding to SEQ ID NO: 840.

[0284] In some embodiments, the recombinant polynucleotide comprises a polynucleotide sequence encoding the recombinant factor VIII polypeptide comprising an amino acid sequence comprising at least a substitution or substitution set at amino acid position(s) 620, 491, 1229, 615, 1283, 822, 328, 212, 818, 555/684, 828, 550, 830, 839, 13, 14, 17, 836, 1210, 1281, 64, 682, 318, 20, 21, 325, 533, 19, 817, 831, 225, 1156, 393/747, 753, 393/732/751, 63/797, 622, 617, 907, 1040, 611, 488, 1192, 1194, 619, 16, 802, 211, 555, 536, 527, 841, 320, 837, 558, 914, 312, 681, 838, 15, 1427, 18, 683, 24, 534, 840, 1160, 551, 393, 393/747/752/811/819/923/1148, 393/751/775, 63/393/732/775/1148, 393/732/1148, 775/1148, 393/752/753/775/793/797, 393/923, 393/923/1148, 393/747/751, 393/747/753/775/1148, 752/923/1051, 63/775, 63/393/752/775/793/1051/1053, 752/753/775/793/819, 63/1051, 63/747/752/753/775/811/819/923/1051, 393/752/787, 751, 63/1148, 63/747/752/753/819/923/1148, 1148, 747/752/753/793/811, 63, 797/1148, 751/752/753/1051, 63/732/1051, 752/797/815/923/1051/1148, or 747/753, wherein the amino acid positions are relative to the reference sequence corresponding to SEQ ID NO: 840.

[0285] In some embodiments, the recombinant polynucleotide comprises a polynucleotide sequence encoding the recombinant factor VIII polypeptide comprising an amino acid sequence having at least 70%, 75%, 80%, 81%, 82%, 83%, 84%, 85%, 86%, 87%, 88%, 89%, 90%, 91%, 92%, 93%, 94%, 95%, 96%, 97%, 98%, or 99% or more sequence identity to the reference sequence corresponding to residues 20-1457 of SEQ ID NO: 1200, or to the reference sequence corresponding to SEQ ID NO: 1200, wherein the amino acid sequence comprises one or more substitutions relative to the reference sequence corresponding to residues 20-1457 of SEQ ID NOs: 1200, or relative to the reference sequence corresponding to SEQ ID NO: 1200.

[0286] In some embodiments, the recombinant polynucleotide comprises a polynucleotide sequence encoding the recombinant factor VIII polypeptide comprising an amino acid sequence comprising at least a substitution or substitution set at amino acid position(s) 681, 622, 617, 558, 536, 211, 320, 839, 797, 533, 751, 303, 951, 164, 818, 807, 799, 735, 794, 926, 755, 921, 801, 1094, 968, 929, 924, 698, 168, 581, 916, 1428, 805, 1114, 311, 737, 693, 809, 757, 1099, 676, 740, 791, 211/536/622/681, 536/558, 211/536/555/617/732, 211/681/732, 211/536/555, 555, 211/536, 211/212, 211/536/617/681/732, 211/536/558/617/681, 555/732, 536/555/558/617/732, 536/617/681/732, 536/555, 536/622/681, 732, 212/320/533/617/681, 211/312/533/534/617/619/681/839, 212, 211/212/320/619/681/839, 797/839, 212/312/320/533/534/617/681, 558/619/681, 320/558/681, 212/320/534/619/681/797/839, 320/558/619/732/839, 211/212/312/534/558/619/681/732/839, 320/534/558/619/732/797, 558/617/619/681, 211/534/558/611/681, 211/320/617/619/681, 558/617/681/797, 320/534/619/732, 211/619/681, 211/212/534/558/619/732/839, 212/320/619/681/797/839, 212/320/611/839, 320/558/619/681, 312/533/617/681/797/839, 558/611/681, 312, 211/320/558/619/681/732/797/839, 320/558/732/797, 533/558/611/619/716/732/839, 312/681, 320/534/619/681, 211/320/533/536/619, 558/617/681/839, 212/320/534/558/681, 533/534/681/839, 212/534/619/681, 617/619/681, 211/212/320/558/617/681, 212/534/558/681/797, 212/320/534, 211/312/619, 212/312/619/839, 210/212/320/558/681, 212/312/534/681/797/839, 211/320/558/839, 294, 759, 538, or 1109, wherein the amino acid positions are relative to the reference sequence corresponding to SEQ ID NO: 1200.

[0287] In some embodiments, the recombinant polynucleotide comprises a polynucleotide sequence encoding the recombinant factor VIII polypeptide comprising an amino acid sequence having at least 70%, 75%, 80%, 81%, 82%, 83%, 84%, 85%, 86%, 87%, 88%, 89%, 90%, 91%, 92%, 93%, 94%, 95%, 96%, 97%, 98%, or 99% or more sequence identity to the reference sequence corresponding to residues 20-1457 of SEQ ID NO: 1514, or to the reference sequence corresponding to SEQ ID NO: 1514, wherein the amino acid sequence comprises one or more substitutions relative to the reference sequence corresponding to residues 20-1457 of SEQ ID NOs: 1514, or relative to the reference sequence corresponding to SEQ ID NO: 1514.

[0288] In some embodiments, the recombinant polynucleotide comprises a polynucleotide sequence encoding the recombinant factor VIII polypeptide comprising an amino acid sequence having at least a substitution or substitution set at amino acid position(s) 1042, 1041, 1051, 1283, 1281, 916, 187, 215, 178, 1050, 1210, 104, 615, 610, 536, 618, 621, 614, 110, 301, 1078, 812, 786, 127, 175, 1093, 1088, 650, 535, 806, 738, 700, 132, 1076, 1084, 498, 756, 1108, 746, 160, 543, 310, 584, 918, 1452, 790, 292, 800, 167, 892, 304, 1116, 752, 281, 917, 712, 1080, 806/1352, 1095, 744, 1098, 948, 119, 785, 1113, 667, 158, 580, 707, 731, 1100, 1089, 1092, 939, 1104, 736, 1297, 1127, 686, 1129, 1138, 786/821, 680, 1101, 808, 739, 308, 536/555/619/732/799/805, 555/619/801, 555/619/799, 619/799/801/805, 536/555/619/732/799, 799/805, 801, 246/619/799/801, 536/555/619, 619/839, 619/799/805, 536/801/805, 555/619/799/805, 619/801/805, 555/619, 536/619/801, 801/805, 536/619/799/805, 555/619/732/799/801/805, 749, 616, 611, 370/614, 1156, 1158, 555/681/737/799, 536/619/809/1109, 536/555/619/737/799/809/839/916/921, 916/1109, 536/619/681/799/916/1109, 555/619/681/807/1109, 555/619/681/737/799, 619/681/799/916/1109, 619/681, 555/921, 619/681/916, 555/619/681/799, 555, 732, 619/799, 619, 681, 555/916, 839, or 799, wherein the amino acid positions are relative to the reference sequence corresponding to SEQ ID NO: 1514.

[0289] In some embodiments, the recombinant polynucleotide comprises a polynucleotide sequence encoding the recombinant factor VIII polypeptide comprising an amino acid sequence having at least 70%, 75%, 80%, 81%, 82%, 83%, 84%, 85%, 86%, 87%, 88%, 89%, 90%, 91%, 92%, 93%, 94%, 95%, 96%, 97%, 98%, or 99% or more sequence identity to the reference sequence corresponding to residues 20-1457 of SEQ ID NO: 2072, or to the reference sequence corresponding to SEQ ID NO: 2072, wherein the amino acid sequence comprises one or more substitutions relative to the reference sequence corresponding to residues 20-1457 of SEQ ID NOs: 2072, or relative to the reference sequence corresponding to SEQ ID NO: 2072.

[0290] In some embodiments, the recombinant polynucleotide comprises a polynucleotide sequence encoding the recombinant factor VIII polypeptide comprising an amino acid sequence comprising at least a substitution or substitution set at amino acid position(s) 167, 167/738/1076/1093, 167/738/752/800/805/808/809/1116, 167/800/809/1076, 167/318, 167/318/800/805/808/809, 167/318/681, 167/318/681/700/805/808/809/1076/1116, 167/318/700, 167, 167/738/1076/1093, 167/738/752/800/805/808/809/1116, 167/800/809/1076, 167/318, 167/318/800/805/808/809, 167/318/681, 167/318/681/700/805/808/809/1076/1116, 167/318/700, 167/318/700/1076, 167/318/700/738/739/1076, 167/681/738/800/808/809, 167/178/700/752/1093, 167/700, 167/700/738/739/1093, 167/700/738/752/1093, 167/700/738/752/805/808/809/1093/1116, 808/809, 1076, 738, 738/808/809, 738/1076, 738/739, 738/739/809, 738/739/809/1093/1116, 738/739/1093, 738/739/752/1093, 738/739/799/800/1093, 738/739/1116, 738/800, 738/1093, 738/752, 738/752/1093, 738/752/799, 738/799/809/1093, 738/799/1093, 739, 739/800/809, 800, 800/805/809, 809, 809/1093, 809/1093/1116, 809/1116, 318, 318/1076, 318/1076/1116, 318/739/805/808/809/1076, 318/499/700/738/809, 318/1093, 318/752/1093, 318/1116, 318/543/739, 318/543/681/752/1116, 318/543/1093, 318/700/738/1093/1414, 681, 681/738, 681/738/739/1093, 681/738/739/752/799/800/809/1116/1339, 681/738/739/1116, 681/738/800, 681/800/805/809, 681/809/1093, 681/752/1093, 681/752/1093, 681/700, 681/700/738/739/1093/1116, 681/700/809, 681/700/1093, 681/700/752/808/809/1093/1116, 681/700/752/1093, 681/700/844, 681/700/805/809, 1093, 1093/1116, 752, 752/1076, 752/800/809, 752/800/1093, 752/809, 752/866, 752/1093, 752/1116, 178/318/739/752/809/1076/1116, 178/318/800/809, 178/318/681/800/808/809/1076, 178/681, 178/681/738/1116, 178/752/809, 178/700/800/805/808/809, 178/805/809/866, 1116, 543, 543/738/739/809, 543/738/809/1093, 543/739/1093, 543/800/1093/1116, 543/809/1093, 543/809/1093/1116, 543/681/738/739/752/809/1093, 543/681/738/739/752/1093, 543/681/739/752/800/805/809/1093, 543/681/700/738/739/800/1093/1116, 543/681/700/738/739/805/808/809, 543/681/700/752, 543/681/700/752/809/1093, 543/1093, 543/700, 543/700/738/739/752/800/1093/1116, 543/700/809, 543/700/1093, 543/700/752, 543/700/752/800/1093, 543/700/752/809/1116, 543/700/752/1093, 700, 700/738/739/800/1093, 700/738/739/799/1093, 700/738/800/1093, 700/738/1116, 700/809, 700/809/1093, 700/1093, 700/1093/1116, 700/752, 700/752/808/809/1093/1116, 700/752/809/1093, 700/752/799/1116, 700/752/805/809/1093, 700/799/800, 700/1116, 700/805/808/809/1076, 514/543/681/805/808/809, 805/808/809, or 805/809/1116, wherein the amino acid positions are relative to the reference sequence corresponding to SEQ ID NO: 2072.

[0291] In some embodiments, the recombinant polynucleotide comprises a polynucleotide sequence encoding the recombinant factor VIII polypeptide comprising an amino acid sequence comprising a substitution at an amino position set forth in Tables 4.1, 4.2, 5.1, 5.2, 6.1, 6.2, 7.1, 7.2, 8.1, 8.2, 9.1, 9.2, 10.1, 10.2, 11.1, and 15.1, wherein the amino acid positions are relative to the reference sequence corresponding to SEQ ID NO: 2, 252, 504, 706, 840, 1200, 1514, or 2072.

[0292] In some embodiments, the recombinant polynucleotide comprises a polynucleotide sequence encoding the recombinant factor VIII polypeptide comprising an amino acid sequence comprising at least one substitution set forth in Tables 4.1, 4.2, 5.1, 5.2, 6.1, 6.2, 7.1, 7.2, 8.1, 8.2, 9.1, 9.2, 10.1, 10.2, 11.1, and 15.1, wherein the amino acid positions are relative to the reference sequence corresponding to SEQ ID NO: 2, 252, 504, 706, 840, 1200, 1514, or 2072.

[0293] In some embodiments, the recombinant polynucleotide comprises a polynucleotide sequence encoding the recombinant factor VIII polypeptide comprising an amino acid sequence comprising at least a substitution or substitution set forth in Tables 4.1, 4.2, 5.1, 5.2, 6.1, 6.2, 7.1, 7.2, 8.1, 8.2, 9.1, 9.2, 10.1, 10.2, 11.1, and 15.1, wherein the amino acid positions are relative to the reference sequence corresponding to SEQ ID NO: 2, 252, 504, 706, 840, 1200, 1514, or 2072.

[0294] In some embodiments, the recombinant polynucleotide comprises a polynucleotide sequence encoding the recombinant factor VIII polypeptide comprising an amino acid sequence comprising at least a substitution or substitution of a variant set forth in Tables 4.1, 4.2, 5.1, 5.2, 6.1, 6.2, 7.1, 7.2, 8.1, 8.2, 9.1, 9.2, 10.1, 10.2, 11.1, and 15.1, wherein the amino acid positions are relative to the reference sequence corresponding to SEQ ID NO: 2, 252, 504, 706, 840, 1200, 1514, or 2072.

[0295] In some embodiments, the recombinant polynucleotide comprises a polynucleotide sequence encoding the recombinant factor VIII polypeptide comprising an amino acid sequence comprising residues 20-1457 of the sequence of an even numbered SEQ ID NO. set forth in Tables 4.1, 4.2, 5.1, 5.2, 6.1, 6.2, 7.1, 7.2, 8.1, 8.2, 9.1, 9.2, 10.1, 10.2, 11.1, and 15.1, or comprising the sequence of an even numbered SEQ ID NO. set forth in Tables 4.1, 4.2, 5.1, 5.2, 6.1, 6.2, 7.1, 7.2, 8.1, 8.2, 9.1, 9.2, 10.1, 10.2, 11.1, and 15.1.

[0296] In some embodiments, the recombinant polynucleotide comprises a polynucleotide sequence encoding the recombinant factor VIII polypeptide comprising an amino acid sequence comprising residues 20-1457 of an even-numbered SEQ ID NO. of SEQ ID NOs: 4-2346 and 2360-2870, or comprising an even-numbered SEQ ID NO. of SEQ ID NOs: 4-2346 and 2350-2870.

[0297] In some embodiments, the recombinant polynucleotide comprises a polynucleotide sequence encoding the recombinant factor VIII polypeptide comprising an amino acid sequence comprising residues 20-1457 of SEQ ID NO: 252, 504, 706, 840, 1200, 1514, or 2072, or comprising SEQ ID NO: 252, 504, 706, 840, 1200, 1514, or 2072.

[0298] In some embodiments, the recombinant polynucleotide comprises a polynucleotide sequence encoding the full length polypeptide, or the pre-pro-protein or the pre-pro-polypeptide of the recombinant factor VIII polypeptide described herein.

[0299] In some embodiments, the recombinant polynucleotide comprises a polynucleotide sequence encoding the pro-protein or pro-polypeptide, or the mature form of the recombinant factor VIII polypeptide described herein.

[0300] In some embodiments, the recombinant polynucleotide comprises a polynucleotide sequence encoding the biologically or functionally active fragment of a recombinant VIII polypeptide described herein. In some embodiments, the recombinant polynucleotide comprises a polynucleotide sequence encoding the biologically or functionally active fragment having a cleavage or cleavages between amino acid residues 760 to 773, and the polypeptide being devoid of some or all of an amino acid sequence corresponding to amino acids 760-773, wherein the positions are relative to SEQ ID NO: 2, 252, 504, 706, 840, 1200, 1514, or 2072. In some embodiments, the recombinant polynucleotide comprises a polynucleotide sequence encoding the biologically or functionally active fragment having a cleavage between amino acid residues 391 and 392, wherein the positions are relative to the reference sequence of SEQ ID NO: 2, 252, 504, 706, 840, 1200, 1514, or 2072.

[0301] In some embodiments, the recombinant polynucleotide comprises a polynucleotide sequence having at least 70%, 75%, 80%, 81%, 82%, 83%, 84%, 85%, 86%, 87%, 88%, 89%, 90%, 91%, 92%, 93%, 94%, 95%, 96%, 97%, 98%, or 99% or more sequence identity to a reference polynucleotide sequence corresponding to nucleotide residues 58-4371 of an odd-numbered SEQ ID NO. of SEQ ID NOs: 3-2345 and 2359-2869, or to a reference polynucleotide sequence corresponding to an odd-numbered SEQ ID NO. of SEQ ID NOs: 3-2345 and 2349-2869, wherein the recombinant polynucleotide encodes a recombinant factor VIII polypeptide.

[0302] In some embodiments, the recombinant polynucleotide comprises a polynucleotide sequence having at least 70%, 75%, 80%, 81%, 82%, 83%, 84%, 85%, 86%, 87%, 88%, 89%, 90%, 91%, 92%, 93%, 94%, 95%, 96%, 97%, 98%, or 99% or more sequence identity to a reference polynucleotide sequence corresponding to nucleotide residues 58-4371 of SEQ ID NO: 1, 251, 503, 705, 839, 1199, 1513, or 2071, or to a reference polynucleotide sequence corresponding to SEQ ID NO: 1, 251, 503, 705, 839, 1199, 1513, or 2071, wherein the recombinant polynucleotide encodes a recombinant factor VIII polypeptide.

[0303] In some embodiments, the recombinant polynucleotide comprises a polynucleotide sequence encoding a recombinant factor VIII polypeptide described herein, wherein the polynucleotide sequence is codon-optimized for expression of the encoded recombinant factor VIII polypeptide. In some embodiments, the polynucleotide sequence is codon optimized for expression in prokaryotic cells or eukaryotic cells. In some embodiments, the polynucleotide sequence is codon optimized for expression in mammalian cells. In some embodiments, the polynucleotide sequence is codon optimized for expression in human cells.

[0304] In some embodiments, the recombinant polynucleotide comprises a polynucleotide sequence comprising nucleotide residues 58-4371 of an odd-numbered SEQ ID NO. of SEQ ID NOs: 3-2345 and 2359-2869, or comprising an odd-numbered SEQ ID NO. of SEQ ID NOs: 3-2345 and 2349-2869.

[0305] In some embodiments, the recombinant polynucleotide comprises a polynucleotide sequence comprising nucleotide residues 58-4371 of SEQ ID NO: 1, 251, 503, 705, 839, 1199, 1513, or 2071, or comprising SEQ ID NO. 1, 251, 503, 705, 839, 1199, 1513, or 2071.

[0306] In some embodiments, the present disclosure provides a recombinant polynucleotide capable of hybridizing under highly stringent conditions to a reference polynucleotide encoding a recombinant factor VIII described herein, e.g., a recombinant polynucleotide provided in Tables 4.1, 4.2, 5.1, 5.2, 6.1, 6.2, 7.1, 7.2, 8.1, 8.2, 9.1, 9.2, 10.1, 10.2, 11.1, and 15.1, or a reverse complement thereof. In some embodiments, the present disclosure provides a recombinant polynucleotide capable of hybridizing under highly stringent conditions to a reverse complement of a reference polynucleotide encoding a recombinant factor VIII polypeptide described herein, wherein the recombinant polynucleotide hybridizing under stringent conditions encodes a recombinant factor VIII polypeptide comprising an amino acid sequence having one or more residue differences as compared to SEQ ID NO: 2, 252, 504, 706, 840, 1200, 1514, or 2072 at residue positions selected from any positions as set forth in Tables 4.1, 4.2, 5.1, 5.2, 6.1, 6.2, 7.1, 7.2, 8.1, 8.2, 9.1, 9.2, 10.1, 10.2, 11.1, and 15.1.

[0307] In some embodiments, the recombinant polynucleotide that hybridizes under highly stringent conditions comprises a polynucleotide sequence having at least 70%, 75%, 80%, 81%, 82%, 83%, 84%, 85%, 86%, 87%, 88%, 89%, 90%, 91%, 92%, 93%, 94%, 95%, 96%, 97%, 98%, 99% or more sequence identity to a reference polynucleotide sequence corresponding to nucleotide residues nucleotide residues 58-4371 of SEQ ID NO: 1, 251, 503, 705, 839, 1199, 1513, or 2071, or to a reference sequence corresponding to SEQ ID NO: SEQ ID NO: 1, 251, 503, 705, 839, 1199, 1513, or 2071. In some additional embodiments, the recombinant polynucleotide hybridizing under highly stringent conditions comprises a polynucleotide sequence having at least 75%, 80%, 81%, 82%, 83%, 84%, 85%, 86%, 87%, 88%, 89%, 90%, 91%, 92%, 93%, 94%, 95%, 96%, 97%, 98%, 99% or more sequence identity to at least one polynucleotide reference sequence corresponding to nucleotide residues 58-4371 of a polynucleotide sequence provided in Tables 4.1, 4.2, 5.1, 5.2, 6.1, 6.2, 7.1, 7.2, 8.1, 8.2, 9.1, 9.2, 10.1, 10.2, 11.1, and 15.1. or a polynucleotide sequence provided in Tables 4.1, 4.2, 5.1, 5.2, 6.1, 6.2, 7.1, 7.2, 8.1, 8.2, 9.1, 9.2, 10.1, 10.2, 11.1, and 15.1. wherein the recombinant polynucleotide hybridizing under stringent conditions encodes a recombinant factor VIII polypeptide.

[0308] In some embodiments, an isolated polynucleotide encoding any of the recombinant factor VIII polypeptides provided herein is manipulated in a variety of ways to provide for expression of the polypeptide. In some embodiments, the polynucleotides encoding the polypeptides are provided as expression vectors where one or more control sequences is present to regulate the expression of the polynucleotides and/or polypeptides. Manipulation of the isolated polynucleotide prior to its insertion into a vector may be desirable or necessary depending on the expression vector. The techniques for modifying polynucleotides and nucleic acid sequences utilizing recombinant DNA methods are well known in the art.

[0309] In some embodiments, the control sequences include among others, promoter sequences, Kozak sequence, leader sequences, polyadenylation sequences, pro-peptide sequences, signal peptide sequences, DNA based regulatory elements for gene therapy retention and transcription terminators. As known in the art, suitable promoters can be selected based on the host cells used. Exemplary promoters for filamentous fungal host cells, include promoters obtained from the genes for Aspergillus oryzae TAKA amylase, Rhizomucor miehei aspartic proteinase, Aspergillus niger neutral alpha-amylase, Aspergillus niger acid stable alpha-amylase, Aspergillus niger or Aspergillus awamori glucoamylase (FVIIIA), Rhizomucor miehei lipase, Aspergillus oryzae alkaline protease, Aspergillus oryzae triose phosphate isomerase, Aspergillus nidulans acetamidase, and Fusarium oxysporum trypsin-like protease (See e.g., WO 96/00787), as well as the NA2-tpi promoter (a hybrid of the promoters from the genes for Aspergillus niger neutral alpha-amylase and Aspergillus oryzae triose phosphate isomerase), and mutant, truncated, and hybrid promoters thereof. Exemplary yeast cell promoters can be from the genes for Saccharomyces cerevisiae enolase (ENO-1), Saccharomyces cerevisiae galactokinase (GAL1), Saccharomyces cerevisiae alcohol dehydrogenase/glyceraldehyde-3-phosphate dehydrogenase (ADH2/GAP), and Saccharomyces cerevisiae 3-phosphoglycerate kinase. Other useful promoters for yeast host cells are known in the art (see e.g., Romanos et al., 1992, Yeast 8:423-488). Exemplary promoters for use in mammalian cells include, but are not limited to those from cytomegalovirus (CMV), chicken @-actin promoter fused with the CMV enhancer, Simian vacuolating virus 40 (SV40), from Homo sapiens phosphoglycerate kinase, beta actin, elongation factor-la or glyceraldehyde-3-phosphate dehydrogenase, or from Gallus @-actin.

[0310] In some embodiments, the control sequence is a suitable transcription terminator sequence, a sequence recognized by a host cell to terminate transcription. The terminator sequence is operably linked to the 3′ terminus of the nucleic acid sequence encoding the polypeptide. Any terminator which is functional in the host cell of choice finds use in the present invention. For example, exemplary transcription terminators for filamentous fungal host cells can be obtained from the genes for Aspergillus oryzae TAKA amylase, Aspergillus niger glucoamylase, Aspergillus nidulans anthranilate synthase, Aspergillus niger alpha-glucosidase, and Fusarium oxysporum trypsin-like protease. Exemplary terminators for yeast host cells can be obtained from the genes for Saccharomyces cerevisiae enolase, Saccharomyces cerevisiae cytochrome C (CYC1), and Saccharomyces cerevisiae glyceraldehyde-3-phosphate dehydrogenase. Other useful terminators for yeast host cells are known in the art (See e.g., Romanos et al., supra). Exemplary terminators for mammalian cells include, but are not limited to those from cytomegalovirus (CMV), Simian vacuolating virus 40 (SV40), from Homo sapiens growth hormone hGH, from bovine growth hormone BGH, and from human or rabbit beta globulin.

[0311] In some embodiments, the control sequence is a suitable leader sequence, 5′-cap modification, 5′ UTR, etc. In some embodiments, these regulatory sequence elements mediate binding to molecules involved in mRNA trafficking and translation, inhibit 5′-exonucleolytic degradation and confer resistance to de-capping. The leader sequence is operably linked to the 5′ terminus of the nucleic acid sequence encoding the polypeptide. Any leader sequence that is functional in the host cell of choice may be used. Exemplary leaders for filamentous fungal host cells are obtained from the genes for Aspergillus oryzae TAKA amylase and Aspergillus nidulans triose phosphate isomerase. Suitable leaders for yeast host cells include, but are not limited to those obtained from the genes for Saccharomyces cerevisiae enolase (ENO-1), Saccharomyces cerevisiae 3-phosphoglycerate kinase, Saccharomyces cerevisiae alpha-factor, and Saccharomyces cerevisiae alcohol dehydrogenase/glyceraldehyde-3-phosphate dehydrogenase (ADH2/GAP). Suitable leaders for mammalian host cells include but are not limited to the 5′-UTR element present in orthopoxvirus mRNA.

[0312] In some embodiments, the control sequence comprises a 3′ untranslated nucleic acid region and polyadenylation tail nucleic acid sequence, sequences operably linked to the 3′ terminus of the protein coding nucleic acid sequence which mediate binding to proteins involved in mRNA trafficking and translation and mRNA half-life. Any polyadenylation sequence and 3′ UTR which is functional in the host cell of choice may be used in the present invention. Exemplary polyadenylation sequences for filamentous fungal host cells include, but are not limited to those from the genes for Aspergillus oryzae TAKA amylase, Aspergillus niger glucoamylase, Aspergillus nidulans anthranilate synthase, Fusarium oxysporum trypsin-like protease, and Aspergillus niger alpha-glucosidase. Useful polyadenylation sequences for yeast host cells are also known in the art (See e.g., Guo and Sherman, Mol. Cell. Biol., 1995, 15:5983-5990). Useful polyadenylation and 3′ UTR sequences for mammalian host cells include, but are not limited to, the 3′-UTRs of α- and β-globin mRNAs that harbor several sequence elements that increase the stability and translation of mRNA.

[0313] In some embodiments, the control sequence is a signal peptide coding region that codes for an amino acid sequence linked to the amino terminus of a polypeptide and directs the encoded polypeptide into the cell's secretory pathway. The 5′ end of the coding sequence of the nucleic acid sequence may inherently contain a signal peptide coding region naturally linked in translation reading frame with the segment of the coding region that encodes the secreted polypeptide. Alternatively, the 5′ end of the coding sequence may contain a signal peptide coding region that is foreign to the coding sequence. Any signal peptide coding region that directs the expressed polypeptide into the secretory pathway of a host cell of choice finds use for expression of the recombinant factor VIII polypeptides provided herein. Effective signal peptide coding regions for filamentous fungal host cells include, but are not limited to the signal peptide coding regions obtained from the genes for Aspergillus oryzae TAKA amylase, Aspergillus niger neutral amylase, Aspergillus niger glucoamylase, Rhizomucor miehei aspartic proteinase, Humicola insolens cellulase, and Humicola lanuginosa lipase. Useful signal peptides for yeast host cells include, but are not limited to those from the genes for Saccharomyces cerevisiae alpha-factor and Saccharomyces cerevisiae invertase. Useful signal peptides for mammalian host cells include but are not limited to those from the genes for immunoglobulin gamma (IgG). In some embodiments, the signal peptide is a signal peptide of a protein expressed in human cells.

[0314] In another aspect, the present disclosure also provides a recombinant expression vector comprising a polynucleotide encoding a recombinant factor VIII polypeptide, and one or more expression regulating regions such as a promoter and a terminator, a replication origin, etc., depending on the type of hosts into which they are to be introduced. In some embodiments, the various nucleic acid and control sequences described above are joined together to produce a recombinant expression vector which includes one or more convenient restriction sites to allow for insertion or substitution of the nucleic acid sequence encoding the recombinant factor VIII polypeptide at such sites. Alternatively, the polynucleotide sequence(s) of the present disclosure are expressed by inserting the polynucleotide sequence or a nucleic acid construct comprising the polynucleotide sequence into an appropriate vector for expression. In creating the expression vector, the coding sequence is located in the vector so that the coding sequence is operably linked with the appropriate control sequences for expression.

[0315] The recombinant expression vector may be any vector (e.g., a plasmid or virus including but not limited to adenovirus (AV), adeno-associated virus (AAV), lentivirus (LV), and non-viral vectors, such as liposomes), that can be conveniently subjected to recombinant DNA procedures and can result in the expression of the recombinant factor VIII polynucleotide sequence. The choice of the vector will typically depend on the compatibility of the vector with the host cell into which the vector is to be introduced. The vectors may be linear or closed circular plasmids.

[0316] In some embodiments, the expression vector is an autonomously replicating vector (i.e., a vector that exists as an extra-chromosomal entity, the replication of which is independent of chromosomal replication, such as a plasmid, an extra-chromosomal element, a minichromosome, or an artificial chromosome). The vector may contain any means for assuring self-replication. In some alternative embodiments, the vector may be one which, when introduced into the host cell, is integrated into the genome and replicated together with the chromosome(s) into which it has been integrated. Furthermore, a single vector or plasmid or two or more vectors or plasmids which together contain the total DNA to be introduced into the genome of the host cell, or a transposon may be used.

[0317] In some embodiments, the expression vector preferably contains one or more selectable markers, which permit easy selection of transformed cells. A “selectable marker” is a gene the product of which provides for biocide or viral resistance, resistance to heavy metals, prototrophy to auxotrophs, and the like. Suitable markers for yeast host cells include, but are not limited to ADE2, HIS3, LEU2, LYS2, MET3, TRP1, and URA3. Selectable markers for use in a filamentous fungal host cell include, but are not limited to, amdS (acetamidase), argB (ornithine carbamoyltransferases), bar (phosphinothricin acetyltransferase), hph (hygromycinphosphotransferase), niaD (nitrate reductase), pyrG (orotidine-5′-phosphate decarboxylase), sC (sulfate adenyltransferase), and trpC (anthranilate synthase), as well as equivalents thereof.

[0318] In another aspect, the present invention provides a host cell comprising a polynucleotide encoding at least one recombinant factor VIII polypeptide described herein, the polynucleotide being operatively linked to one or more control sequences for expression of the recombinant factor VIII polypeptides(s) in the host cell. Host cells for use in expressing the polypeptides encoded by the expression vectors of the present invention are well known in the art and include but are not limited to, bacterial cells, fungal cells, such as yeast cells (e.g., Saccharomyces cerevisiae and Pichia pastoris, e.g., ATCC Accession No. 201178); insect cells (e.g., Drosophila S2 and Spodoptera Sf9 cells), plant cells, animal cells (e.g., CHO, CHO-K1, COS, and BHK), and human cells (e.g., HEK293T, human fibroblast, THP-1, Jurkat and Bowes melanoma cell lines). In some embodiments, the host cell is a human cell obtained or derived from a subject with hemophilia A.

[0319] Accordingly, in another aspect, the present disclosure provides a method for producing the recombinant factor VIII polypeptides, where the method comprises culturing a host cell capable of expressing a polynucleotide encoding the recombinant factor VIII polypeptide under conditions suitable for expression of the polypeptide. In some embodiments, the method further comprises the step of isolating the recombinant factor VIII polypeptide, such as from the culture media or cells. In some embodiments, the method further comprises the step of purifying the expressed recombinant factor VIII polypeptide, as described herein.

[0320] Appropriate culture media and growth conditions for the above-described host cells are well known in the art. Polynucleotides for expression of the recombinant factor VIII polypeptides may be introduced into cells by various methods known in the art. Techniques include, among others, electroporation, biolistic particle bombardment, liposome mediated transfection, calcium chloride transfection, and protoplast fusion.

[0321] The recombinant factor VIII polypeptides with the properties disclosed herein can be obtained by subjecting the polynucleotide encoding the naturally occurring or recombinant factor VIII polypeptide to mutagenesis and/or directed evolution methods known in the art, and as described herein. An exemplary directed evolution technique is mutagenesis and/or DNA shuffling (See e.g., Stemmer, Proc. Natl. Acad. Sci. USA, 1994, 91:10747-10751; WO 95/22625; WO 97/0078; WO 97/35966; WO 98/27230; WO 00/42651; WO 01/75767 and U.S. Pat. No. 6,537,746). Other directed evolution procedures that can be used include, among others, staggered extension process (StEP), in vitro recombination (See e.g., Zhao et al., Nat. Biotechnol., 1998, 16:258-261), mutagenic PCR (See e.g., Caldwell et al., PCR Methods Appl., 1994, 3:S136-S140), and cassette mutagenesis (see e.g., Black et al., Proc. Natl. Acad. Sci. USA, 1996, 93:3525-3529).

[0322] For example, mutagenesis and directed evolution methods can be readily applied to polynucleotides to generate variant libraries that can be expressed, screened, and assayed. Mutagenesis and directed evolution methods are well known in the art (See e.g., U.S. Pat. Nos. 5,605,793, 5,811,238, 5,830,721, 5,834,252, 5,837,458, 5,928,905, 6,096,548, 6,117,679, 6,132,970, 6,165,793, 6,180,406, 6,251,674, 6,277,638, 6,287,861, 6,287,862, 6,291,242, 6,297,053, 6,303,344, 6,309,883, 6,319,713, 6,319,714, 6,323,030, 6,326,204, 6,335,160, 6,335,198, 6,344,356, 6,352,859, 6,355,484, 6,358,740, 6,358,742, 6,365,377, 6,365,408, 6,368,861, 6,372,497, 6,376,246, 6,379,964, 6,387,702, 6,391,552, 6,391,640, 6,395,547, 6,406,855, 6,406,910, 6,413,745, 6,413,774, 6,420,175, 6,423,542, 6,426,224, 6,436,675, 6,444,468, 6,455,253, 6,479,652, 6,482,647, 6,489,146, 6,506,602, 6,506,603, 6,519,065, 6,521,453, 6,528,311, 6,537,746, 6,573,098, 6,576,467, 6,579,678, 6,586,182, 6,602,986, 6,613,514, 6,653,072, 6,716,631, 6,946,296, 6,961,664, 6,995,017, 7,024,312, 7,058,515, 7,105,297, 7,148,054, 7,288,375, 7,421,347, 7,430,477, 7,534,564, 7,620,500, 7,620,502, 7,629,170, 7,702,464, 7,747,391, 7,747,393, 7,751,986, 7,776,598, 7,783,428, 7,795,030, 7,853,410, 7,868,138, 7,873,499, 7,904,249, 7,957,912, 8,383,346, 8,504,498, 8,849,575, 8,876,066, 8,768,871, 9,593,326, and all related non-US counterparts; Ling et al., Anal. Biochem., 1997, 254(2):157-78; Dale et al., Meth. Mol. Biol., 1996, 57:369-74; Smith, Ann. Rev. Genet, 1985, 19:423-462; Botstein et al., Science, 1985, 229:1193-1201; Carter, Biochem. J., 1986, 237:1-7; Kramer et al., 1984, Cell, 38:879-887; Wells et al., Gene, 1985, 34:315-323; Minshull et al., Curr. Op. Chem. Biol., 1999, 3:284-290; Christians et al., Nat. Biotechnol., 1999, 17:259-264; Crameri et al., Nature, 1998, 391:288-291; Crameri, et al., Nat. Biotechnol., 1997, 15:436-438; Zhang et al., Proc. Nat. Acad. Sci. USA, 1997, 94:4504-4509; Crameri et al., Nat. Biotechnol., 1996, 14:315-319; Stemmer, Nature, 1994, 370:389-391; Stemmer, Proc. Nat. Acad. Sci. USA, 1994, 91:10747-10751; U.S. patent publication Nos. 2008/0220990, US 2009/0312196, US2014/0005057, US2014/0214391, US2014/0221216; US2015/0050658, US2015/0133307, US2015/0134315 and all related non-US counterparts; WO 95/22625, WO 97/0078, WO 97/35966, WO 98/27230, WO 00/42651, WO 01/75767, and WO 2009/152336; all of which are incorporated herein by reference).

[0323] In some embodiments, the protein variants obtained following mutagenesis treatment are screened by subjecting the protein variants to a defined temperature, pH, or other assay conditions, and measuring the amount of protein activity remaining after the treatments or other assay conditions. DNA containing the polynucleotide encoding the factor VIII polypeptide is then isolated from the host cell, sequenced to identify the nucleotide sequence changes (if any), and used to express the protein in a different or the same host cell. Measuring protein activity from the expression libraries can be performed using any suitable method known in the art, such as provided in the Examples.

[0324] For engineered polypeptides of known sequence, the polynucleotides encoding the polypeptide can be prepared by standard solid-phase methods, according to known synthetic methods. In some embodiments, polynucleotide fragments can be individually synthesized, then joined (e.g., by enzymatic or chemical litigation methods, or polymerase mediated methods) to form any desired continuous sequence. For example, polynucleotides and oligonucleotides disclosed herein can be prepared by chemical synthesis using the classical phosphoramidite method (See e.g., Beaucage et al., Tetra. Lett., 1981, 22:1859-69; and Matthes et al., EMBO J., 1984, 3:801-05), as it is typically practiced in automated synthetic methods.

[0325] Accordingly, in some embodiments, a method for preparing the recombinant factor VIII polypeptide can comprise: (a) synthesizing a polynucleotide encoding a polypeptide comprising an amino acid sequence selected from the amino acid sequence of any variant provided in Tables 4.1, 4.2, 5.1, 5.2, 6.1, 6.2, 7.1, 7.2, 8.1, 8.2, 9.1, 9.2, 10.1, 10.2, 11.1, and 15.1, as well as SEQ ID NOs: 2-2346 and 2350-2870, and (b) expressing the recombinant factor VIII polypeptide encoded by the polynucleotide. In some embodiments of the method, the amino acid sequence encoded by the polynucleotide can optionally have one or several (e.g., up to 3, 4, 5, or up to 10) amino acid residue deletions, insertions and/or substitutions. In some embodiments, the amino acid sequence has optionally 1-2, 1-3, 1-4, 1-5, 1-6, 1-7, 1-8, 1-9, 1-10, 1-15, 1-20, 1-21, 1-22, 1-23, 1-24, 1-25, 1-30, 1-35, 1-40, 1-45, or 1-50 amino acid residue deletions, insertions and/or substitutions. In some embodiments, the amino acid sequence has optionally 1, 2, 3, 4, 5, 6, 7, 8, 9, 10, 11, 12, 13, 14, 15, 16, 17, 18, 19, 20, 21, 22, 23, 24, 25, 30, 30, 35, 40, 45, or 50 amino acid residue deletions, insertions and/or substitutions. In some embodiments, the amino acid sequence has optionally 1, 2, 3, 4, 5, 6, 7, 8, 9, 10, 11, 12, 13, 14, 15, 16, 18, 20, 21, 22, 23, 24, or 25 amino acid residue deletions, insertions and/or substitutions. In some embodiments, the substitutions can be conservative or non-conservative substitutions.

[0326] The expressed recombinant factor VIII polypeptide can be assessed for any desired improved property (e.g., activity/potency, selectivity, stability, serum/plasma stability, basic pH tolerance, protease sensitivity, etc.), using any suitable assay known in the art, including but not limited to the assays and conditions described herein.

[0327] In some embodiments, any of the recombinant factor VIII polypeptides expressed in a host cell are recovered from the cells and/or the culture medium using any one or more of the well-known techniques for protein purification, including, among others, lysozyme or detergent treatment, sonication, filtration, salting-out, ultra-centrifugation, and chromatography.

[0328] Chromatographic techniques for isolation of the recombinant factor VIII polypeptides include, among others, reverse phase chromatography high performance liquid chromatography, ion exchange chromatography, hydrophobic interaction chromatography, gel electrophoresis, and affinity chromatography. Conditions for purifying a particular polypeptide depends, in part, on factors such as net charge, hydrophobicity, hydrophilicity, molecular weight, molecular shape, etc., and will be apparent to those having skill in the art. In some embodiments, affinity techniques may be used to isolate the improved variant factor VIII polypeptides. In some embodiments utilizing affinity chromatography purification, any antibody which specifically binds the variant factor VIII polypeptide finds use. In some embodiments utilizing affinity chromatography purification, proteins that bind to the glycans covalently attached to factor VIII find use. In still other embodiments utilizing affinity-chromatography purifications, any small molecule that binds to the factor VIII active site finds use. For the production of antibodies, various host animals, including but not limited to rabbits, mice, rats, etc., are immunized by injection with a factor VIII polypeptide (e.g., a factor VIII variant), or a fragment thereof. In some embodiments, the factor VIII polypeptide or fragment is attached to a suitable carrier, such as BSA, by means of a side chain functional group or linkers attached to a side chain functional group.

[0329] In some embodiments, once the recombinant factor VIII polypeptides are recovered or isolated from the recombinant host cells or cell culture medium, they are further purified by any suitable method(s) known in the art. In some additional embodiments, the purified factor VIII polypeptides are combined with other ingredients and compounds to provide compositions and formulations comprising the recombinant factor VIII polypeptide as appropriate for different applications and uses (e.g., pharmaceutical compositions).

[0330] In some additional embodiments, the purified recombinant factor VIII polypeptides, or the formulated recombinant factor VIII polypeptides are lyophilized. In some embodiments, the recombinant factor VIII polypeptides are directly produced within a body (i.e., cells within a body, such as a human or another animal) and are not purified. However, in some alternative embodiments, the recombinant factor VIII polypeptides are produced within a body (i.e., cells within a body, such as a human or another animal) and are collected from the body using methods known in the art. In some additional embodiments, these collected recombinant factor VIII polypeptides are purified.

### Pharmaceutical Compositions

[0331] In a further aspect, the present disclosure provides various compositions and formats comprising a recombinant factor VIII polypeptide, including but not limited to those described below. In some embodiments, the present disclosure provides recombinant polypeptides or recombinant polynucleotides suitable for use in pharmaceutical and other compositions.

[0332] Depending on the mode of administration, a composition comprising a therapeutically effective amount of a recombinant factor VIII described herein is in the form of a solid, semi-solid, or liquid. In some embodiments, the composition includes other pharmaceutically acceptable components such as diluents, buffers, excipients, salts, emulsifiers, preservatives, stabilizers, fillers, and other ingredients. Details on techniques for formulation and administration are well known in the art and described in the literature. In some embodiments, these compositions are produced directly in the human body after introduction as gene therapy.

[0333] In some embodiments, the present disclosure provides a pharmaceutical composition comprising a recombinant factor VIII polypeptide described herein. In some embodiments, the pharmaceutical composition further comprises a pharmaceutically acceptable carrier or excipient. Any suitable form for use in delivering the recombinant factor VIII polypeptides find use in the present disclosure, including but not limited to pills, tablets, gel tabs, capsules, lozenges, dragees, powders, soft gels, sol-gels, gels, emulsions, implants, patches, sprays, ointments, liniments, creams, pastes, jellies, paints, aerosols, chewing gums, demulcents, sticks, solutions, suspensions (including but not limited to oil-based suspensions, oil-in water emulsions, etc.), slurries, syrups, controlled release formulations, etc.

[0334] In some embodiments, the recombinant factor VIII polypeptides are provided in a form suitable for injection or infusion (i.e., in an injectable formulation). In some embodiments, the polynucleotide sequences for the recombinant factor VIII polypeptide is provided in a form suitable for injection or infusion.

[0335] In some embodiments, the recombinant factor VIII polypeptides are provided in biocompatible matrices such as sol-gels, including silica-based (e.g., oxysilane) sol-gels. In some embodiments, the recombinant factor VIII polypeptides are encapsulated. In some alternative embodiments, the recombinant factor VIII polypeptides are encapsulated in nanostructures (e.g., nanotubes, nanotubules, nanocapsules, or microcapsules, microspheres, liposomes, etc.).

[0336] In some embodiments, a composition comprising the recombinant factor VIII polypeptides of the present disclosure may include one or more commonly used carrier compounds, including but not limited to sugars (e.g., lactose, sucrose, mannitol, and/or sorbitol), starches, cellulose (e.g., methyl cellulose, hydroxypropylmethyl cellulose, sodium carboxy-methylcellulose), gums (e.g., arabic, tragacanth, guar, etc.), and/or proteins (e.g., gelatin, collagen, etc.).

[0337] In some embodiments, the recombinant factor VIII polypeptides are chemically modified by glycosylation, chemical crosslinking reagents, pegylation (i.e., modified with polyethylene glycol (PEG) or activated PEG, etc.) or other compounds (see e.g., Ikeda, Amino Acids, 2005, 29:283-287; U.S. Pat. Nos. 7,531,341, 7,534,595, and 7,560,263; US Pat. Publication Nos. 2013/0039898, 2012/0177722, etc.).

[0338] It is intended that the recombinant factor VIII polypeptides be administered by any suitable means known in the art, including but not limited to parenteral, oral, topical, transdermal, intranasal, intraocular, intrathecal, via implants, etc. It is not intended that the present invention be limited to any particular delivery method and/or mechanism.

[0339] In some embodiments, the pharmaceutical composition comprises a recombinant polynucleotide encoding a recombinant factor VIII polynucleotide described herein, such as for gene therapy. In some embodiments, a gene therapy composition comprises a recombinant polynucleotide encoding any of the recombinant factor VIII polypeptides described herein. In some embodiments, the gene therapy composition comprises a viral vector comprising the recombinant polynucleotide encoding a recombinant factor VIII polypeptide. In some embodiments, viral delivery vectors, include but are not limited to adenovirus (AV), adeno-associated virus (AAV), lentivirus (LV), retrovirus, or herpes virus vectors. In some embodiments, the gene therapy compositions comprise non-viral delivery compositions, where the recombinant polynucleotide is formulated with liposomes, cationic polymers, dendrimers, or conjugated to cell-penetrating peptides. In some embodiments, the recombinant factor VIII polypeptides are provided for delivery to cells or tissues via mRNA therapy, such as by formulating a polyribonucleotide (e.g., mRNA) in an encapsulated delivery vehicle (e.g., liposomes).

[0340] In some additional embodiments, the recombinant factor VIII polypeptides are provided for delivery to cells or tissues via cell therapy, where the polynucleotide sequence encoding the recombinant factor VIII polypeptides is introduced into exogenous cell and that cell (or cells) are introduced into a recipient or subject (e.g., a patient exhibiting deficiency in factor VIII). In some embodiments, the cell is an stem cell, particularly a human stem cell.

### Uses and Methods

[0341] In another aspect, the recombinant factor VIII polypeptides disclosed herein are used for therapeutic purposes. In some embodiments, the recombinant factor VIII polypeptides and/or recombinant polynucleotides encoding the recombinant factor VIII polypeptides are used in the treatment of conditions or diseases associated with a deficiency in factor VIII.

[0342] In some embodiments, a method for treating and/or preventing the symptoms of deficiency in factor VIII in a subject comprises administering to a subject having a deficiency in factor VIII a therapeutically effective amount of a recombinant factor VIII polypeptide described herein, or a pharmaceutical composition thereof. In some embodiments, administration of the recombinant factor VIII is provided as enzyme replacement therapy.

[0343] In some embodiments, a method for treating and/or preventing the symptoms of deficiency in factor VIII in a subject comprises providing to a subject having a deficiency in factor VIII a recombinant polynucleotide encoding a recombinant factor VIII polypeptide, such as the gene therapy composition comprising the recombinant polypeptide described above. In some embodiments, the recombinant polynucleotides are provided in a viral vector. In some embodiments, the viral vectors are expression vectors that provide for expression of the encoded recombinant factor VIII polypeptide when the vector is administered to a patient or inserted in a mammalian cell. In some embodiments, the viral vector is based on adenovirus, adeno-associated virus, lentivirus, retrovirus, or herpes virus vectors. In some embodiments, the recombinant polynucleotide is formulated in non-viral delivery compositions, as described above. In some embodiments, the recombinant polynucleotide is provided as gene replacement therapy, for example using CRISPR technology.

[0344] In some embodiments, the condition or disease associated with a deficiency in factor VIII and treated with the recombinant factor VIII polypeptide or a polynucleotide encoding the recombinant factor VIII polypeptide is hemophilia A. In some embodiments, the hemophilia is acquired hemophilia A. In some embodiments, the hemophilia A is from a genetic defect in the gene encoding factor VIII. In some embodiments, the symptoms of deficiency in factor VIII are ameliorated by the treatment.

### EXAMPLES

[0345] The following Examples, including experiments and results achieved, are provided for illustrative purposes only and are not to be construed as limiting the present invention.

[0346] In the experimental disclosure below, the following abbreviations apply where applicable: ppm (parts per million); M (molar); mM (millimolar), uM and μM (micromolar); nM (nanomolar); mol (moles); gm and g (gram); mg (milligrams); ug and μg (micrograms); L and l (liter); ml and mL (milliliter); cm (centimeters); mm (millimeters); um and μm (micrometers); sec. (seconds); min(s) (minute(s)); h(s) and hr(s) (hour(s)); U (units); MW (molecular weight); rpm (rotations per minute); ° C. (degrees Centigrade); CDS (coding sequence); DNA (deoxyribonucleic acid); RNA (ribonucleic acid); FIOPC (fold improvements over positive control).

### Example 1

### FVIII Gene Acquisition and Construction of Expression Vectors

[0347] Synthetic genes (SEQ ID NO: 1) coding for the WT human FVIII sequence with B-domain deleted (SEQ ID NO: 2) were constructed as previously described (See e.g. U.S. Patent Publication. No. 2017/0360900). Oligonucleotides BamHI-pcDNA-FVIII-F and XhoI-pcDNA-FVIII-R were used to amplify a fragment for the coding sequence for the FVIII variants. The PCR product was ligated into the BamHI/XhoI linearized mammalian expression vector pcDNA3.1(+) (Invitrogen), or a vector containing a CMV promoter and BGH-pA (bovine growth hormone polyadenylation) sequence. Directed evolution techniques generally known by those skilled in the art were used to generate gene variants derived from SEQ ID NO: 2 within this plasmid construct (see e.g., U.S. Pat. No. 8,383,346 and International patent publications WO2010/144103).

[0348] Secreted expression of a mammalian cell codon-optimized human FVIII was achieved using the native FVIII signal peptide. Clones were expressed primarily from a pDH.1(+) vector in HEK293T cells, Expi293F™ (ThermoFisher Scientific) cells, and HepG2 cells. This approach provided supernatants with measurable activity in the chromogenic assay (See e.g., Aniara Diagnostica BIOPHEN™ FVIII:C) and the activated partial thromboplastin time (APTT) assay, using plasma from hemophilia A patients.

[0349] In some embodiments, to identify mutational diversity with similar stability and improved blood clotting function compared to SEQ ID NO: 2, a combinatorial library was constructed generating FVIII variants derived from SEQ ID NO:2. Equivalent volumes of supernatant were screened in an unchallenged condition (no incubation, pH 7.4) or following a one-hour to seventeen-hour incubation in a human plasma (physiological pH 7.1-8.2) environment at 37° C. to 55° C. FVIII variants with improved activity due to increased FVIII expression or FVIII specific activity were identified based on their fold improvement over the parent FVIII. FVIII variants with increased stability were identified by dividing the fold-improvement observed under challenged conditions by the fold-improvement observed under unchallenged conditions. This approach reduces the bias towards selecting variants based on increased expression but without changes in stability. Composite activity scores (the product of fold-improvements for all three conditions) and stability (the product of stability scores) were used to rank mutations in improved variants for inclusion in subsequent FVIII libraries. In additional embodiments, the additional methods and sequences described in the Examples were used.

### Example 2

### High-Throughput Growth

### High-Throughput (HTP) Growth of FVIII and FVIII Variants

[0350] Expi293F™ (ThermoFisher Scientific) cells or HepG2 cells were transfected with pcDNA 3.1(+) having a CMV promoter and BGH-pA containing vectors encoding wild type FVIII with B-domain deleted, or variants, using the lipofection method with ExpiFectamine™ 293 Transfection Kit (ThermoFisher Scientific) or LIPOFECTAMINE® 3000 Reagent (ThermoFisher Scientific). Expi293F™ (ThermoFisher Scientific) cells were cultured in growth medium (Expi293™ Expression Medium, ThermoFisher Scientific). Immediately before transfection, cells were transferred to NUNC™ 96-Well DeepWell™ plates (ThermoFisher Scientific) at densities of 10⁸ cells/well/400 μL in growth medium, and incubated at 37° C., 8% CO₂ in an incubator. HepG2 cells were cultured in growth medium (EMEM with 10% fetal bovine serum, both from Corning). 24 hours before transfection, cells were seeded to NUNC® Edge 2.0 96-well plate (ThermoFisher Scientific) at densities of 10⁴ cells/well/250 μL in growth medium, and incubated at 37° C., 5% CO₂ in an incubator. Cells were incubated for 24-96 hours at specific conditions to allow for expression and secretion of FVIII variants. Conditioned media (50-100 μL) from the transfections were transferred into Corning 96-well solid black plates (Corning) for activity and/or stability analysis.

### Example 3

### In Vitro Characterization of Variants in HTP

### HTP-Analysis of Supernatants (Chromogenic Assay)

[0351] FVIII variant activity was determined by measuring the release of paranitroaniline (pNa) from a synthetic peptide substrate. For an unchallenged assay, 25 μL of Expi293F or HepG2 conditioned media produced as described above were warmed to 37° C. and mixed with 25 μL of “Reagent 1” (BIOPHEN™ FVIII:C, Aniara) and 25 μL of “Reagent 2” (BIOPHEN™ FVIII:C, Aniara) in a 96-well, black, opaque bottom microtiter plate. The reactions were mixed briefly and incubated at 37° C. for 5 minutes. 25 μL of “Reagent 3” (BIOPHEN™ FVIII:C, Aniara) was then added, and the reactions were mixed briefly and incubated at 37° C. for 5 minutes prior to quenching with 25 μL pf 2% citric acid. Release of pNA was analyzed using an EnVision® 2105 Multimode Plate Reader (PerkinElmer) monitoring absorbance at 405 nm. “Reagent 1”, “Reagent 2”, and “Reagent 3” are components of a chromogenic assay (BIOPHEN™ FVIII:C) supplied by Aniara and used as recommended by the supplier.

### HTP-Analysis of Supernatants (Clotting Assay)

[0352] FVIII variant activity was determined by measuring the clotting rate of Hemophilia A patient plasma (George King Bio-Medical, Inc.) using the activated partial thromboplastin time assay. For an unchallenged assay, 25 μL of Expi293F or HepG2 conditioned media produced as described above were warmed to 37° C. and mixed with 30 μL of Hemophilia A patient plasma (George King Bio-Medical, Inc.) and 50 μL of aPTT-XL reagent (Pacific Hemostasis) in a 96-well, black, opaque bottom microtiter plate. The reactions were mixed briefly and incubated at 37° C. for 3 minutes. 10 μL of 200 μM calcium chloride (Sigma Aldrich) was then added, and the reactions were mixed briefly. Clotting was analyzed using an EnVision® 2105 Multimode Plate Reader (PerkinElmer) monitoring absorbance at 405 nm over time for 5-10 minutes.

HTP-Analysis of Supernatants Pretreated with Plasma

[0353] FVIII variants were challenged with Hemophilia A patient plasma (George King Bio-Medical, Inc.) to simulate the conditions that the variants may encounter within the bloodstream. First, 50 μL of Expi293F or HepG2 conditioned media produced as described above and 50 μL of Hemophilia A patient plasma (George King Bio-Medical, Inc.) were added to the wells of a 96-well round bottom microtiter plate. The plates were sealed with a PlateLoc® thermal microplate sealer (Agilent), and incubated at 37-55° C. for 1-24 h. The samples were then analyzed by either the chromogenic or clotting assays described above.

### Example 4

### FVIII Variants Derived from SEQ ID NO: 2

[0354] In this Example, experiments conducted to determine FVIII variant activity are described. These variants were tested using the chromogenic assays, as described in Example 3. Results are shown in Tables 4.1 and 4.2 for variants expressed using Expi293F cells.

TABLE 4.1
Activity of FVIII Variants Relative to SEQ ID NO: 2

| | Amino Acid | Unchallenged Chromogenic |
|---|---|---|
| SEQ ID | Differences | Activity FIOPC |
| NO: | (Relative to | Relative to |
| (nt/aa) | SEQ ID NO: 2) | SEQ ID NO: 2 |
| 1/2 | | + |
| 3/4 | T1148N | + |
| 5/6 | P85Q/I708T/T1148N | ++ |
| 7/8 | K798T | + |
| 9/10 | L706G | + |
| 11/12 | L706A | + |
| 13/14 | L171Q | + |
| 15/16 | Q335E | + |
| 17/18 | V63R | ++ |
| 19/20 | K344A | ++ |
| 21/22 | S428F | ++ |
| 23/24 | E879Q | ++ |
| 25/26 | F59L | + |
| 27/28 | Q429S | + |
| 29/30 | K205R | ++ |
| 31/32 | I1264W | + |
| 33/34 | M797P | + |
| 35/36 | L1248S | + |
| 37/38 | I1264R | + |
| 39/40 | Y873T | + |
| 41/42 | T792Y | + |
| 43/44 | I708K | + |
| 45/46 | K344L | ++ |
| 47/48 | F57V | + |
| 49/50 | Q96L | + |
| 51/52 | A362W | + |
| 53/54 | V63G | ++ |
| 55/56 | Y873L | + |
| 57/58 | M1292Y | ++ |
| 59/60 | T1148Q | ++ |
| 61/62 | D346V | ++ |
| 63/64 | M797G | + |
| 65/66 | L706Y | + |
| 67/68 | L1248R | ++ |
| 69/70 | N433A | ++ |
| 71/72 | Y65A | + |
| 73/74 | F59W | + |
| 75/76 | Y873Q | + |
| 77/78 | V795C | + |
| 79/80 | E684K/K798R | ++ |
| 81/82 | F57L | + |
| 83/84 | Q353S | + |
| 85/86 | S332Q | + |
| 87/88 | I708A | + |
| 89/90 | G1259T | + |
| 91/92 | V63M | + |
| 93/94 | M356L | ++ |
| 95/96 | L1248G | ++ |
| 97/98 | L1248P | ++ |
| 99/100 | Q436G | + |
| 101/102 | F57A | + |
| 103/104 | F59S | ++ |
| 105/106 | T1245R | + |
| 107/108 | F59R | + |
| 109/110 | Q96W | + |
| 111/112 | M797Y | + |
| 113/114 | K1145R | + |
| 115/116 | Q436D | + |
| 117/118 | F716L | + |
| 119/120 | S56E | + |
| 121/122 | R773H | + |
| 123/124 | T734I | ++ |
| 125/126 | N358S | ++ |
| 127/128 | Q335P | + |
| 129/130 | F59Q | ++ |
| 131/132 | S729T | + |
| 133/134 | F716K | ++ |
| 135/136 | T665G | + |
| 137/138 | A362T | + |
| 139/140 | F57T | + |
| 141/142 | N359G | + |
| 143/144 | T61S | ++ |
| 145/146 | V1250A | + |
| 147/148 | A362V | + |
| 149/150 | N359E | + |
| 151/152 | F716W | + |
| 153/154 | S332W | ++ |
| 155/156 | I708V | + |
| 157/158 | V63H | ++ |
| 159/160 | M797C | + |
| 161/162 | T61Q | + |
| 163/164 | M356N | ++ |
| 165/166 | V1250S | + |
| 167/168 | K798C | + |
| 169/170 | N433G | ++ |
| 171/172 | V795N | ++ |
| 173/174 | Q96I | + |
| 175/176 | S56P | + |
| 177/178 | V63N | + |
| 179/180 | T792W | + |
| 181/182 | I1264L | + |
| 183/184 | V1250P | + |
| 185/186 | S332P | + |
| 187/188 | F59V | + |
| 189/190 | K726L | ++ |

All activities were determined relative to the reference polypeptide of SEQ ID NO: 2. Levels of increased activity are defined as follows: “+” 0.9 to 1.1, “++” >1.1

TABLE 4.2
Activity of FVIII Variants Relative to SEQ ID NO: 2

| | | Unchallenged |
|---|---|---|
| | Amino Acid | Chromogenic |
| SEQ ID | Differences | Activity FIOPC |
| NO: | (Relative to | Relative to |
| (nt/aa) | SEQ ID NO: 2) | SEQ ID NO: 2 |
| 1/2 | | + |
| 191/192 | Q37H/Q96R/L171P/Q429L/I708T/ | ++ |
| | K799R/T1148N | |
| 193/194 | L171P | ++ |
| 195/196 | L171P/Q429L/K732R/T1148N | ++ |
| 197/198 | Q96R/L171P | ++ |
| 199/200 | L171P/E919G/G1151S | +++ |
| 201/202 | L171P/T792Y/M797Q/K799R/T1148N | ++ |
| 203/204 | L171P/P569T/T1148N | ++ |
| 205/206 | Q96R/L171P/Q429L/T792Y/M797T/ | ++ |
| | K799R | |
| 207/208 | L171P/Q429L/I708T/L1422I | +++ |
| 209/210 | L171P/Q429L | ++ |
| 211/212 | D321Y/A362P/K732E/M797T/K799R | ++ |
| 213/214 | L171P/L1100I | ++ |
| 215/216 | I708T/T1148N/A1186E | +++++ |
| 217/218 | Q429L/L724I/K732E/T1148N | ++ |
| 219/220 | L171P/A362E/V795T/M797Q/K799M | ++ |
| 221/222 | L171P/Q429L/K732E | ++ |
| 223/224 | Q96R/L171P/S643N/M797T/K799R | ++ |
| 225/226 | L171P/T792Y/M797T/K799M | ++ |
| 227/228 | R503S | ++ |
| 229/230 | L171P/K732E | ++ |
| 231/232 | T1148N/F1193L | ++ |
| 233/234 | Q96R/L171P/A362E/Q429L/K732R/ | ++ |
| | V795T/M797Q | |
| 235/236 | K726A | + |
| 237/238 | F59M | + |
| 239/240 | T734R | ++ |
| 241/242 | A362N | + |
| 243/244 | H334G | ++ |
| 245/246 | K732G | ++ |
| 247/248 | V63Q | ++ |
| 249/250 | E351S | ++ |
| 251/252 | L1377D | +++++ |
| 253/254 | V795S | ++ |
| 255/256 | N358K | ++ |
| 257/258 | Q999R | ++ |
| 259/260 | V1250T | ++ |
| 261/262 | E306G | ++ |
| 263/264 | P349G | ++ |
| 265/266 | L1377G | +++ |
| 267/268 | S332F | ++ |
| 269/270 | L1377E | +++++ |
| 271/272 | V257I | ++ |
| 273/274 | L646I | ++ |
| 275/276 | D346R | ++ |
| 277/278 | P435Q | ++ |
| 279/280 | Q96V | ++ |
| 281/282 | L1377R | ++ |
| 283/284 | L1377S | +++ |
| 285/286 | F59G | ++ |
| 287/288 | L171M | ++ |
| 289/290 | T792H | + |
| 291/292 | L1248D | ++ |
| 293/294 | E306S | ++ |
| 295/296 | L706M | ++ |
| 297/298 | L171H | +++ |
| 299/300 | L1377A | ++ |
| 301/302 | L1377V | ++ |
| 303/304 | T734S | ++ |
| 305/306 | T1148R | ++ |
| 307/308 | F57S | ++ |
| 309/310 | F59D | ++ |
| 311/312 | K344E | + |
| 313/314 | A362G | ++ |
| 315/316 | P58K | ++ |

All activities were determined relative to the reference polypeptide of SEQ ID NO: 2. Levels of increased activity are defined as follows: “+” 0.9 to 1.1, “++” >1.1, “+++” >2, “++++” >3.5, “+++++” >5

### Example 5

### FVII Variants Derived from SEQ ID NO: 252

[0355] In this Example, experiments conducted to determine FVIII variant activity are described. These variants were tested using the chromogenic assays, as described in Example 3. Results are shown in Tables 5.1 and 5.2 for variants expressed using Expi293F cells.

TABLE 5.1
Activity of FVIII Variants Relative to SEQ ID NO: 252

| | | | Unchallenged |
|---|---|---|---|
| | Amino Acid | Amino Acid | Chromogenic |
| SEQ ID | Differences | Differences | Activity FIOPC |
| NO: | (Relative to | (Relative to | Relative to |
| (nt/aa) | SEQ ID NO: 252) | SEQ ID NO: 2) | SEQ ID NO: 252 |
| 251/252 | | L1377D | + |
| 317/318 | M1380W | L1377D/M1380W | +++ |
| 319/320 | I388A | I388A/L1377D | + |
| 321/322 | F1043E | F1043E/L1377D | + |
| 323/324 | F1043R | F1043R/L1377D | + |
| 325/326 | I610R | I610R/L1377D | + |
| 327/328 | I1274N | I1274N/L1377D | + |
| 329/330 | S1220T | S1220T/L1377D | + |
| 331/332 | I1442T | L1377D/I1442T | + |
| 333/334 | F1193L | F1193L/L1377D | + |
| 335/336 | Q621T | Q621T/L1377D | + |
| 337/338 | L1054C | L1054C/L1377D | + |
| 339/340 | A755Q | A755Q/L1377D | + |
| 341/342 | Y1041G | Y1041G/L1377D | + |
| 343/344 | Y748S | Y748S/L1377D | + |
| 345/346 | Y1049G | Y1049G/L1377D | + |
| 347/348 | L1221V | L1221V/L1377D | + |
| 349/350 | M1051E | M1051E/L1377D | + |
| 351/352 | R612G | R612G/L1377D | + |
| 353/354 | F1037H | F1037H/L1377D | + |
| 355/356 | N616E | N616E/L1377D | + |
| 357/358 | Y1041H | Y1041H/L1377D | + |
| 359/360 | F387S | F387S/L1377D | + |
| 361/362 | S489R | S489R/L1377D | + |
| 363/364 | Q621M | Q621M/L1377D | + |
| 365/366 | S489Q | S489Q/L1377D | + |
| 367/368 | L750G | L750G/L1377D | ++ |
| 369/370 | S1224P | S1224P/L1377D | + |
| 371/372 | A618C | A618C/L1377D | + |
| 373/374 | N616G | N616G/L1377D | + |
| 375/376 | R612T | R612T/L1377D | + |
| 377/378 | I1050Q | I1050Q/L1377D | + |
| 379/380 | T1053A | T1053A/L1377D | + |
| 381/382 | N616W | N616W/L1377D | + |
| 383/384 | I896V | I896V/L1377D | + |
| 385/386 | S489F | S489F/L1377D | + |
| 387/388 | I1050P | I1050P/L1377D | + |
| 389/390 | M897G | M897G/L1377D | + |
| 391/392 | L749T | L749T/L1377D | + |
| 393/394 | I1274V | I1274V/L1377D | + |
| 395/396 | S1220L | S1220L/L1377D | + |
| 397/398 | S260E | S260E/L1377D | + |
| 399/400 | L481V | L481V/L1377D | +++ |
| 401/402 | F613S | F613S/L1377D | + |
| 403/404 | F387G | F387G/L1377D | + |
| 405/406 | Q621R | Q621R/L1377D | + |
| 407/408 | I756R | I756R/L1377D | + |
| 409/410 | V63R | V63R/L1377D | + |

All activities were determined relative to the reference polypeptide of SEQ ID NO: 252. Levels of increased activity are defined as follows: “+” 0.9 to 1.1, “++” >1.1, “+++” >2

TABLE 5.2
Activity of FVIII Variants Relative to SEQ ID NO: 252

| | Amino Acid | Amino Acid | (Expi293F) Unchallenged |
|---|---|---|---|
| SEQ ID | Differences | Differences | Chromogenic Activity |
| NO: | (Relative to | (Relative to | FIOPC Relative to |
| (nt/aa) | SEQ ID NO: 252) | SEQ ID NO: 2) | SEQ ID NO: 252 |
| 251/252 | | L1377D | |
| 411/412 | I265S | I265S/L1377D | + |
| 413/414 | L1221T | L1221T/L1377D | + |
| 415/416 | M1380G | L1377D/M1380G | ++ |
| 417/418 | K752G | K752G/L1377D | + |
| 419/420 | Y748K | Y748K/L1377D | ++ |
| 421/422 | A755L | A755L/L1377D | ++ |
| 423/424 | F1218A | F1218A/L1377D | ++ |
| 425/426 | Y748N | Y748N/L1377D | + |
| 427/428 | T1378E | L1377D/T1378E | ++ |
| 429/430 | L614I | L614I/L1377D | + |
| 431/432 | L749F | L749F/L1377D | ++ |
| 433/434 | F387V | F387V/L1377D | + |
| 435/436 | L750T | L750T/L1377D | + |
| 437/438 | F1193G | F1193G/L1377D | ++ |
| 439/440 | L749V | L749V/L1377D | ++ |
| 441/442 | T1378A | T1378A/L1377D | + |
| 443/444 | L750V | L750V/L1377D | ++ |
| 445/446 | F387T | F387T/L1377D | ++ |
| 447/448 | F387Q | F387Q/L1377D | ++ |
| 449/450 | L750A | L750A/L1377D | ++ |
| 451/452 | F1037N | F1037N/L1377D | ++ |
| 453/454 | H1440A | H1440A/L1377D | ++ |
| 455/456 | M1051S | M1051S/L1377D | +++ |
| 457/458 | L1221G | L1221G/L1377D | ++ |
| 459/460 | T1378D | L1377D/T1378D | ++ |
| 461/462 | H1440S | L1377D/H1440S | +++ |
| 463/464 | F387R | F387R/L1377D | + |
| 465/466 | F1193A | F1193A/L1377D | ++ |
| 467/468 | F387I | F387I/L1377D | ++ |
| 469/470 | F1218M | F1218M/L1377D | ++ |
| 471/472 | I265W | I265W/L1377D | ++ |
| 473/474 | H1440E | L1377D/H1440E | ++ |
| 475/476 | V1439L | L1377D/V1439L | + |
| 477/478 | H1440T | L1377D/H1440T | +++ |
| 479/480 | R612S | R612S/L1377D | + |
| 481/482 | Y1049W | Y1049W/L1377D | + |
| 483/484 | L1221S | L1221S/L1377D | +++ |
| 485/486 | S1220D | S1220D/L1377D | ++ |
| 487/488 | L749G | L749G/L1377D | ++ |
| 489/490 | L749S | L749S/L1377D | + |
| 491/492 | F1218G | F1218G/L1377D | ++ |
| 493/494 | I1205L | I1205L/L1377D | ++ |
| 495/496 | Y1222F | Y1222F/L1377D | ++ |
| 497/498 | F1193E | F1193E/L1377D | ++ |
| 499/500 | I1050S | I1050S/L1377D | ++ |
| 501/502 | S1389W | L1377D/S1389W | + |
| 503/504 | V1439E | L1377D/V1439E | +++ |
| 505/506 | S260T | S260T/L1377D | ++ |
| 507/508 | F1037P | F1037P/L1377D | + |
| 509/510 | M1051K | M1051K/L1377D | +++ |
| 511/512 | I1269F | I1269F/L1377D | + |
| 513/514 | I265R | I265R/L1377D | ++ |
| 515/516 | M1051R | M1051R/L1377D | ++ |
| 517/518 | F1218L | F1218L/L1377D | ++ |
| 519/520 | M897R | M897R/L1377D | ++ |
| 521/522 | I388P | I388P/L1377D | + |
| 523/524 | Y748G | Y748G/L1377D | ++ |
| 525/526 | I756P | I756P/L1377D | ++ |
| 527/528 | Y748F | Y748F/L1377D | + |
| 529/530 | I390A | I390A/L1377D | ++ |
| 531/532 | I610L | I610L/L1377D | + |
| 533/534 | A755G | A755G/L1377D | ++ |
| 535/536 | L749R | L749R/L1377D | ++ |
| 537/538 | Y748V | Y748V/L1377D | + |
| 539/540 | M1380A | L1377D/M1380A | + |
| 541/542 | H1440C | L1377D/H1440C | + |
| 543/544 | H397N/F1218M | H397N/F1218M/L1377D | ++ |
| 545/546 | F1037M | F1037M/L1377D | + |
| 547/548 | F1218P | F1218P/L1377D | + |
| 549/550 | E757K | E757K/L1377D | ++ |
| 551/552 | V1373S | V1373S/L1377D | ++ |
| 553/554 | H1440G | L1377D/H1440G | ++ |
| 555/556 | F1193I | F1193I/L1377D | ++ |
| 557/558 | V1439T | L1377D/V1439T | ++ |
| 559/560 | L750D | L750D/L1377D | ++ |
| 561/562 | I390G | I390G/L1377D | ++ |
| 563/564 | I756G | I756G/L1377D | + |
| 565/566 | S1220E | S1220E/L1377D | ++ |
| 567/568 | T1378C | L1377D/T1378C | + |
| 569/570 | A618G | A618G/L1377D | + |
| 571/572 | D346R | D346R/L1377D | ++ |
| 573/574 | V63Q/L1248D | V63Q/L1248D/L1377D | ++ |
| 575/576 | P349G | P349G/L1377D | ++ |
| 577/578 | E306G/R355C/L1422I | E306G/R355C/L1377D/L1422I | ++ |
| 579/580 | L1422I | L1377D/L1422I | ++ |
| 581/582 | E306G/D346R/I708T | E306G/D346R/I708T/L1377D | ++ |
| 583/584 | T1148N | T1148N/L1377D | +++ |
| 585/586 | L171P/D346R/L1248D | L171P/D346R/L1248D/L1377D | +++ |
| 587/588 | V63Q/M797T/K799R/L1248D/ | V63Q/M797T/K799R/L1248D/ | ++ |
| | L1422I | L1377D/L1422I | |
| 589/590 | L171P/K799R | L171P/K799R/L1377D | ++ |
| 591/592 | A362P | A362P/L1377D | ++ |
| 593/594 | L1248D | L1248D/L1377D | ++ |
| 595/596 | V63Q | V63Q/L1377D | ++ |
| 597/598 | L171P/E306G/D346R/Q999R/ | L171P/E306G/D346R/Q999R/ | +++ |
| | L1248D | L1248D/L1377D | |
| 599/600 | L171P/T1148N | L171P/T1148N/L1377D | +++ |
| 601/602 | T734S/K799R/L1248D/L1422I | T734S/K799R/L1248D/L1377D/ | ++ |
| | | L1422I | |
| 603/604 | V63Q/K732E | V63Q/K732E/L1377D | +++ |
| 605/606 | V63Q/L171P/E306G/D346R/ | V63Q/L171P/E306G/D346R/ | ++ |
| | K732G | K732G/L1377D | |
| 607/608 | L171P | L171P/L1377D | ++ |
| 609/610 | L171P/L1422I | L171P/L1377D/L1422I | ++ |
| 611/612 | V63Q/A362P/K732G/K799R/ | V63Q/A362P/K732G/K799R/ | ++ |
| | L1248D | L1248D/L1377D | |
| 613/614 | Q999R/T1148N/L1422I | Q999R/T1148N/L1377D/L1422I | + |
| 615/616 | D346R/P349G | D346R/P349G/L1377D | +++ |
| 617/618 | E306G/P349G | E306G/P349G/L1377D | ++ |
| 619/620 | V63Q/L171P/T1148N/G1151S | V63Q/L171P/T1148N/L1377D/ | ++ |
| | | G1151S | |
| 621/622 | E306G | E306G/L1377D | + |
| 623/624 | K344E/P349G/L354R/V1250T | K344E/P349G/L354R/V1250T/ | ++ |
| | | L1377D | |
| 625/626 | V63G | V63G/L1377D | + |
| 627/628 | V1250T | V1250T/L1377D | + |
| 629/630 | V63R/E306G/K344E/P349G/ | V63R/E306G/K344E/P349G/ | +++ |
| | L354R/R503S/L1248R | L354R/R503S/L1248R/L1377D | |
| 631/632 | F59D/V63S/S332P/P349G/ | F59D/V63S/S332P/P349G/R503S/ | ++ |
| | R503S/L706M/I708K | L706M/I708K/L1377D | |
| 633/634 | V63S/E306G/K344A/P349G/ | V63S/E306G/K344A/P349G/ | ++ |
| | L354R/L706M/L1248R | L354R/L706M/L1248R/L1377D | |
| 635/636 | L1248R | L1248R/L1377D | ++ |
| 637/638 | F59D/V63G | F59D/V63G/L1377D | ++ |
| 639/640 | S332P/L706M/I708K/L1248R/ | S332P/L706M/I708K/L1248R/ | ++ |
| | V1250T | V1250T/L1377D | |
| 641/642 | R503S | R503S/L1377D | ++ |
| 643/644 | F59D/V63R/P349G/L354R | F59D/V63R/P349G/L354R/L1377D | +++ |
| 645/646 | F59D/P349G/I708K | F59D/P349G/I708K/L1377D | +++ |
| 647/648 | F59D/E306G/K344E/L1248R | F59D/E306G/K344E/L1248R/L1377D | +++ |
| 649/650 | K344E/L1248R/V1250T | K344E/L1248R/V1250T/L1377D | ++ |
| 651/652 | I708K | I708K/L1377D | ++ |
| 653/654 | V63R/K344E/P349G | V63R/K344E/P349G/L1377D | ++ |
| 655/656 | F59D | F59D/L1377D | + |
| 657/658 | V63S/K344A/P349G/L354R | V63S/K344A/P349G/L354R/L1377D | ++ |
| 659/660 | L706M | L706M/L1377D | + |
| 661/662 | F59D/E306G/R770W | F59D/E306G/R770W/L1377D | + |
| 663/664 | V63G/S347N/L354R/L1248R | V63G/S347N/L354R/L1248R/L1377D | ++ |
| 665/666 | L354R/R503S | L354R/R503S/L1377D | +++ |

All activities were determined relative to the reference polypeptide of SEQ ID NO: 252. Levels of increased activity are defined as follows: “+” 0.9 to 1.1, “++” >1.1, “+++” >2

### Example 6

### FVIII Variants Derived from SEQ ID NO: 504

[0356] In this Example, experiments conducted to determine FVIII variant activity are described. These variants were tested using the chromogenic and clotting assays, as described in Example 3. Results are shown in Tables 6.1 and 6.2 for variants expressed using Expi293F cells or HepG2 cells.

TABLE 6.1
Activity of FVIII Variants Relative to SEQ ID NO: 504

| | Amino Acid | Amino Acid | (Expi293F) Unchallenged |
|---|---|---|---|
| | Differences | Differences | Chromogenic Activity |
| SEQ ID | (Relative to SEQ | (Relative to | FIOPC Relative to SEQ ID |
| NO: (nt/aa) | ID NO: 504) | SEQ ID NO: 2) | NO: 504 |
| 503/504 | | L1377D/V1439E | + |
| 667/668 | L750D | L750D/L1377D/V1439E | ++ |
| 669/670 | M1051K | M1051K/L1377D/V1439E | ++ |
| 671/672 | M1051S | M1051S/L1377D/V1439E | ++ |
| 673/674 | S260T | S260T/L1377D/V1439E | ++ |
| 675/676 | I756P | I756P/L1377D/V1439E | + |
| 677/678 | F1193A | F1193A/L1377D/V1439E | ++ |
| 679/680 | S332P | S332P/L1377D/V1439E | + |
| 681/682 | M897R | M897R/L1377D/V1439E | ++ |
| 683/684 | F387Q | F387Q/L1377D/V1439E | + |
| 685/686 | F1037N | F1037N/L1377D/V1439E | + |
| 687/688 | F387R | F387R/L1377D/V1439E | ++ |
| 689/690 | E306G/L749F | E306G/L749F/L1377D/V1439E | ++ |
| 691/692 | I1270V | I1270V/L1377D/V1439E | + |
| 693/694 | S489E | S489E/L1377D/V1439E | ++ |
| 695/696 | Q487N | Q487N/L1377D/V1439E | ++ |
| 697/698 | A488G | A488G/L1377D/V1439E | ++ |
| 699/700 | Q903E | Q903E/L1377D/V1439E | + |

All activities were determined relative to the reference polypeptide of SEQ ID NO: 504. Levels of increased activity are defined as follows: “+” 0.9 to 1.1, “++” >1.1

TABLE 6.2
Activity of FVIII Variants Relative to SEQ ID NO: 504

| | | | (Expi293F) | (HepG2) | (Expi293F) |
|---|---|---|---|---|---|
| | | | Unchallenged | Unchallenged | Unchallenged |
| | | | Chromogenic | Chromogenic | Clotting |
| | Amino Acid | Amino Acid | Activity | Activity | Activity |
| SEQ ID | Differences | Differences | FIOPC | FIOPC | FIOPC |
| NO: | (Relative to | (Relative to | Relative to | Relative to | Relative to |
| (nt/aa) | SEQ ID NO: 504) | SEQ ID NO: 2) | SEQ ID NO:504 | SEQ ID NO: 504 | SEQ ID NO: 504 |
| 503/504 | | L1377D/V1439E | + | + | + |
| 701/702 | L171P/L1248D/H1440T | L171P/L1248D/ | +++ | +++ | ++ |
| | | L1377D/V1439E/H1440T | | | |
| 703/704 | S260T/T1148N/T1378D | S260T/T1148N/L1377D/ | +++ | + | + |
| | | T1378D/V1439E | | | |
| 705/706 | L171P/S260T/F387I/ | L171P/S260T/F387I/ | +++ | +++ | +++ |
| | L750D/L1248D | L750D/L1248D/L1377D/ | | | |
| | | V1439E | | | |
| 707/708 | L171P/S260T | L171P/S260T/L1377D/ | +++ | +++ | ++ |
| | | V1439E | | | |
| 709/710 | L171P/S260T/F387I/ | L171P/S260T/F387I/ | +++ | +++ | +++ |
| | L750D/M1051S/T1148N | L750D/M1051S/T1148N/ | | | |
| | | L1377D/V1439E | | | |
| 711/712 | L171P | L171P/L1377D/V1439E | +++ | +++ | ++ |
| 713/714 | L750D/M1051S/T1148N | L750D/M1051S/T1148N/ | +++ | ++ | ++ |
| | | L1377D/V1439E | | | |
| 715/716 | L171P/S260T/I756P | L171P/S260T/I756P/ | +++ | +++ | ++ |
| | | L1377D/V1439E | | | |
| 717/718 | L171P/L1248D | L171P/L1248D/L1377D/ | +++ | +++ | ++ |
| | | V1439E | | | |
| 719/720 | L171P/T1148N | L171P/T1148N/L1377D/ | ++ | +++ | ++ |
| | | V1439E | | | |
| 721/722 | F387I | F387I/L1377D/V1439E | ++ | + | + |
| 723/724 | F59D | F59D/L1377D/V1439E | ++ | + | ++ |
| 725/726 | H1440S | L1377D/V1439E/H1440S | ++ | + | + |
| 727/728 | S332P/L750D/L1248D | S332P/L750D/L1248D/ | +++ | ++ | +++ |
| | | L1377D/V1439E | | | |
| 729/730 | I756P/L1248D | I756P/L1248D/L1377D/ | ++ | + | ++ |
| | | V1439E | | | |
| 731/732 | L1248D | L1248D/L1377D/V1439E | ++ | | ++ |
| 733/734 | L171P/F387I/L1248D/ | L171P/F387I/L1248D/ | +++ | ++ | ++ |
| | H1440S | L1377D/H1440S/V1439E | | | |
| 735/736 | L750D/H1440S | L750D/L1377D/V1439E/ | ++ | ++ | ++ |
| | | H1440S | | | |
| 737/738 | F59D/L171P/L750D | F59D/L171P/L750D/ | +++ | +++ | +++ |
| | | L1377D/V1439E | | | |
| 739/740 | L171P/F1193A/L1248D | L171P/F1193A/L1248D/ | +++ | +++ | ++ |
| | | L1377D/V1439E | | | |
| 741/742 | L750D/T1148N/ | L750D/T1148N/F1193A/ | +++ | ++ | ++ |
| | F1193A/H1440S | L1377D/V1439E/H1440S | | | |
| 743/744 | T1148N | T1148N/L1377D/V1439E | ++ | ++ | ++ |
| 745/746 | L171P/F387I/M1051K | L171P/F387I/M1051K/ | ++ | +++ | ++ |
| | | L1377D/V1439E | | | |
| 747/748 | Y748G | Y748G/L1377D/V1439E | ++ | + | + |
| 749/750 | E306G | E306G/L1377D/V1439E | | | ++ |
| 751/752 | E306G/F387R/I390A/ | E306G/F387R/I390A/ | +++ | +++ | ++ |
| | L749F/S1220D | L749F/S1220D/L1377D/ | | | |
| | | V1439E | | | |
| 753/754 | I390A | I390A/L1377D/V1439E | ++ | +++ | ++ |
| 755/756 | E306G/I390A/F1037N | E306G/I390A/F1037N/ | ++ | ++ | ++ |
| | | L1377D/V1439E | | | |
| 757/758 | E306G/R612S/L749F | E306G/R612S/L749F/ | ++ | + | ++ |
| | | L1377D/V1439E | | | |
| 759/760 | F387V/I390A/L749F | F387V/I390A/L749F/ | +++ | ++ | ++ |
| | | L1377D/V1439E | | | |
| 761/762 | V63S/I390A/R503S/ | V63S/I390A/R503S/ | ++ | ++ | ++ |
| | L749F | L749F/L1377D/V1439E | | | |
| 763/764 | F387R/I390A/L749R | F387R/I390A/L749R/ | ++ | ++ | ++ |
| | | L1377D/V1439E | | | |
| 765/766 | S1220D | S1220D/L1377D/V1439E | ++ | | |
| 767/768 | V63S/E306G | V63S/E306G/L1377D/ | ++ | ++ | ++ |
| | | V1439E | | | |
| 769/770 | L749F | L749F/L1377D/V1439E | | ++ | ++ |
| 771/772 | E306G/I390A/L749F/ | E306G/I390A/L749F/ | ++ | ++ | ++ |
| | F1037N | F1037N/L1377D/V1439E | | | |
| 773/774 | F387V | F387V/L1377D/V1439E | ++ | ++ | + |
| 775/776 | E306G/L749F/S1220D | E306G/L749F/S1220D/ | ++ | ++ | + |
| | | L1377D/V1439E | | | |
| 777/778 | E306G/F387V/I390A/ | E306G/F387V/I390A/ | ++ | ++ | ++ |
| | R612S/L749F/ | R612S/L749F/F1037N/ | | | |
| | F1037N | L1377D/V1439E | | | |
| 779/780 | F328S | F328S/L1377D/V1439E | ++ | ++ | + |

All activities were determined relative to the reference polypeptide of SEQ ID NO: 504. Level of increased activity are defined as follows: “+” 0.9 to 1.1, “++” >1.1, “+++” >2

### Example 7

### FVIII Variants Derived from SEQ ID NO: 706

[0357] In this Example, experiments conducted to determine FVIII variant activity are described. These variants were tested using the chromogenic and clotting assays, as described in Example 3. Results are shown in Tables 7.1 and 7.2 for variants expressed using Expi293F cells or HepG2 cells.

TABLE 7.1
Activity of FVIII Variants Relative to SEQ ID NO: 706

| | | | (Expi293F) |
|---|---|---|---|
| | Amino Acid | | Unchallenged |
| | Differences | Amino Acid | Chromogenic |
| | (Relative to | Differences | Activity FIOPC |
| SEQ ID | SEQ ID NO: | (Relative to | Relative to |
| NO: (nt/aa) | 706) | SEQ ID NO: 2) | SEQ ID NO: 706 |
| 705/706 | | L171P/S260T/F387I/L750D/L1248D/ | + |
| | | L1377D/V1439E | |
| 781/782 | M1051K | L171P/S260T/F387I/L750D/M1051K/ | ++ |
| | | L1248D/L1377D/V1439E | |
| 783/784 | L1221G | L171P/S260T/F387I/L750D/L1221G/ | + |
| | | L1248D/L1377D/V1439E | |
| 785/786 | F1218G | L171P/S260T/F387I/L750D/F1218G/ | + |
| | | L1248D/L1377D/V1439E | |
| 787/788 | I387R | L171P/S260T/F387R/L750D/L1248D/ | + |
| | | L1377D/V1439E | |
| 789/790 | M1051R | L171P/S260T/F387I/L750D/M1051R/ | ++ |
| | | L1248D/L1377D/V1439E | |
| 791/792 | L749F/ | L171P/S260T/F387I/L749F/L750D/ | ++ |
| | F1218G | F1218G/L1248D/L1377D/V1439E | |
| 793/794 | I387T | L171P/S260T/F387T/L750D/L1248D/ | + |
| | | L1377D/V1439E | |
| 795/796 | S332P | L171P/S260T/S332P/F387I/L750D/ | + |
| | | L1248D/L1377D/V1439E | |
| 797/798 | M897K | L171P/S260T/F387I/L750D/M897K/ | + |
| | | L1248D/L1377D/V1439E | |
| 799/800 | T696E | L171P/S260T/F387I/T696E/L750D/ | + |
| | | L1248D/L1377D/V1439E | |
| 801/802 | F816W | L171P/S260T/F387I/L750D/F816W/ | + |
| | | L1248D/L1377D/V1439E | |
| 803/804 | F824W | L171P/S260T/F387I/L750D/F824W/ | + |
| | | L1248D/L1377D/V1439E | |
| 805/806 | A826G | L171P/S260T/F387I/L750D/A826G/ | + |
| | | L1248D/L1377D/V1439E | |
| 807/808 | V393W | L171P/S260T/F387I/V393W/L750D/ | + |
| | | L1248D/L1377D/V1439E | |
| 809/810 | I825L | L171P/S260T/F387I/L750D/I825L/ | + |
| | | L1248D/L1377D/V1439E | |
| 811/812 | M897R | L171P/S260T/F387I/L750D/M897R/ | + |
| | | L1248D/L1377D/V1439E | |
| 813/814 | F816V | L171P/S260T/F387I/L750D/F816V/ | ++ |
| | | L1248D/L1377D/V1439E | |
| 815/816 | F698W | L171P/S260T/F387I/F698W/L750D/ | ++ |
| | | L1248D/L1377D/V1439E | |
| 817/818 | V393Q | L171P/S260T/F387I/V393Q/L750D/ | + |
| | | L1248D/L1377D/V1439E | |

All activities were determined relative to the reference polypeptide of SEQ ID NO: 706. Levels of increased activity are defined as follows: “+” 0.9 to 1.1, “++” >1.1

TABLE 7.2
Activity of FVIII Variants Relative to SEQ ID NO: 706

| | | | (Expi293F) | (HepG2) | (Expi293F) |
|---|---|---|---|---|---|
| | | | Unchallenged | Unchallenged | Unchallenged |
| | | | Chromogenic | Chromogenic | Clotting |
| | Amino Acid | Amino Acid | Activity | Activity | Activity |
| SEQ ID | Differences | Differences | FIOPC | FIOPC | FIOPC |
| NO: | (Relative to | (Relative to | Relative to | Relative to | Relative to |
| (nt/aa) | SEQ ID NO: 706) | SEQ ID NO: 2) | SEQ ID NO: 706 | SEQ ID NO: 706 | SEQ ID NO: 706 |
| 705/706 | | L171P/S260T/F387I/L750D/ | + | + | + |
| | | L1248D/L1377D/V1439E | | | |
| 819/820 | S332P/I387R/ | L171P/S260T/S332P/F387R/ | +++ | +++ | +++ |
| | I390A/T1148N | I390A/L750D/T1148N/L1248D/ | | | |
| | | L1377D/V1439E | | | |
| 821/822 | F328S/I387R/ | L171P/S260T/F328S/F387R/ | + | + | ++ |
| | L749F | L749F/L750D/L1248D/L1377D/ | | | |
| | | V1439E | | | |
| 823/824 | L749F | L171P/S260T/F387I/L749F/ | + | + | + |
| | | L750D/L1248D/L1377D/V1439E | | | |
| 825/826 | E306G/F328S/ | L171P/S260T/E306G/F328S/ | +++ | +++ | + |
| | S332P/I390A/ | S332P/F387I/I390A/L750D/ | | | |
| | M1051R/F1193A/ | M1051R/F1193A/F1218G/L1248D/ | | | |
| | F1218G | L1377D/V1439E | | | |
| 827/828 | V63Q/E306G/ | V63Q/L171P/S260T/E306G/ | +++ | +++ | +++ |
| | S332P/M1051R/ | S332P/F387I/L750D/M1051R/ | | | |
| | T1148N | T1148N/L1248D/L1377D/V1439E | | | |
| 829/830 | V63Q/E306G/ | V63Q/L171P/S260T/E306G/ | ++ | +++ | ++ |
| | S332P/I387T/ | S332P/F387T/L750D/M1051K/ | | | |
| | M1051K | L1248D/L1377D/V1439E | | | |
| 831/832 | I387T/I390A/ | L171P/S260T/F387T/I390A/ | ++ | +++ | ++ |
| | M1051R | L750D/M1051R/L1248D/L1377D/ | | | |
| | | V1439E | | | |
| 833/834 | D186A/E306G/ | L171P/D186A/S260T/E306G/ | +++ | ++ | +++ |
| | F328S/S332P/ | F328S/S332P/F387I/I390A/ | | | |
| | I390A/L749F/ | L749F/L750D/M1051K/T1148N/ | | | |
| | M1051K/T1148N/ | F1193A/L1248D/L1377D/V1439E | | | |
| | F1193A | | | | |
| 835/836 | I387T/I390A/ | L171P/S260T/F387T/I390A/ | ++ | ++ | ++ |
| | I756P/M1051R | L750D/I756P/M1051R/L1248D/ | | | |
| | | L1377D/V1439E | | | |
| 837/838 | E306G/I390A/ | L171P/S260T/E306G/F387I/ | +++ | ++ | +++ |
| | M1051R | I390A//L750D/M1051R/ | | | |
| | | L1248D/L1377D/V1439E | | | |
| 839/840 | E306G/S332P/ | L171P/S260T/E306G/S332P/ | +++ | +++ | +++ |
| | I390A/L749F | F387I/I390A/L749F/L750D/ | | | |
| | | L1248D/L1377D/V1439E | | | |
| 841/842 | E306G/I387R/ | L171P/S260T/E306G/F387R/ | ++ | ++ | +++ |
| | I390A/T1148N | I390A/L750D/T1148N/L1248D/ | | | |
| | | L1377D/V1439E | | | |
| 843/844 | E306G/F328S/ | L171P/S260T/E306G/F328S/ | +++ | +++ | +++ |
| | S332P/I387T/ | S332P/F387T/I390A/L749F/ | | | |
| | I390A/L749F/ | L750D/M1051R/T1148N/F1193A/ | | | |
| | M1051R/T1148N/ | L1248D/L1377D/V1439E | | | |
| | F1193A | | | | |
| 845/846 | S332P/I387R/ | L171P/S260T/S332P/F387R/ | +++ | ++ | +++ |
| | I390A/L749F/ | I390A/L749F/L750D/T1148N/ | | | |
| | T1148N | L1248D/L1377D/V1439E | | | |
| 847/848 | I387R/I390A/ | L171P/S260T/F387R/I390A/ | ++ | ++ | ++ |
| | L749F | L749F/L750D/L1248D/L1377D/ | | | |
| | | V1439E | | | |
| 849/850 | E306G/I387T/ | L171P/S260T/E306G/F387T/ | ++ | ++ | ++ |
| | L749F/M1051K/ | L749F/L750D/M1051K/T1148N/ | | | |
| | T1148N | L1248D/L1377D/V1439E | | | |
| 851/852 | I387R/L749F | L171P/S260T/F387R/L749F/ | ++ | ++ | ++ |
| | | L750D/L1248D/L1377D/V1439E | | | |
| 853/854 | E306G/Q945K/ | L171P/S260T/E306G/F387I/ | ++ | + | + |
| | M1051R/F1193A/ | L750D/Q945K/M1051R/F1193A/ | | | |
| | L1221G | L1221G/L1248D/L1377D/V1439E | | | |
| 855/856 | E306G/I390A/ | L171P/S260T/E306G/F387I/ | ++ | + | ++ |
| | L749F/M1051K | I390A/L749F/L750D/M1051K/ | | | |
| | | L1248D/L1377D/V1439E | | | |
| 857/858 | V63Q/E306G/ | V63Q/L171P/S260T/E306G/ | ++ | ++ | +++ |
| | S332P/I390A | S332P/F387I/I390A/L750D/ | | | |
| | | L1248D/L1377D/V1439E | | | |
| 859/860 | E306G/I387T/ | L171P/S260T/E306G/F387T/ | +++ | ++ | + |
| | I390A/L749F/ | I390A/L749F/L750D/T1148N/ | | | |
| | T1148N/F1193A/ | F1193A/L1221G/L1248D/L1377D/ | | | |
| | L1221G | V1439E | | | |
| 861/862 | E306G/S332P/ | L171P/S260T/E306G/S332P/ | +++ | +++ | ++ |
| | I387R/I390A/ | F387R//I390A/L749F/ | | | |
| | L749F/F1218M | L750D/F1218M/L1248D/L1377D/ | | | |
| | | V1439E | | | |
| 863/864 | V63Q/E306G/ | V63Q/L171P/S260T/E306G/ | +++ | +++ | + |
| | S332P/I390A/ | S332P/F387I/I390A/L750D/ | | | |
| | M1051R/T1148N/ | M1051R/T1148N/F1193A/F1218G/ | | | |
| | F1193A/F1218G | L1248D/L1377D/V1439E | | | |
| 865/866 | G924I | L171P/S260T/F387I/L750D/ | + | ++ | + |
| | | G924I/L1248D/L1377D/V1439E | | | |
| 867/868 | A755S | L171P/S260T/F387I/L750D/ | + | + | + |
| | | A755S/L1248D/L1377D/V1439E | | | |
| 869/870 | K752F | L171P/S260T/F387I/L750D/ | + | + | ++ |
| | | K752F/L1248D/L1377D/V1439E | | | |
| 871/872 | S751Y | L171P/S260T/F387I/L750D/ | ++ | ++ | ++ |
| | | S751Y/L1248D/L1377D/V1439E | | | |
| 873/874 | Q923M | L171P/S260T/F387I/L750D/ | + | + | + |
| | | Q923M/L1248D/L1377D/V1439E | | | |
| 875/876 | M797Y | L171P/S260T/F387I/L750D/ | + | + | + |
| | | M797Y/L1248D/L1377D/V1439E | | | |
| 877/878 | N754W | L171P/S260T/F387I/L750D/ | + | + | + |
| | | N754W/L1248D/L1377D/V1439E | | | |
| 879/880 | I793G | L171P/S260T/F387I/L750D/ | + | + | + |
| | | 1793G/L1248D/L1377D/V1439E | | | |
| 881/882 | N753D | L171P/S260T/F387I/L750D/ | ++ | + | +++ |
| | | N753D/L1248D/L1377D/V1439E | | | |
| 883/884 | R922W | L171P/S260T/F387I/L750D/ | + | + | + |
| | | R922W/L1248D/L1377D/V1439E | | | |
| 885/886 | I896L | L171P/S260T/F387I/L750D/ | + | + | + |
| | | 1896L/L1248D/L1377D/V1439E | | | |
| 887/888 | K938R | L171P/S260T/F387I/L750D/ | + | + | + |
| | | K938R/L1248D/L1377D/V1439E | | | |
| 889/890 | I775G | L171P/S260T/F387I/L750D/ | ++ | ++ | ++ |
| | | I775G/L1248D/L1377D/V1439E | | | |
| 891/892 | S751E | L171P/S260T/F387I/L750D/ | + | + | + |
| | | S751E/L1248D/L1377D/V1439E | | | |
| 893/894 | K732W | L171P/S260T/F387I/L750D/ | + | + | ++ |
| | | K732W/L1248D/L1377D/V1439E | | | |
| 895/896 | K752G | L171P/S260T/F387I/L750D/ | + | + | ++ |
| | | K752G/L1248D/L1377D/V1439E | | | |
| 897/898 | N810V | L171P/S260T/F387I/L750D/ | + | + | + |
| | | N810V/L1248D/L1377D/V1439E | | | |
| 899/900 | K938V | L171P/S260T/F387I/L750D/ | + | + | + |
| | | K938V/L1248D/L1377D/V1439E | | | |
| 901/902 | A747D | L171P/S260T/F387I/L750D/ | ++ | + | ++ |
| | | A747D/L1248D/L1377D/V1439E | | | |
| 903/904 | A755G | L171P/S260T/F387I/L750D/ | + | + | + |
| | | A755G/L1248D/L1377D/V1439E | | | |
| 905/906 | V393G/A407V | L171P/S260T/F387I/V393G/ | ++ | ++ | + |
| | | A407V/L750D/L1248D/L1377D/ | | | |
| | | V1439E | | | |
| 907/908 | M797W | L171P/S260T/F387I/L750D/ | + | + | ++ |
| | | M797W/L1248D/L1377D/V1439E | | | |
| 909/910 | K819V | L171P/S260T/F387I/L750D/ | + | + | + |
| | | K819V/L1248D/L1377D/V1439E | | | |
| 911/912 | V393G | L171P/S260T/F387I/V393G/ | ++ | +++ | + |
| | | L750D/L1248D/L1377D/V1439E | | | |
| 913/914 | I787W | L171P/S260T/F387I/L750D/ | + | ++ | ++ |
| | | I787W/L1248D/L1377D/V1439E | | | |
| 915/916 | V393R | L171P/S260T/F387I/V393R/ | ++ | +++ | + |
| | | L750D/L1248D/L1377D/V1439E | | | |
| 917/918 | F802V | L171P/S260T/F387I/L750D/ | + | ++ | + |
| | | F802V/L1248D/L1377D/V1439E | | | |
| 919/920 | I775E | L171P/S260T/F387I/L750D/ | ++ | + | + |
| | | I775E/L1248D/L1377D/V1439E | | | |
| 921/922 | G924P | L171P/S260T/F387I/L750D/ | + | + | + |
| | | G924P/L1248D/L1377D/V1439E | | | |
| 923/924 | K732G | L171P/S260T/F387I/K732G/ | + | + | + |
| | | L750D/L1248D/L1377D/V1439E | | | |
| 925/926 | Q811F | L171P/S260T/F387I/L750D/ | + | + | ++ |
| | | Q811F/L1248D/L1377D/V1439E | | | |
| 927/928 | F802S | L171P/S260T/F387I/L750D/ | + | ++ | + |
| | | F802S/L1248D/L1377D/V1439E | | | |
| 929/930 | K752L | L171P/S260T/F387I/L750D/ | + | + | +++ |
| | | K752L/L1248D/L1377D/V1439E | | | |
| 931/932 | S392A | L171P/S260T/F387I/S392A/ | + | + | + |
| | | L750D/L1248D/L1377D/V1439E | | | |
| 933/934 | H397G | L171P/S260T/F387I/H397G/ | + | ++ | + |
| | | L750D/L1248D/L1377D/V1439E | | | |

All activities were determined relative to the reference polypeptide of SEQ ID NO: 706. Levels of increased activity are defined as follows: “+” 0.9 to 1.1, “++” >1.1, “+++” >2

### Example 8

### FVIII Variants Derived from SEQ ID NO: 840

[0358] In this Example, experiments conducted to determine FVIII variant activity by assaying the protein activity after a challenge is described. These variants were tested for FVIII activity after no incubation and after incubation in Hemophilia A patient plasma (George King Bio-Medical, Inc.), as described in Example 3. Variants were tested using the chromogenic and clotting assays, as described in Example 3. Results are shown in Tables 8.1 and 8.2 for variants expressed using Expi293F cells or HepG2 cells.

TABLE 8.1
Activity of FVIII Variants Relative to SEQ ID NO: 840

| | | | (Expi293F) | (Expi293F) |
|---|---|---|---|---|
| | | | Unchallenged | Activity after |
| | | | Chromogenic | Plasma |
| | Amino Acid | | Activity | Challenge |
| | Differences | Amino Acid | FIOPC | FIOPC |
| SEQ | (Relative to | Differences | Relative to | Relative to |
| ID NO: | SEQ ID NO: | (Relative to | SEQ ID NO: | SEQ ID NO: |
| (nt/aa) | 840) | SEQ ID NO: 2) | 840 | 840 |
| 839/840 | | L171P/S260T/E306G/S332P/F387I/I390A/ | + | + |
| | | L749F/L750D/L1248D/L1377D/V1439E | | |
| 935/936 | V620N | L171P/S260T/E306G/S332P/F387I/I390A/ | + | + |
| | | V620N/L749F/L750D/L1248D/L1377D/V1439E | | |
| 937/938 | P491E | L171P/S260T/E306G/S332P/F387I/I390A/ | ++ | + |
| | | P491E/L749F/L750D/L1248D/L1377D/V1439E | | |
| 939/940 | M1229D | L171P/S260T/E306G/S332P/F387I/I390A/ | + | + |
| | | L749F/L750D/M1229D/L1248D/L1377D/V1439E | | |
| 941/942 | P615N | L171P/S260T/E306G/S332P/F387I/I390A/ | ++ | |
| | | P615N/L749F/L750D/L1248D/L1377D/V1439E | | |
| 943/944 | I1283S | L171P/S260T/E306G/S332P/F387I/I390A/ | ++ | |
| | | L749F/L750D/L1248D/I1283S/L1377D/V1439E | | |
| 945/946 | H822S | L171P/S260T/E306G/S332P/F387I/I390A/ | ++ | |
| | | L749F/L750D/H822S/L1248D/L1377D/V1439E | | |
| 947/948 | F328G | L171P/S260T/E306G/F328G/S332P/F387I/ | ++ | + |
| | | I390A/L749F/L750D/L1248D/L1377D/V1439E | | |
| 949/950 | H212L | L171P/H212L/S260T/E306G/S332P/F387I/ | +++ | ++ |
| | | I390A/L749F/L750D/L1248D/L1377D/V1439E | | |
| 951/952 | K818W | L171P/S260T/E306G/S332P/F387I/I390A/ | ++ | + |
| | | L749F/L750D/K818W/L1248D/L1377D/V1439E | | |
| 953/954 | I1283L | L171P/S260T/E306G/S332P/F387I/I390A/ | + | ++ |
| | | L749F/L750D/L1248D/I1283L/L1377D/V1439E | | |
| 955/956 | F555G/ | L171P/S260T/E306G/S332P/F387I/I390A/ | ++ | + |
| | E684G | F555G/E684G/L749F/L750D/L1248D/L1377D/ | | |
| | | V1439E | | |
| 957/958 | V828K | L171P/S260T/E306G/S332P/F387I/I390A/ | ++ | ++ |
| | | L749F/L750D/V828K/L1248D/L1377D/V1439E | | |
| 959/960 | R550G | L171P/S260T/E306G/S332P/F387I/I390A/ | + | + |
| | | R550G/L749F/L750D/L1248D/L1377D/V1439E | | |
| 961/962 | R830M | L171P/S260T/E306G/S332P/F387I/I390A/ | ++ | + |
| | | L749F/L750D/R830M/L1248D/L1377D/V1439E | | |
| 963/964 | S839A | L171P/S260T/E306G/S332P/F387I/I390A/ | + | + |
| | | L749F/L750D/S839A/L1248D/L1377D/V1439E | | |
| 965/966 | H822T | L171P/S260T/E306G/S332P/F387I/I390A/ | + | + |
| | | L749F/L750D/H822T/L1248D/L1377D/V1439E | | |
| 967/968 | L13Y | L13Y/L171P/S260T/E306G/S332P/F387I/ | ++ | ++ |
| | | I390A/L749F/L750D/L1248D/L1377D/V1439E | | |
| 969/970 | L14G | L14G/L171P/S260T/E306G/S332P/F387I/ | + | + |
| | | I390A/L749F/L750D/L1248D/L1377D/V1439E | | |
| 971/972 | C17V | C17V/L171P/S260T/E306G/S332P/F387I/ | ++ | |
| | | I390A/L749F/L750D/L1248D/L1377D/V1439E | | |
| 973/974 | M836V | L171P/S260T/E306G/S332P/F387I/I390A/ | + | ++ |
| | | L749F/L750D/M836V/L1248D/L1377D/V1439E | | |
| 975/976 | S839P | L171P/S260T/E306G/S332P/F387I/I390A/ | + | + |
| | | L749F/L750D/S839P/L1248D/L1377D/V1439E | | |
| 977/978 | K1210W | L171P/S260T/E306G/S332P/F387I/I390A/ | + | + |
| | | L749F/L750D/K1210W/L1248D/L1377D/V1439E | | |
| 979/980 | Y1281R | L171P/S260T/E306G/S332P/F387I/I390A/ | ++ | |
| | | L749F/L750D/L1248D/Y1281R/L1377D/V1439E | | |
| 981/982 | V64D | V64D/L171P/S260T/E306G/S332P/F387I/ | ++ | |
| | | I390A/L749F/L750D/L1248D/L1377D/V1439E | | |
| 983/984 | H212G | L171P/H212G/S260T/E306G/S332P/F387I/ | ++ | ++ |
| | | I390A/L749F/L750D/L1248D/L1377D/V1439E | | |
| 985/986 | V682R | L171P/S260T/E306G/S332P/F387I/I390A/ | ++ | |
| | | V682R/L749F/L750D/L1248D/L1377D/V1439E | | |
| 987/988 | L14M | L14M/L171P/S260T/E306G/S332P/F387I/ | ++ | |
| | | I390A/L749F/L750D/L1248D/L1377D/V1439E | | |
| 989/990 | L318C | L171P/S260T/E306G/L318C/S332P/F387I/ | | ++ |
| | | I390A/L749F/L750D/L1248D/L1377D/V1439E | | |
| 991/992 | C17S | C17S/L171P/S260T/E306G/S332P/F387I/ | ++ | ++ |
| | | I390A/L749F/L750D/L1248D/L1377D/V1439E | | |
| 993/994 | A20L | A20L/L171P/S260T/E306G/S332P/F387I/ | ++ | ++ |
| | | I390A/L749F/L750D/L1248D/L1377D/V1439E | | |
| 995/996 | K818G | L171P/S260T/E306G/S332P/F387I/I390A/ | + | + |
| | | L749F/L750D/K818G/L1248D/L1377D/V1439E | | |
| 997/998 | M836G | L171P/S260T/E306G/S332P/F387I/I390A/ | + | + |
| | | L749F/L750D/M836G/L1248D/L1377D/V1439E | | |
| 999/1000 | T21M | T21M/L171P/S260T/E306G/S332P/F387I/ | ++ | ++ |
| | | I390A/L749F/L750D/L1248D/L1377D/V1439E | | |
| 1001/1002 | M836R | L171P/S260T/E306G/S332P/F387I/I390A/ | + | ++ |
| | | L749F/L750D/M836R/L1248D/L1377D/V1439E | | |
| 1003/1004 | F325Y | L171P/S260T/E306G/F325Y/S332P/F387I/ | ++ | ++ |
| | | I390A/L749F/L750D/L1248D/L1377D/V1439E | | |
| 1005/1006 | T533V | L171P/S260T/E306G/S332P/F387I/I390A/ | ++ | |
| | | T533V/L749F/L750D/L1248D/L1377D/V1439E | | |
| 1007/1008 | S19G | S19G/L171P/S260T/E306G/S332P/F387I/ | ++ | |
| | | I390A/L749F/L750D/L1248D/L1377D/V1439E | | |
| 1009/1010 | L14V | L14V/L171P/S260T/E306G/S332P/F387I/ | ++ | |
| | | I390A/L749F/L750D/L1248D/L1377D/V1439E | | |
| 1011/1012 | Q817D | L171P/S260T/E306G/S332P/F387I/I390A/ | + | + |
| | | L749F/L750D/Q817D/L1248D/L1377D/V1439E | | |
| 1013/1014 | L831W | L171P/S260T/E306G/S332P/F387I/I390A/ | + | + |
| | | L749F/L750D/L831W/L1248D/L1377D/V1439E | | |
| 1015/1016 | K225R | L171P/K225R/S260T/E306G/S332P/F387I/ | ++ | ++ |
| | | I390A/L749F/L750D/L1248D/L1377D/V1439E | | |
| 1017/1018 | H1156R | L171P/S260T/E306G/S332P/F387I/I390A/ | + | ++ |
| | | L749F/L750D/H1156R/L1248D/L1377D/V1439E | | |
| 1019/1020 | R830V | L171P/S260T/E306G/S332P/F387I/I390A/ | ++ | ++ |
| | | L749F/L750D/R830V/L1248D/L1377D/V1439E | | |
| 1021/1022 | V393G/ | L171P/S260T/E306G/S332P/F387I/I390A/ | ++ | ++ |
| | A747D | V393G/A747D/L749F/L750D/L1248D/L1377D/ | | |
| | | V1439E | | |
| 1023/1024 | N753D | L171P/S260T/E306G/S332P/F387I/I390A/ | ++ | |
| | | L749F/L750D/N753D/L1248D/L1377D/V1439E | | |
| 1025/1026 | V393G/ | L171P/S260T/E306G/S332P/F387I/I390A/ | ++ | ++ |
| | K732W/ | V393G/K732W/L749F/L750D/S751Y/L1248D/ | | |
| | S751Y | L1377D/V1439E | | |
| 1027/1028 | V63Q/ | V63Q/L171P/S260T/E306G/S332P/F387I/ | ++ | + |
| | M797W | I390A/L749F/L750D/M797W/L1248D/L1377D/ | | |
| | | V1439E | | |

All activities were determined relative to the reference polypeptide of SEQ ID NO: 840. Levels of increased activity are defined as follows: “+” 0.9 to 1.1, “++” >1.1, “+++” >2

TABLE 8.2
Activity of FVIII Variants Relative to SEQ ID NO: 840

| | | | | (Expi293F) | | |
|---|---|---|---|---|---|---|
| | | | (Expi293F) | Chromogenic | (HepG2) | (Expi293F) |
| | | | Unchallenged | Activity | Unchallenged | Unchallenged |
| | | | Chromogenic | after Plasma | Chromogenic | Clotting |
| | | | Activity | Challenge | Activity | Activity |
| | Amino Acid | Amino Acid | FIOPC | FIOPC | FIOPC | FIOPC |
| SEQ ID | Differences | Differences | Relative to | Relative to | Relative to | Relative to |
| NO: | (Relative to | (Relative to | SEQ ID NO: | SEQ ID NO: | SEQ ID NO: | SEQ ID NO: |
| (nt/aa) | SEQ ID NO: 840) | SEQ ID NO: 2) | 840 | 840 | 840 | 840 |
| 839/840 | | L171P/S260T/E306G/S332P/F387I/I390A/L749F/L750D/ | + | + | + | + |
| | | L1248D/L1377D/V1439E | | | | |
| 1029/1030 | L622D | L171P/S260T/E306G/S332P/F387I/I390A/L622D/L749F/ | ++ | + | + | + |
| | | L750D/L1248D/L1377D/V1439E | | | | |
| 1031/1032 | P617E | L171P/S260T/E306G/S332P/F387I/I390A/P617E/L749F/ | ++ | ++ | + | ++ |
| | | L750D/L1248D/L1377D/V1439E | | | | |
| 1033/1034 | P617N | L171P/S260T/E306G/S332P/F387I/I390A/P617N/L749F/ | ++ | | + | + |
| | | L750D/L1248D/L1377D/V1439E | | | | |
| 1035/1036 | P907D | L171P/S260T/E306G/S332P/F387I/I390A/L749F/L750D/ | ++ | + | | + |
| | | P907D/L1248D/L1377D/V1439E | | | | |
| 1037/1038 | N1040E | L171P/S260T/E306G/S332P/F387I/I390A/L749F/L750D/ | ++ | +++ | | ++ |
| | | N1040E/L1248D/L1377D/V1439E | | | | |
| 1039/1040 | P617D | L171P/S260T/E306G/S332P/F387I/I390A/P617D/L749F/ | ++ | ++ | + | + |
| | | L750D/L1248D/L1377D/V1439E | | | | |
| 1041/1042 | Q611E | L171P/S260T/E306G/S332P/F387I/I390A/Q611E/L749F/ | ++ | ++ | ++ | + |
| | | L750D/L1248D/L1377D/V1439E | | | | |
| 1043/1044 | V620P | L171P/S260T/E306G/S332P/F387I/I390A/V620P/L749F/ | ++ | ++ | | + |
| | | L750D/L1248D/L1377D/V1439E | | | | |
| 1045/1046 | P617G | L171P/S260T/E306G/S332P/F387I/I390A/P617G/L749F/ | ++ | ++ | + | ++ |
| | | L750D/L1248D/L1377D/V1439E | | | | |
| 1047/1048 | A488G | L171P/S260T/E306G/S332P/F387I/I390A/A488G/L749F/ | | | + | + |
| | | L750D/L1248D/L1377D/V1439E | | | | |
| 1049/1050 | P1192D | L171P/S260T/E306G/S332P/F387I/I390A/L749F/L750D/ | ++ | ++ | | + |
| | | P1192D/L1248D/L1377D/V1439E | | | | |
| 1051/1052 | S1194P | L171P/S260T/E306G/S332P/F387I/I390A/L749F/L750D/ | ++ | ++ | | + |
| | | S1194P/L1248D/L1377D/V1439E | | | | |
| 1053/1054 | G619E | L171P/S260T/E306G/S332P/F387I/I390A/G619E/L749F/ | ++ | ++ | ++ | + |
| | | L750D/L1248D/L1377D/V1439E | | | | |
| 1055/1056 | P615D | L171P/S260T/E306G/S332P/F387I/I390A/P615D/L749F/ | + | + | + | + |
| | | L750D/L1248D/L1377D/V1439E | | | | |
| 1057/1058 | F16A | F16A/L171P/S260T/E306G/S332P/F387I/I390A/L749F/ | ++ | ++ | ++ | + |
| | | L750D/L1248D/L1377D/V1439E | | | | |
| 1059/1060 | F802S | L171P/S260T/E306G/S332P/F387I/I390A/L749F/L750D/ | ++ | + | ++ | + |
| | | F802S/L1248D/L1377D/V1439E | | | | |
| 1061/1062 | K818V | L171P/S260T/E306G/S332P/F387I/I390A/L749F/L750D/ | + | ++ | + | + |
| | | K818V/L1248D/L1377D/V1439E | | | | |
| 1063/1064 | L211K | L171P/L211K/S260T/E306G/S332P/F387I/I390A/L749F/ | + | ++ | + | ++ |
| | | L750D/L1248D/L1377D/V1439E | | | | |
| 1065/1066 | M836W | L171P/S260T/E306G/S332P/F387I/I390A/L749F/M836W/ | ++ | ++ | | ++ |
| | | L750D/L1248D/L1377D/V1439E | | | | |
| 1067/1068 | F555R | L171P/S260T/E306G/S332P/F387I/I390A/F555R/L749F/ | ++ | ++ | | ++ |
| | | L750D/L1248D/L1377D/V1439E | | | | |
| 1069/1070 | V536A | L171P/S260T/E306G/S332P/F387I/I390A/V536A/L749F/ | + | ++ | + | + |
| | | L750D/L1248D/L1377D/V1439E | | | | |
| 1071/1072 | I527A | L171P/S260T/E306G/S332P/F387I/I390A/I527A/L749F/ | | + | | + |
| | | L750D/L1248D/L1377D/V1439E | | | | |
| 1073/1074 | F555E | L171P/S260T/E306G/S332P/F387I/I390A/F555E/L749F/ | ++ | ++ | + | ++ |
| | | L750D/L1248D/L1377D/V1439E | | | | |
| 1075/1076 | H841W | L171P/S260T/E306G/S332P/F387I/I390A/L749F/L750D/ | + | ++ | | + |
| | | H841W/L1248D/L1377D/V1439E | | | | |
| 1077/1078 | M320Q | L171P/S260T/E306G/M320Q/S332P/F387I/I390A/L749F/ | + | ++ | + | + |
| | | L750D/L1248D/L1377D/V1439E | | | | |
| 1079/1080 | S837G | L171P/S260T/E306G/S332P/F387I/I390A/L749F/L750D/ | ++ | | ++ | + |
| | | S837G/L1248D/L1377D/V1439E | | | | |
| 1081/1082 | M558R | L171P/S260T/E306G/S332P/F387I/I390A/M558R/L749F/ | + | + | | |
| | | L750D/L1248D/L1377D/V1439E | | | | |
| 1083/1084 | F555G | L171P/S260T/E306G/S332P/F387I/I390A/F555G/L749F/ | + | ++ | + | + |
| | | L750D/L1248D/L1377D/V1439E | | | | |
| 1085/1086 | L211R | L171P/L211R/S260T/E306G/S332P/F387I/I390A/L749F/ | + | + | + | + |
| | | L750D/L1248D/L1377D/V1439E | | | | |
| 1087/1088 | V64G | V64G/L171P/S260T/E306G/S332P/F387I/I390A/L749F/ | ++ | + | + | + |
| | | L750D/L1248D/L1377D/V1439E | | | | |
| 1089/1090 | M320R | L171P/S260T/E306G/M320R/S332P/F387I/I390A/L749F/ | ++ | +++ | ++ | ++ |
| | | L750D/L1248D/L1377D/V1439E | | | | |
| 1091/1092 | T533Y | L171P/S260T/E306G/S332P/F387I/I390A/T533Y/L749F/ | + | | ++ | ++ |
| | | L750D/L1248D/L1377D/V1439E | | | | |
| 1093/1094 | L914V | L171P/S260T/E306G/S332P/F387I/I390A/L749F/L750D/ | ++ | + | ++ | ++ |
| | | L914V/L1248D/L1377D/V1439E | | | | |
| 1095/1096 | F16V | F16V/L171P/S260T/E306G/S332P/F387I/I390A/L749F/ | ++ | + | ++ | ++ |
| | | L750D/L1248D/L1377D/V1439E | | | | |
| 1097/1098 | I1283E | L171P/S260T/E306G/S332P/F387I/I390A/L749F/L750D/ | ++ | | ++ | + |
| | | L1248D/I1283E/L1377D/V1439E | | | | |
| 1099/1100 | V536M | L171P/S260T/E306G/S332P/F387I/I390A/V536M/L749F/ | + | | ++ | + |
| | | L750D/L1248D/L1377D/V1439E | | | | |
| 1101/1102 | F312L | L171P/S260T/E306G/F312L/S332P/F387I/I390A/L749F/ | ++ | ++ | ++ | ++ |
| | | L750D/L1248D/L1377D/V1439E | | | | |
| 1103/1104 | M681N | L171P/S260T/E306G/S332P/F387I/I390A/M681N/L749F/ | ++ | +++ | + | ++ |
| | | L750D/L1248D/L1377D/V1439E | | | | |
| 1105/1106 | S838T | L171P/S260T/E306G/S332P/F387I/I390A/L749F/L750D/ | ++ | + | ++ | + |
| | | S838T/L1248D/L1377D/V1439E | | | | |
| 1107/1108 | V536R | L171P/S260T/E306G/S332P/F387I/I390A/V536R/L749F/ | + | + | ++ | + |
| | | L750D/L1248D/L1377D/V1439E | | | | |
| 1109/1110 | R15G | R15G/L171P/S260T/E306G/S332P/F387I/I390A/L749F/ | ++ | + | ++ | + |
| | | L750D/L1248D/L1377D/V1439E | | | | |
| 1111/1112 | V536P | L171P/S260T/E306G/S332P/F387I/I390A/V536P/L749F/ | ++ | ++ | | ++ |
| | | L750D/L1248D/L1377D/V1439E | | | | |
| 1113/1114 | M558W | L171P/S260T/E306G/S332P/F387I/I390A/M558W/L749F/ | ++ | ++ | ++ | + |
| | | L750D/L1248D/L1377D/V1439E | | | | |
| 1115/1116 | M558E | L171P/S260T/E306G/S332P/F387I/I390A/M558E/L749F/ | ++ | | ++ | + |
| | | L750D/L1248D/L1377D/V1439E | | | | |
| 1117/1118 | L1427Y | L171P/S260T/E306G/S332P/F387I/I390A/L749F/L750D/ | ++ | ++ | ++ | ++ |
| | | L1248D/L1377D/L1427Y/V1439E | | | | |
| 1119/1120 | S839G | L171P/S260T/E306G/S332P/F387I/I390A/L749F/L750D/ | | | ++ | + |
| | | S839G/L1248D/L1377D/V1439E | | | | |
| 1121/1122 | F18L | F18L/L171P/S260T/E306G/S332P/F387I/I390A/L749F/ | + | ++ | + | + |
| | | L750D/L1248D/L1377D/V1439E | | | | |
| 1123/1124 | L13G | L13G/L171P/S260T/E306G/S332P/F387I/I390A/L749F/ | ++ | ++ | + | + |
| | | L750D/L1248D/L1377D/V1439E | | | | |
| 1125/1126 | K1210M | L171P/S260T/E306G/S332P/F387I/I390A/L749F/L750D/ | + | | ++ | + |
| | | K1210M/L1248D/L1377D/V1439E | | | | |
| 1127/1128 | H1156G | L171P/S260T/E306G/S332P/F387I/I390A/L749F/L750D/ | + | ++ | ++ | + |
| | | H1156G/L1248D/L1377D/V1439E | | | | |
| 1129/1130 | M558L | L171P/S260T/E306G/S332P/F387I/I390A/M558L/L749F/ | + | ++ | | |
| | | L750D/L1248D/L1377D/V1439E | | | | |
| 1131/1132 | S839K | L171P/S260T/E306G/S332P/F387I/I390A/L749F/L750D/ | + | ++ | ++ | ++ |
| | | S839K/L1248D/L1377D/V1439E | | | | |
| 1133/1134 | L211P | L171P/L211P/S260T/E306G/S332P/F387I/I390A/L749F/ | + | | + | + |
| | | L750D/L1248D/L1377D/V1439E | | | | |
| 1135/1136 | L211G | L171P/L211G/S260T/E306G/S332P/F387I/I390A/L749F/ | + | | + | + |
| | | L750D/L1248D/L1377D/V1439E | | | | |
| 1137/1138 | L211Q | L171P/L211Q/S260T/E306G/S332P/F387I/I390A/L749F/ | ++ | ++ | + | ++ |
| | | L750D/L1248D/L1377D/V1439E | | | | |
| 1139/1140 | F16D | F16D/L171P/S260T/E306G/S332P/F387I/I390A/L749F/ | ++ | + | + | ++ |
| | | L750D/L1248D/L1377D/V1439E | | | | |
| 1141/1142 | M320G | L171P/S260T/E306G/M320G/S332P/F387I/I390A/L749F/ | + | + | | |
| | | L750D/L1248D/L1377D/V1439E | | | | |
| 1143/1144 | Y683W | L171P/S260T/E306G/S332P/F387I/I390A/Y683W/L749F/ | ++ | ++ | | + |
| | | L750D/L1248D/L1377D/V1439E | | | | |
| 1145/1146 | Y24V | Y24V/L171P/S260T/E306G/S332P/F387I/I390A/L749F/ | ++ | ++ | | + |
| | | L750D/L1248D/L1377D/V1439E | | | | |
| 1147/1148 | V534I | L171P/S260T/E306G/S332P/F387I/I390A/V534I/L749F/ | ++ | ++ | + | ++ |
| | | L750D/L1248D/L1377D/V1439E | | | | |
| 1149/1150 | M681A | L171P/S260T/E306G/S332P/F387I/I390A/M681A/L749F/ | ++ | ++ | + | + |
| | | L750D/L1248D/L1377D/V1439E | | | | |
| 1151/1152 | P840G | L171P/S260T/E306G/S332P/F387I/I390A/L749F/L750D/ | + | + | | + |
| | | P840G/L1248D/L1377D/V1439E | | | | |
| 1153/1154 | F1160R | L171P/S260T/E306G/S332P/F387I/I390A/L749F/L750D/ | ++ | + | | + |
| | | F1160R/L1248D/L1377D/V1439E | | | | |
| 1155/1156 | M681C | L171P/S260T/E306G/S332P/F387I/I390A/M681C/L749F/ | + | ++ | ++ | + |
| | | L750D/L1248D/L1377D/V1439E | | | | |
| 1157/1158 | F328Q | L171P/S260T/E306G/F328Q/S332P/F387I/I390A/L749F/ | | | + | + |
| | | L750D/L1248D/L1377D/V1439E | | | | |
| 1159/1160 | R15S | R15S/L171P/S260T/E306G/S332P/F387I/I390A/L749F/ | + | + | + | + |
| | | L750D/L1248D/L1377D/V1439E | | | | |
| 1161/1162 | V536K | L171P/S260T/E306G/S332P/F387I/I390A/V536K/L749F/ | + | + | + | + |
| | | L750D/L1248D/L1377D/V1439E | | | | |
| 1163/1164 | V536G | L171P/S260T/E306G/S332P/F387I/I390A/V536G/L749F/ | ++ | ++ | | + |
| | | L750D/L1248D/L1377D/V1439E | | | | |
| 1165/1166 | T533R | L171P/S260T/E306G/S332P/F387I/I390A/T533R/L749F/ | + | ++ | + | ++ |
| | | L750D/L1248D/L1377D/V1439E | | | | |
| 1167/1168 | M681E | L171P/S260T/E306G/S332P/F387I/I390A/M681E/L749F/ | ++ | | ++ | ++ |
| | | L750D/L1248D/L1377D/V1439E | | | | |
| 1169/1170 | V536W | L171P/S260T/E306G/S332P/F387I/I390A/V536W/L749F/ | ++ | ++ | | ++ |
| | | L750D/L1248D/L1377D/V1439E | | | | |
| 1171/1172 | H1156N | L171P/S260T/E306G/S332P/F387I/I390A/L749F/L750D/ | + | + | ++ | ++ |
| | | H1156N/L1248D/L1377D/V1439E | | | | |
| 1173/1174 | F16P | F16P/L171P/S260T/E306G/S332P/F387I/I390A/L749F/ | ++ | + | + | + |
| | | L750D/L1248D/L1377D/V1439E | | | | |
| 1175/1176 | Q817A | L171P/S260T/E306G/S332P/F387I/I390A/L749F/L750D/ | ++ | ++ | | ++ |
| | | Q817A/L1248D/L1377D/V1439E | | | | |
| 1177/1178 | F18R | F18R/L171P/S260T/E306G/S332P/F387I/I390A/L749F/ | ++ | ++ | | + |
| | | L750D/L1248D/L1377D/V1439E | | | | |
| 1179/1180 | Y551W | L171P/S260T/E306G/S332P/F387I/I390A/Y551W/L749F/ | ++ | + | + | + |
| | | L750D/L1248D/L1377D/V1439E | | | | |
| 1181/1182 | F555T | L171P/S260T/E306G/S332P/F387I/I390A/F555T/L749F/ | + | ++ | | + |
| | | L750D/L1248D/L1377D/V1439E | | | | |
| 1183/1184 | M681G | L171P/S260T/E306G/S332P/F387I/I390A/M681G/L749F/ | ++ | +++ | ++ | + |
| | | L750D/L1248D/L1377D/V1439E | | | | |
| 1185/1186 | H212A | L171P/H212A/S260T/E306G/S332P/F387I/I390A/L749F/ | + | ++ | + | + |
| | | L750D/L1248D/L1377D/V1439E | | | | |
| 1187/1188 | F16G | F16G/L171P/S260T/E306G/S332P/F387I/I390A/L749F/ | ++ | + | ++ | + |
| | | L750D/L1248D/L1377D/V1439E | | | | |
| 1189/1190 | S838G | L171P/S260T/E306G/S332P/F387I/I390A/L749F/L750D/ | + | + | | + |
| | | S838G/L1248D/L1377D/V1439E | | | | |
| 1191/1192 | M681R | L171P/S260T/E306G/S332P/F387I/I390A/M681R/L749F/ | + | + | + | + |
| | | L750D/L1248D/L1377D/V1439E | | | | |
| 1193/1194 | V393G | L171P/S260T/E306G/S332P/F387I/I390A/V393G/L749F/ | ++ | ++ | ++ | |
| | | L750D/L1248D/L1377D/V1439E | | | | |
| 1195/1196 | V393G/A747D/K752G/ | L171P/S260T/E306G/S332P/F387I/I390A/V393G/A747D/ | ++ | ++ | ++ | ++ |
| | Q811F/K819V/ | L749F/L750D/K752G/Q811F/K819V/Q923M/T1148N | | | | |
| | Q923M/T1148N | L1248D/L1377D/V1439E | | | | |
| 1197/1198 | V393G/S751Y/ | L171P/S260T/E306G/S332P/F387I/I390A/V393G/L749F/ | ++ | +++ | + | + |
| | I775G | L750D/S751Y/I775G/L1248D/L1377D/V1439E | | | | |
| 1199/1200 | V63Q/V393G/K732W/ | V63Q/L171P/S260T/E306G/S332P/F387I/I390A/V393G/ | ++ | +++ | ++ | ++ |
| | I775G/T1148N | K732W/L749F/L750D/I775G/T1148N/L1248D/L1377D/ | | | | |
| | | V1439E | | | | |
| 1201/1202 | V393G/K732W/ | L171P/S260T/E306G/S332P/F387I/I390A/V393G/K732W/ | ++ | ++ | ++ | ++ |
| | T1148N | L749F/L750D/T1148N/L1248D/L1377D/V1439E | | | | |
| 1203/1204 | I775G/T1148N | L171P/S260T/E306G/S332P/F387I/I390A/L749F/L750D/ | ++ | +++ | ++ | ++ |
| | | I775G/T1148N/L1248D/L1377D/V1439E | | | | |
| 1205/1206 | V393G/K752L/N753D/ | L171P/S260T/E306G/S332P/F387I/I390A/V393G/L749F/ | ++ | +++ | + | ++ |
| | I775G/I793G/ | L750D/K752L/N753D/I775G/I793G/M797W/L1248D/ | | | | |
| | M797W | L1377D/V1439E | | | | |
| 1207/1208 | V393G/Q923M | L171P/S260T/E306G/S332P/F387I/I390A/V393G/L749F/ | ++ | ++ | ++ | + |
| | | L750D/Q923M/L1248D/L1377D/V1439E | | | | |
| 1209/1210 | V393G/Q923M/ | L171P/S260T/E306G/S332P/F387I/I390A/V393G/L749F/ | ++ | +++ | ++ | + |
| | T1148N | L750D/Q923M/T1148N/L1248D/L1377D/V1439E | | | | |
| 1211/1212 | V393G/A747D/ | L171P/S260T/E306G/S332P/F387I/I390A/V393G/A747D/ | ++ | ++ | ++ | ++ |
| | S751Y | L749F/L750D/S751Y/L1248D/L1377D/V1439E | | | | |
| 1213/1214 | V393G/A747D/N753D/ | L171P/S260T/E306G/S332P/F387I/I390A/V393G/A747D/ | ++ | +++ | ++ | ++ |
| | I775G/T1148N | L749F/L750D/N753D/I775G/T1148N/L1248D/L1377D/ | | | | |
| | | V1439E | | | | |
| 1215/1216 | K752L/Q923M/ | L171P/S260T/E306G/S332P/F387I/I390A/L749F/L750D/ | ++ | ++ | ++ | + |
| | M1051R | K752L/Q923M/M1051R/L1248D/L1377D/V1439E | | | | |
| 1217/1218 | V63Q/I775G | V63Q/L171P/S260T/E306G/S332P/F387I/I390A/L749F/ | ++ | +++ | ++ | ++ |
| | | L750D/I775G/L1248D/L1377D/V1439E | | | | |
| 1219/1220 | V63Q/V393G/K752L/ | V63Q/L171P/S260T/E306G/S332P/F387I/I390A/V393G/ | ++ | ++ | + | + |
| | I775G/I793G/ | L749F/L750D/K752L/I775G/I793G/M1051R/T1053R | | | | |
| | M1051R/T1053R | L1248D/L1377D/V1439E | | | | |
| 1221/1222 | K752G/N753D/I775G/ | L171P/S260T/E306G/S332P/F387I/I390A/L749F/L750D/ | ++ | ++ | ++ | ++ |
| | I793G/K819V | K752G/N753D/I775G/I793G/K819V/L1248D/L1377D/ | | | | |
| | | V1439E | | | | |
| 1223/1224 | V63Q/M1051R | V63Q/L171P/S260T/E306G/S332P/F387I/I390A/L749F/ | ++ | +++ | ++ | ++ |
| | | L750D/M1051R/L1248D/L1377D/V1439E | | | | |
| 1225/1226 | V63Q/A747D/K752G/ | V63Q/L171P/S260T/E306G/S332P/F387I/I390A/A747D/ | ++ | +++ | ++ | ++ |
| | N753D/I775G/Q811F/ | L749F/L750D/K752G/N753D/I775G/Q811F/K819V/ | | | | |
| | K819V/Q923M/ | Q923M/M1051R L1248D/L1377D/V1439E | | | | |
| | M1051R | | | | | |
| 1227/1228 | V393G/K752G/ | L171P/S260T/E306G/S332P/F387I/I390A/V393G/L749F/ | + | ++ | ++ | ++ |
| | I787W | L750D/K752G/I787W/L1248D/L1377D/V1439E | | | | |
| 1229/1230 | S751Y | L171P/S260T/E306G/S332P/F387I/I390A/L749F/L750D/ | + | + | + | ++ |
| | | S751Y/L1248D/L1377D/V1439E | | | | |
| 1231/1232 | V63Q/T1148N | V63Q/L171P/S260T/E306G/S332P/F387I/I390A/L749F/ | ++ | ++ | ++ | ++ |
| | | L750D/T1148N/L1248D/L1377D/V1439E | | | | |
| 1233/1234 | V63H/A747D/K752G/ | V63H/L171P/S260T/E306G/S332P/F387I/I390A/A747D/ | ++ | + | ++ | ++ |
| | N753D/K819V/ | L749F/L750D/K752G/N753D/K819V/Q923M/T1148N | | | | |
| | Q923M/T1148N | L1248D/L1377D/V1439E | | | | |
| 1235/1236 | T1148N | L171P/S260T/E306G/S332P/F387I/I390A/L749F/L750D/ | + | ++ | + | ++ |
| | | T1148N/L1248D/L1377D/V1439E | | | | |
| 1237/1238 | A747D/K752L/ | L171P/S260T/E306G/S332P/F387I/I390A/A747D/L749F/ | ++ | ++ | + | ++ |
| | N753D/I793G/ | L750D/K752L/N753D/I793G/Q811F/L1248D/L1377 | | | | |
| | Q811F | V1439E | | | | |
| 1239/1240 | V63Q | V63Q/L171P/S260T/E306G/S332P/F387I/I390A/L749F/ | ++ | +++ | ++ | ++ |
| | | L750D/L1248D/L1377D/V1439E | | | | |
| 1241/1242 | M797W/T1148N | L171P/S260T/E306G/S332P/F387I/I390A/L749F/L750D/ | + | + | ++ | + |
| | | M797W/T1148N/L1248D/L1377D/V1439E | | | | |
| 1243/1244 | S751Y/K752L/ | L171P/S260T/E306G/S332P/F387I/I390A/L749F/L750D/ | ++ | +++ | ++ | ++ |
| | N753D/M1051R | S751Y/K752L/N753D/M1051R/L1248D/L1377D/V1439E | | | | |
| 1245/1246 | V63Q/K732W/M1051R | V63Q/L171P/S260T/E306G/S332P/F387I/I390A/K732W/ | ++ | ++ | ++ | + |
| | | L749F/L750D/M1051R/L1248D/L1377D/V1439E | | | | |
| 1247/1248 | K752G/M797W/S815I/ | L171P/S260T/E306G/S332P/F387I/I390A/L749F/L750D/ | ++ | +++ | ++ | ++ |
| | Q923M/M1051R/ | K752G/M797W/S815I/Q923M/M1051R/T1148N | | | | |
| | T1148N | L1248D/L1377D/V1439E | | | | |
| 1249/1250 | A747D/N753D | L171P/S260T/E306G/S332P/F387I/I390A/A747D/L749F/ | ++ | ++ | ++ | ++ |
| | | L750D/N753D/L1248D/L1377D/V1439E | | | | |

All activities were determined relative to the reference polypeptide of SEQ ID NO: 840. Levels of increased activity are defined as follows:
“+” 0.9 to 1.1,
“++” >1.1,
“+++” >2

### Example 9

### FVIII Variants Derived from SEQ ID NO: 1200

[0359] In this Example, experiments conducted to determine FVIII variant activity by assaying the protein activity after a challenge is described. These variants were tested for FVIII activity after no incubation and after incubation in Hemophilia A patient plasma (George King Bio-Medical, Inc.), as described in Example 3. Variants were tested using the chromogenic and clotting assays, as described in Example 3. Results are shown in Tables 9.1 and 9.2 for variants expressed using Expi293F cells or HepG2 cells.

TABLE 9.1
Activity of FVII Variants Relative to SEQ ID NO: 1200

| | | | | (Expi293F) |
|---|---|---|---|---|
| | | | (Expi293F) | Chromogenic |
| | | | Unchallenged | Activity after |
| | | | Chromogenic | Plasma |
| | Amino Acid | | Activity | Challenge |
| | Differences | Amino Acid | FIOPC | FIOPC |
| SEQ ID | (Relative to | Differences | Relative to | Relative to |
| NO: | SEQ ID NO: | (Relative to | SEQ ID NO: | SEQ ID NO: |
| (nt/aa) | 1200) | SEQ ID NO: 2) | 1200 | 1200 |
| 1199/1200 | | V63Q/L171P/S260T/E306G/S332P/ | + | + |
| | | F387I/I390A/V393G/K732W/L749F/ | | |
| | | L750D/I775G/T1148N/L1248D/L1377D/ | | |
| | | V1439E | | |
| 1251/1252 | M681A | V63Q/L171P/S260T/E306G/S332P/ | + | +++ |
| | | F387I/I390A/V393G/M681A/K732W/ | | |
| | | L749F/L750D/I775G/T1148N/L1248D/ | | |
| | | L1377D/V1439E | | |
| 1253/1254 | L622D | V63Q/L171P/S260T/E306G/S332P/ | + | + |
| | | F387I/I390A/V393G/L622D/K732W/ | | |
| | | L749F/L750D/I775G/T1148N/L1248D/ | | |
| | | L1377D/V1439E | | |
| 1255/1256 | P617G | V63Q/L171P/S260T/E306G/S332P/ | ++ | + |
| | | F387I/I390A/V393G/P617G/K732W/ | | |
| | | L749F/L750D/I775G/T1148N/L1248D/ | | |
| | | L1377D/V1439E | | |
| 1257/1258 | M558L | V63Q/L171P/S260T/E306G/S332P/ | + | +++ |
| | | F387I/I390A/V393G/M558L/K732W/ | | |
| | | L749F/L750D/I775G/T1148N/L1248D/ | | |
| | | L1377D/V1439E | | |
| 1259/1260 | V536K | V63Q/L171P/S260T/E306G/S332P/ | + | +++ |
| | | F387I/I390A/V393G/V536K/K732W/ | | |
| | | L749F/L750D/I775G/T1148N/L1248D/ | | |
| | | L1377D/V1439E | | |
| 1261/1262 | M681G | V63Q/L171P/S260T/E306G/S332P/ | + | +++ |
| | | F387I/I390A/V393G/M681G/K732W/ | | |
| | | L749F/L750D/I775G/T1148N/L1248D/ | | |
| | | L1377D/V1439E | | |
| 1263/1264 | L211Q | V63Q/L171P/L211Q/S260T/E306G/ | + | + |
| | | S332P/F387I/I390A/V393G/K732W/ | | |
| | | L749F/L750D/I775G/T1148N/L1248D/ | | |
| | | L1377D/V1439E | | |
| 1265/1266 | M320R | V63Q/L171P/S260T/E306G/M320R/ | +++ | +++ |
| | | S332P/F387I/I390A/V393G/K732W/ | | |
| | | L749F/L750D/I775G/T1148N/L1248D/ | | |
| | | L1377D/V1439E | | |
| 1267/1268 | M558W | V63Q/L171P/S260T/E306G/S332P/ | + | +++ |
| | | F387I/I390A/V393G/M558W/K732W/ | | |
| | | L749F/L750D/I775G/T1148N/L1248D/ | | |
| | | L1377D/V1439E | | |
| 1269/1270 | S839K | V63Q/L171P/S260T/E306G/S332P/ | +++ | +++ |
| | | F387I/I390A/V393G/K732W/L749F/ | | |
| | | L750D/I775G/S839K/T1148N/L1248D/ | | |
| | | L1377D/V1439E | | |
| 1271/1272 | L211K | V63Q/L171P/L211K/S260T/E306G/ | ++ | + |
| | | S332P/F387I/I390A/V393G/K732W/ | | |
| | | L749F/L750D/I775G/T1148N/L1248D/ | | |
| | | L1377D/V1439E | | |
| 1273/1274 | M797W | V63Q/L171P/S260T/E306G/S332P/ | + | +++ |
| | | F387I/I390A/V393G/K732W/L749F/ | | |
| | | L750D/I775G/M797W/T1148N/L1248D/ | | |
| | | L1377D/V1439E | | |
| 1275/1276 | T533R | V63Q/L171P/S260T/E306G/S332P/ | + | ++ |
| | | F387I/I390A/V393G/T533R/K732W/ | | |
| | | L749F/L750D/I775G/T1148N/L1248D/ | | |
| | | L1377D/V1439E | | |
| 1277/1278 | S751A | V63Q/L171P/S260T/E306G/S332P/ | + | ++ |
| | | F387I/I390A/V393G/K732W/L749F/ | | |
| | | L750D/S751A/I775G/T1148N/L1248D/ | | |
| | | L1377D/V1439E | | |
| 1279/1280 | A303T | V63Q/L171P/S260T/A303T/E306G/ | +++ | + |
| | | S332P/F387I/I390A/V393G/K732W/ | | |
| | | L749F/L750D/I775G/T1148N/L1248D/ | | |
| | | L1377D/V1439E | | |
| 1281/1282 | T951V | V63Q/L171P/S260T/E306G/S332P/ | ++ | + |
| | | F387I/I390A/V393G/K732W/L749F/ | | |
| | | L750D/T951V/I775G/T1148N/L1248D/ | | |
| | | L1377D/V1439E | | |
| 1283/1284 | G164E | V63Q/G164E/L171P/S260T/E306G/ | ++ | +++ |
| | | S332P/F387I/I390A/V393G/K732W/ | | |
| | | L749F/L750D/I775G/T1148N/L1248D/ | | |
| | | L1377D/V1439E | | |
| 1285/1286 | K818G | V63Q/L171P/S260T/E306G/S332P/ | + | ++ |
| | | F387I/I390A/V393G/K732W/L749F/ | | |
| | | L750D/I775G/K818G/T1148N/L1248D/ | | |
| | | L1377D/V1439E | | |
| 1287/1288 | E807L | V63Q/L171P/S260T/E306G/S332P/ | +++ | + |
| | | F387I/I390A/V393G/K732W/L749F/ | | |
| | | L750D/I775G/E807L/T1148N/L1248D/ | | |
| | | L1377D/V1439E | | |
| 1289/1290 | K799A | V63Q/L171P/S260T/E306G/S332P/ | ++ | + |
| | | F387I/I390A/V393G/K732W/L749F/ | | |
| | | L750D/I775G/K799A/T1148N/L1248D/ | | |
| | | L1377D/V1439E | | |
| 1291/1292 | G735S | V63Q/L171P/S260T/E306G/S332P/ | ++ | ++ |
| | | F387I/I390A/V393G/K732W/G735S/ | | |
| | | L749F/L750D/I775G/T1148N/L1248D/ | | |
| | | L1377D/V1439E | | |
| 1293/1294 | S794R | V63Q/L171P/S260T/E306G/S332P/ | + | ++ |
| | | F387I/I390A/V393G/K732W/L749F/ | | |
| | | L750D/I775G/S794R/T1148N/L1248D/ | | |
| | | L1377D/V1439E | | |
| 1295/1296 | E926V | V63Q/L171P/S260T/E306G/S332P/ | + | ++ |
| | | F387I/I390A/V393G/K732W/L749F/ | | |
| | | L750D/I775G/E926V/T1148N/L1248D/ | | |
| | | L1377D/V1439E | | |
| 1297/1298 | A755P | V63Q/L171P/S260T/E306G/S332P/ | + | +++ |
| | | F387I/I390A/V393G/K732W/L749F/ | | |
| | | L750D/A755P/I775G/T1148N/L1248D/ | | |
| | | L1377D/V1439E | | |
| 1299/1300 | Q921W | V63Q/L171P/S260T/E306G/S332P/ | +++ | + |
| | | F387I/I390A/V393G/K732W/L749F/ | | |
| | | L750D/I775G/Q921W/T1148N/L1248D/ | | |
| | | L1377D/V1439E | | |
| 1301/1302 | D801A | V63Q/L171P/S260T/E306G/S332P/ | + | ++ |
| | | F387I/I390A/V393G/K732W/L749F/ | | |
| | | L750D/I775G/D801A/T1148N/L1248D/ | | |
| | | L1377D/V1439E | | |
| 1303/1304 | E1094S | V63Q/L171P/S260T/E306G/S332P/ | + | ++ |
| | | F387I/I390A/V393G/K732W/L749F/ | | |
| | | L750D/I775G/E1094S/T1148N/L1248D/ | | |
| | | L1377D/V1439E | | |
| 1305/1306 | L968A | V63Q/L171P/S260T/E306G/S332P/ | ++ | + |
| | | F387I/I390A/V393G/K732W/L749F/ | | |
| | | L750D/I775G/L968A/T1148N/L1248D/ | | |
| | | L1377D/V1439E | | |
| 1307/1308 | K929Q | V63Q/L171P/S260T/E306G/S332P/ | ++ | ++ |
| | | F387I/I390A/V393G/K732W/L749F/ | | |
| | | L750D/I775G/K929Q/T1148N/L1248D/ | | |
| | | L1377D/V1439E | | |
| 1309/1310 | G924W | V63Q/L171P/S260T/E306G/S332P/ | ++ | +++ |
| | | F387I/I390A/V393G/K732W/L749F/ | | |
| | | L750D/I775G/G924W/T1148N/L1248D/ | | |
| | | L1377D/V1439E | | |
| 1311/1312 | E807P | V63Q/L171P/S260T/E306G/S332P/ | + | ++ |
| | | F387I/I390A/V393G/K732W/L749F/ | | |
| | | L750D/I775G/E807P/T1148N/L1248D/ | | |
| | | L1377D/V1439E | | |
| 1313/1314 | F698D | V63Q/L171P/S260T/E306G/S332P/ | + | +++ |
| | | F387I/I390A/V393G/F698D/K732W/ | | |
| | | L749F/L750D/I775G/T1148N/L1248D/ | | |
| | | L1377D/V1439E | | |
| 1315/1316 | S168G | V63Q/S168G/L171P/S260T/E306G/ | + | ++ |
| | | S332P/F387I/I390A/V393G/K732W/ | | |
| | | L749F/L750D/I775G/T1148N/L1248D/ | | |
| | | L1377D/V1439E | | |
| 1317/1318 | K929V | V63Q/L171P/S260T/E306G/S332P/ | ++ | + |
| | | F387I/I390A/V393G/K732W/L749F/ | | |
| | | L750D/I775G/K929V/T1148N/L1248D/ | | |
| | | L1377D/V1439E | | |
| 1319/1320 | K818A | V63Q/L171P/S260T/E306G/S332P/ | + | + |
| | | F387I/I390A/V393G/K732W/L749F/ | | |
| | | L750D/I775G/K818A/T1148N/L1248D/ | | |
| | | L1377D/V1439E | | |
| 1321/1322 | K818S | V63Q/L171P/S260T/E306G/S332P/ | + | + |
| | | F387I/I390A/V393G/K732W/L749F/ | | |
| | | L750D/I775G/K818S/T1148N/L1248D/ | | |
| | | L1377D/V1439E | | |
| 1323/1324 | R581K | V63Q/L171P/S260T/E306G/S332P/ | + | + |
| | | F387I/I390A/V393G/R581K/K732W/ | | |
| | | L749F/L750D/I775G/T1148N/L1248D/ | | |
| | | L1377D/V1439E | | |
| 1325/1326 | K818P | V63Q/L171P/S260T/E306G/S332P/ | + | +++ |
| | | F387I/I390A/V393G/K732W/L749F/ | | |
| | | L750D/I775G/K818P/T1148N/L1248D/ | | |
| | | L1377D/V1439E | | |
| 1327/1328 | S916K | V63Q/L171P/S260T/E306G/S332P/ | + | + |
| | | F387I/I390A/V393G/K732W/L749F/ | | |
| | | L750D/I775G/S916K/T1148N/L1248D/ | | |
| | | L1377D/V1439E | | |
| 1329/1330 | F698S | V63Q/L171P/S260T/E306G/S332P/ | + | + |
| | | F387I/I390A/V393G/F698S/K732W/ | | |
| | | L749F/L750D/I775G/T1148N/L1248D/ | | |
| | | L1377D/V1439E | | |
| 1331/1332 | A303G | V63Q/L171P/S260T/A303G/E306G/ | +++ | + |
| | | S332P/F387I/I390A/V393G/K732W/ | | |
| | | L749F/L750D/I775G/T1148N/L1248D/ | | |
| | | L1377D/V1439E | | |
| 1333/1334 | S916C | V63Q/L171P/S260T/E306G/S332P/ | + | + |
| | | F387I/I390A/V393G/K732W/L749F/ | | |
| | | L750D/I775G/S916C/T1148N/L1248D/ | | |
| | | L1377D/V1439E | | |
| 1335/1336 | T1428G | V63Q/L171P/S260T/E306G/S332P/ | + | ++ |
| | | F387I/I390A/V393G/K732W/L749F/ | | |
| | | L750D/I775G/T1148N/L1248D/L1377D/ | | |
| | | T1428G/V1439E | | |
| 1337/1338 | Y805L | V63Q/L171P/S260T/E306G/S332P/ | +++ | ++ |
| | | F387I/I390A/V393G/K732W/L749F/ | | |
| | | L750D/I775G/Y805L/T1148N/L1248D/ | | |
| | | L1377D/V1439E | | |
| 1339/1340 | G924M | V63Q/L171P/S260T/E306G/S332P/ | ++ | + |
| | | F387I/I390A/V393G/K732W/L749F/ | | |
| | | L750D/I775G/G924M/T1148N/L1248D/ | | |
| | | L1377D/V1439E | | |
| 1341/1342 | L1114M | V63Q/L171P/S260T/E306G/S332P/ | ++ | + |
| | | F387I/I390A/V393G/K732W/L749F/ | | |
| | | L750D/I775G/L1114M/T1148N/L1248D/ | | |
| | | L1377D/V1439E | | |
| 1343/1344 | T311G | V63Q/L171P/S260T/E306G/T311G/ | +++ | + |
| | | S332P/F387I/I390A/V393G/K732W/ | | |
| | | L749F/L750D/I775G/T1148N/L1248D/ | | |
| | | L1377D/V1439E | | |
| 1345/1346 | Y737N | V63Q/L171P/S260T/E306G/S332P/ | + | + |
| | | F387I/I390A/V393G/K732W/Y737N/ | | |
| | | L749F/L750D/I775G/T1148N/L1248D/ | | |
| | | L1377D/V1439E | | |
| 1347/1348 | Y805V | V63Q/L171P/S260T/E306G/S332P/ | ++ | ++ |
| | | F387I/I390A/V393G/K732W/L749F/ | | |
| | | L750D/I775G/Y805V/T1148N/L1248D/ | | |
| | | L1377D/V1439E | | |
| 1349/1350 | D801I | V63Q/L171P/S260T/E306G/S332P/ | + | ++ |
| | | F387I/I390A/V393G/K732W/L749F/ | | |
| | | L750D/I775G/D801I/T1148N/L1248D/ | | |
| | | L1377D/V1439E | | |
| 1351/1352 | S751D | V63Q/L171P/S260T/E306G/S332P/ | + | + |
| | | F387I/I390A/V393G/K732W/L749F/ | | |
| | | L750D/S751D/I775G/T1148N/L1248D/ | | |
| | | L1377D/V1439E | | |
| 1353/1354 | S693T | V63Q/L171P/S260T/E306G/S332P/ | ++ | + |
| | | F387I/I390A/V393G/S693T/K732W/ | | |
| | | L749F/L750D/I775G/T1148N/L1248D/ | | |
| | | L1377D/V1439E | | |
| 1355/1356 | K818E | V63Q/L171P/S260T/E306G/S332P/ | + | + |
| | | F387I/I390A/V393G/K732W/L749F/ | | |
| | | L750D/I775G/K818E/T1148N/L1248D/ | | |
| | | L1377D/V1439E | | |
| 1357/1358 | K929A | V63Q/L171P/S260T/E306G/S332P/ | ++ | + |
| | | F387I/I390A/V393G/K732W/L749F/ | | |
| | | L750D/I775G/K929A/T1148N/L1248D/ | | |
| | | L1377D/V1439E | | |
| 1359/1360 | T311E | V63Q/L171P/S260T/E306G/T311E/ | +++ | + |
| | | S332P/F387I/I390A/V393G/K732W/ | | |
| | | L749F/L750D/I775G/T1148N/L1248D/ | | |
| | | L1377D/V1439E | | |
| 1361/1362 | Y737L | V63Q/L171P/S260T/E306G/S332P/ | + | ++ |
| | | F387I/I390A/V393G/K732W/Y737L/ | | |
| | | L749F/L750D/I775G/T1148N/L1248D/ | | |
| | | L1377D/V1439E | | |
| 1363/1364 | E809W | V63Q/L171P/S260T/E306G/S332P/ | +++ | + |
| | | F387I/I390A/V393G/K732W/L749F/ | | |
| | | L750D/I775G/E809W/T1148N/L1248D/ | | |
| | | L1377D/V1439E | | |
| 1365/1366 | E757A | V63Q/L171P/S260T/E306G/S332P/ | +++ | + |
| | | F387I/I390A/V393G/K732W/L749F/ | | |
| | | L750D/E757A/I775G/T1148N/L1248D/ | | |
| | | L1377D/V1439E | | |
| 1367/1368 | A1099G | V63Q/L171P/S260T/E306G/S332P/ | + | + |
| | | F387I/I390A/V393G/K732W/L749F/ | | |
| | | L750D/I775G/A1099G/T1148N/L1248D/ | | |
| | | L1377D/V1439E | | |
| 1369/1370 | K799G | V63Q/L171P/S260T/E306G/S332P/ | + | ++ |
| | | F387I/I390A/V393G/K732W/L749F/ | | |
| | | L750D/I775G/K799G/T1148N/L1248D/ | | |
| | | L1377D/V1439E | | |
| 1371/1372 | S916I | V63Q/L171P/S260T/E306G/S332P/ | + | + |
| | | F387I/I390A/V393G/K732W/L749F/ | | |
| | | L750D/I775G/S916I/T1148N/L1248D/ | | |
| | | L1377D/V1439E | | |
| 1373/1374 | Y805G | V63Q/L171P/S260T/E306G/S332P/ | +++ | + |
| | | F387I/I390A/V393G/K732W/L749F/ | | |
| | | L750D/I775G/Y805G/T1148N/L1248D/ | | |
| | | L1377D/V1439E | | |
| 1375/1376 | Y737F | V63Q/L171P/S260T/E306G/S332P/ | + | ++ |
| | | F387I/I390A/V393G/K732W/Y737F/ | | |
| | | L749F/L750D/I775G/T1148N/L1248D/ | | |
| | | L1377D/V1439E | | |
| 1377/1378 | Y737M | V63Q/L171P/S260T/E306G/S332P/ | ++ | ++ |
| | | F387I/I390A/V393G/K732W/Y737M/ | | |
| | | L749F/L750D/I775G/T1148N/L1248D/ | | |
| | | L1377D/V1439E | | |
| 1379/1380 | K799P | V63Q/L171P/S260T/E306G/S332P/ | ++ | + |
| | | F387I/I390A/V393G/K732W/L749F/ | | |
| | | L750D/I775G/K799P/T1148N/L1248D/ | | |
| | | L1377D/V1439E | | |
| 1381/1382 | E807C | V63Q/L171P/S260T/E306G/S332P/ | ++ | + |
| | | F387I/I390A/V393G/K732W/L749F/ | | |
| | | L750D/I775G/E807C/T1148N/L1248D/ | | |
| | | L1377D/V1439E | | |
| 1383/1384 | S916E | V63Q/L171P/S260T/E306G/S332P/ | ++ | + |
| | | F387I/I390A/V393G/K732W/L749F/ | | |
| | | L750D/I775G/S916E/T1148N/L1248D/ | | |
| | | L1377D/V1439E | | |
| 1385/1386 | T676Q | V63Q/L171P/S260T/E306G/S332P/ | ++ | + |
| | | F387I/I390A/V393G/T676Q/K732W/ | | |
| | | L749F/L750D/I775G/T1148N/L1248D/ | | |
| | | L1377D/V1439E | | |
| 1387/1388 | R581V | V63Q/L171P/S260T/E306G/S332P/ | ++ | ++ |
| | | F387I/I390A/V393G/R581V/K732W/ | | |
| | | L749F/L750D/I775G/T1148N/L1248D/ | | |
| | | L1377D/V1439E | | |
| 1389/1390 | L968P | V63Q/L171P/S260T/E306G/S332P/ | ++ | +++ |
| | | F387I/I390A/V393G/K732W/L749F/ | | |
| | | L750D/I775G/L968P/T1148N/L1248D/ | | |
| | | L1377D/V1439E | | |
| 1391/1392 | A755Y | V63Q/L171P/S260T/E306G/S332P/ | ++ | ++ |
| | | F387I/I390A/V393G/K732W/L749F/ | | |
| | | L750D/A755Y/I775G/T1148N/L1248D/ | | |
| | | L1377D/V1439E | | |
| 1393/1394 | S916Q | V63Q/L171P/S260T/E306G/S332P/ | +++ | +++ |
| | | F387I/I390A/V393G/K732W/L749F/ | | |
| | | L750D/I775G/S916Q/T1148N/L1248D/ | | |
| | | L1377D/V1439E | | |
| 1395/1396 | G735D | V63Q/L171P/S260T/E306G/S332P/ | +++ | + |
| | | F387I/I390A/V393G/K732W/G735D/ | | |
| | | L749F/L750D/I775G/T1148N/L1248D/ | | |
| | | L1377D/V1439E | | |
| 1397/1398 | D740G | V63Q/L171P/S260T/E306G/S332P/ | +++ | +++ |
| | | F387I/I390A/V393G/K732W/D740G/ | | |
| | | L749F/L750D/I775G/T1148N/L1248D/ | | |
| | | L1377D/V1439E | | |
| 1399/1400 | F698Y | V63Q/L171P/S260T/E306G/S332P/ | + | + |
| | | F387I/I390A/V393G/K732W/F698Y/ | | |
| | | L749F/L750D/I775G/T1148N/L1248D/ | | |
| | | L1377D/V1439E | | |
| 1401/1402 | E757G | V63Q/L171P/S260T/E306G/S332P/ | ++ | ++ |
| | | F387I/I390A/V393G/K732W/L749F/ | | |
| | | L750D/E757G/I775G/T1148N/L1248D/ | | |
| | | L1377D/V1439E | | |
| 1403/1404 | D791T | V63Q/L171P/S260T/E306G/S332P/ | +++ | + |
| | | F387I/I390A/V393G/K732W/L749F/ | | |
| | | L750D/I775G/D791T/T1148N/L1248D/ | | |
| | | L1377D/V1439E | | |
| 1405/1406 | L1114A | V63Q/L171P/S260T/E306G/S332P/ | + | ++ |
| | | F387I/I390A/V393G/K732W/L749F/ | | |
| | | L750D/I775G/L1114A/T1148N/L1248D/ | | |
| | | L1377D/V1439E | | |
| 1407/1408 | G735V | V63Q/L171P/S260T/E306G/S332P/ | + | ++ |
| | | F387I/I390A/V393G/K732W/G735V/ | | |
| | | L749F/L750D/I775G/T1148N/L1248D/ | | |
| | | L1377D/V1439E | | |

All activities were determined relative to the reference polypeptide of SEQ ID NO: 1200. Levels of increased activity are defined as follows: “+” 0.9 to 1.1, “++” >1.1, “+++” >2

TABLE 9.2
Activity of FVIII Variants Relative to SEQ ID NO: 1200

| | | | | (Expi293F) | | (HepG2) | |
|---|---|---|---|---|---|---|---|
| | | | (Expi293F) | Chromogenic | (HepG2) | Chromogenic | (Expi293F) |
| | | | Unchallenged | Activity | Unchallenged | Activity after | Unchallenged |
| | | | Chromogenic | after Plasma | Chromogenic | Plasma | Clotting |
| | Amino Acid | | Activity | Challenge | Activity | Challenge | Activity |
| | Differences | Amino Acid | FIOPC | FIOPC | FIOPC | FIOPC | FIOPC |
| SEQ ID | (Relative to | Differences | Relative to | Relative to | Relative to | Relative to | Relative to |
| NO: | SEQ ID NO: | (Relative to | SEQ ID NO: | SEQ ID NO: | SEQ ID NO: | SEQ ID NO: | SEQ ID NO: |
| (nt/aa) | 1200) | SEQ ID NO: 2) | 1200 | 1200 | 1200 | 1200 | 1200 |
| 1199/1200 | | V63Q/L171P/S260T/E306G/S332P/ | + | + | + | + | + |
| | | F387I/I390A/V393G/K732W/L749F/ | | | | | |
| | | L750D/I775G/T1148N/L1248D/ | | | | | |
| | | L1377D/V1439E | | | | | |
| 1409/1410 | V536P | V63Q/L171P/S260T/E306G/S332P/ | ++ | + | ++ | ++ | + |
| | | F387I/I390A/V393G/V536P/K732W/ | | | | | |
| | | L749F/L750D/I775G/T1148N/ | | | | | |
| | | L1248D/L1377D/V1439E | | | | | |
| 1411/1412 | L211R/V536K/ | V63Q/L171P/L211R/S260T/E306G/ | ++ | ++ | + | ++ | + |
| | L622D/M681A | S332P/F387I/I390A/V393G/V536K/ | | | | | |
| | | L622D/M681A/K732W/L749F/L750D/ | | | | | |
| | | I775G/T1148N/L1248D/L1377D/ | | | | | |
| | | V1439E | | | | | |
| 1413/1414 | V536K/M558L | V63Q/L171P/S260T/E306G/S332P/ | ++ | + | ++ | + | + |
| | | F387I/I390A/V393G/V536K/M558L/ | | | | | |
| | | K732W/L749F/L750D/I775G/ | | | | | |
| | | T1148N/L1248D/L1377D/V1439E | | | | | |
| 1415/1416 | L211R/V536R/ | V63Q/L171P/L211R/S260T/E306G/ | ++ | ++ | ++ | ++ | + |
| | F555G/P617G/ | S332P/F387I/I390A/V393G/V536R/ | | | | | |
| | W732K | F555G/P617G/L749F/L750D/I775G/ | | | | | |
| | | T1148N/L1248D/L1377D/V1439E | | | | | |
| 1417/1418 | L211R/M681R/ | V63Q/L171P/L211R/S260T/E306G/ | ++ | | ++ | + | + |
| | W732K | S332P/F387I/I390A/V393G/M681R/ | | | | | |
| | | L749F/L750D/I775G/T1148N/ | | | | | |
| | | L1248D/L1377D/V1439E | | | | | |
| 1419/1420 | L211R/V536K/ | V63Q/L171P/L211R/S260T/E306G/ | ++ | ++ | + | + | + |
| | F555E | S332P/F387I/I390A/V393G/V536K/ | | | | | |
| | | F555E/K732W/L749F/L750D/I775G/ | | | | | |
| | | T1148N/L1248D/L1377D/V1439E | | | | | |
| 1421/1422 | V536R | V63Q/L171P/S260T/E306G/S332P/ | ++ | ++ | + | + | + |
| | | F387I/I390A/V393G/V536R/K732W/ | | | | | |
| | | L749F/L750D/I775G/T1148N/ | | | | | |
| | | L1248D/L1377D/V1439E | | | | | |
| 1423/1424 | F555E | V63Q/L171P/S260T/E306G/S332P/ | ++ | ++ | ++ | ++ | ++ |
| | | F387I/I390A/V393G/F555E/K732W/ | | | | | |
| | | L749F/L750D/I775G/T1148N/ | | | | | |
| | | L1248D/L1377D/V1439E | | | | | |
| 1425/1426 | L211R/V536P | V63Q/L171P/L211R/S260T/E306G/ | ++ | ++++ | ++ | ++ | + |
| | | S332P/F387I/I390A/V393G/V536P/ | | | | | |
| | | K732W/L749F/L750D/I775G/ | | | | | |
| | | T1148N/L1248D/L1377D/V1439E | | | | | |
| 1427/1428 | L211R/H212P | V63Q/L171P/L211R/H212P/S260T/ | ++ | + | ++ | ++ | + |
| | | E306G/S332P/F387I/I390A/V393G/ | | | | | |
| | | K732W/L749F/L750D/I775G/ | | | | | |
| | | T1148N/L1248D/L1377D/V1439E | | | | | |
| 1429/1430 | L211R/V536K | V63Q/L171P/L211R/S260T/E306G/ | + | + | + | ++ | + |
| | | S332P/F387I/I390A/V393G/V536K/ | | | | | |
| | | K732W/L749F/L750D/I775G/ | | | | | |
| | | T1148N/L1248D/L1377D/V1439E | | | | | |
| 1431/1432 | L211R/V536K/ | V63Q/L171P/L211R/S260T/E306G/ | ++ | + | + | ++ | + |
| | P617G/M681A/ | S332P/F387I/I390A/V393G/ | | | | | |
| | W732K | V536K/P617G/M681A/L749F/ | | | | | |
| | | L750D/I775G/T1148N/L1248D/ | | | | | |
| | | L1377D/V1439E | | | | | |
| 1433/1434 | L211R | V63Q/L171P/L211R/S260T/E306G/ | ++ | ++ | ++ | ++ | ++ |
| | | S332P/F387I/I390A/V393G/K732W/ | | | | | |
| | | L749F/L750D/I775G/T1148N/ | | | | | |
| | | L1248D/L1377D/V1439E | | | | | |
| 1435/1436 | L211R/V536P/ | V63Q/L171P/L211R/S260T/E306G/ | ++ | + | ++ | ++ | ++ |
| | M558L/P617G/ | S332P/F387I/I390A/V393G/V536P/ | | | | | |
| | M681A | M558L/P617G/M681A/K732W/ | | | | | |
| | | L749F/L750D/I775G/T1148N/L1248D/ | | | | | |
| | | L1377D/V1439E | | | | | |
| 1437/1438 | F555G/W732K | V63Q/L171P/S260T/E306G/S332P/ | ++ | + | ++ | ++ | + |
| | | F3871/I390A/V393G/F555G/L749F/ | | | | | |
| | | L750D/I775G/T1148N/L1248D/ | | | | | |
| | | L1377D/V1439E | | | | | |
| 1439/1440 | V536P/F555E/ | V63Q/L171P/S260T/E306G/S332P/ | ++ | +++ | ++ | ++ | + |
| | M558L/P617G/ | F387I/I390A/V393G/V536P/F555E/ | | | | | |
| | W732K | M558L/P617G/L749F/L750D/I775G/ | | | | | |
| | | T1148N/L1248D/L1377D/V1439E | | | | | |
| 1441/1442 | V536K/P617G/ | V63Q/L171P/S260T/E306G/S332P/ | ++ | ++ | + | ++ | + |
| | M681A/W732K | F387I/I390A/V393G/V536K/P617G/ | | | | | |
| | | M681A/L749F/L750D/I775G/ | | | | | |
| | | NT1148/L1248D/L1377D/V1439E | | | | | |
| 1443/1444 | V536K/F555G | V63Q/L171P/S260T/E306G/S332P/ | ++ | + | ++ | ++ | + |
| | | F387I/I390A/V393G/V536K/F555G/ | | | | | |
| | | K732W/L749F/L750D/I775G/T1148N/ | | | | | |
| | | L1248D/L1377D/V1439E | | | | | |
| 1445/1446 | V536P/L622D/ | V63Q/L171P/S260T/E306G/S332P/ | ++ | ++ | | + | + |
| | M681A | F3871/I390A/V393G/V536P/L622D/ | | | | | |
| | | M681A/K732W/L749F/L750D/I775G/ | | | | | |
| | | T1148N/L1248D/L1377D/V1439E | | | | | |
| 1447/1448 | W732K | V63Q/L171P/S260T/E306G/S332P/ | ++ | | ++ | ++ | + |
| | | F387I/I390A/V393G/L749F/L750D/ | | | | | |
| | | I775G/T1148N/L1248D/L1377D/ | | | | | |
| | | V1439E | | | | | |
| 1449/1450 | H212A/M320Q/ | V63Q/L171P/H212A/S260T/E306G/ | ++ | ++ | ++ | ++ | + |
| | T533R/P617E/ | M320Q/S332P/F387I/I390A/V393G/ | | | | | |
| | M681G | T533R/P617E/M681G/K732W/L749F/ | | | | | |
| | | L750D/I775G/T1148N/L1248D/ | | | | | |
| | | L1377D/V1439E | | | | | |
| 1451/1452 | L211K/F312L/ | V63Q/L171P/L211K/S260T/E306G/ | ++ | + | ++ | ++ | ++ |
| | T533R/V534I/ | F312L/S332P/F387I/I390A/V393G/ | | | | | |
| | P617D/G619E/ | T533R/V534I/P617D/G619E/M681N/ | | | | | |
| | M681N/S839K | K732W/L749F/L750D/I775G/S839K/ | | | | | |
| | | T1148N/L1248D/L1377D/V1439E | | | | | |
| 1453/1454 | H212A | V63Q/L171P/H212A/S260T/E306G/ | + | + | + | + | + |
| | | S332P/F387I/I390A/V393G/K732W/ | | | | | |
| | | L749F/L750D/I775G/T1148N/ | | | | | |
| | | L1248D/L1377D/V1439E | | | | | |
| 1455/1456 | L211K/H212A/ | V63Q/L171P/L211K/H212A/S260T/ | +++ | ++ | ++ | ++ | ++ |
| | M320Q/G619E/ | E306G/M320Q/S332P/F387I/I390A/ | | | | | |
| | M681G/S839K | V393G/G619E/M681G/K732W/ | | | | | |
| | | L749F/L750D/I775G/S839K/T1148N/ | | | | | |
| | | L1248D/L1377D/V1439E | | | | | |
| 1457/1458 | M797W/S839K | V63Q/L171P/S260T/E306G/S332P/ | + | ++ | + | + | + |
| | | F387I/I390A/V393G/K732W/L749F/ | | | | | |
| | | L750D/I775G/M797W/S839K/ | | | | | |
| | | T1148N/L1248D/L1377D/V1439E | | | | | |
| 1459/1460 | H212A/F312L/ | V63Q/L171P/H212A/S260T/E306G/ | ++ | +++ | ++ | ++ | + |
| | M320Q/T533R/ | F312L/M320Q/S332P/F387I/I390A/ | | | | | |
| | V534I/P617E/ | V393G/T533R/V534I/P617E/M681G/ | | | | | |
| | M681G | K732W/L749F/L750D/I775G/T1148N/ | | | | | |
| | | L1248D/L1377D/V1439E | | | | | |
| 1461/1462 | M558W/G619E/ | V63Q/L171P/S260T/E306G/S332P/ | ++ | ++ | ++ | +++ | ++ |
| | M681G | F387I/I390A/V393G/M558W/G619E/ | | | | | |
| | | M681G/K732W/L749F/L750D/I775G/ | | | | | |
| | | T1148N/L1248D/L1377D/V1439E | | | | | |
| 1463/1464 | M320Q/M558W/ | V63Q/L171P/S260T/E306G/M320Q/ | ++ | ++ | ++ | ++ | + |
| | M681G | S332P/F387I/I390A/V393G/ | | | | | |
| | | M558W/M681G/K732W/L749F/L750D/ | | | | | |
| | | I775G/T1148N/L1248D/L1377D/ | | | | | |
| | | V1439E | | | | | |
| 1465/1466 | H212A/M320Q/ | V63Q/L171P/H212A/S260T/E306G/ | ++ | ++ | ++ | ++ | + |
| | V534I/G619E/ | M320Q/S332P/F387I/I390A/V393G/ | | | | | |
| | M681G/M797W/ | V534I/G619E/M681G/K732W/L749F/ | | | | | |
| | S839K | L750D/I775G/M797W/S839K/T1148N/ | | | | | |
| | | L1248D/L1377D/V1439E | | | | | |
| 1467/1468 | M320R/M558W/ | V63Q/L171P/S260T/E306G/M320R/ | ++ | ++++ | + | ++ | + |
| | G619E/W732K/ | S332P/F387I/I390A/V393G/M558W/ | | | | | |
| | S839K | G619E/L749F/L750D/I775G/S839K/ | | | | | |
| | | T1148N/L1248D/L1377D/V1439E | | | | | |
| 1469/1470 | L211K/H212A/ | V63Q/L171P/L211K/H212A/S260T/ | +++ | ++++ | ++ | ++ | + |
| | F312L/V534I/ | E306G/F312L/S332P/F387I/I390A/ | | | | | |
| | M558W/G619E/ | V393G/V534I/M558W/G619E/M681N/ | | | | | |
| | M681N/W732K/ | L749F/L750D/I775G/ | | | | | |
| | S839K | S839K/T1148N/L1248D/L1377D/ | | | | | |
| | | V1439E | | | | | |
| 1471/1472 | M320R/V534I/ | V63Q/L171P/S260T/E306G/M320R/ | +++ | ++ | ++ | ++ | ++ |
| | M558R/G619E/ | S332P/F387I/I390A/V393G/V534I/ | | | | | |
| | W732K/M797W | M558R/G619E/L749F/L750D/I775G/ | | | | | |
| | | M797W/T1148N/L1248D/L1377D/ | | | | | |
| | | V1439E | | | | | |
| 1473/1474 | M558W/P617D/ | V63Q/L171P/S260T/E306G/S332P/ | ++ | ++ | ++ | ++ | ++ |
| | G619E/M681N | F387I/I390A/V393G/M558W/P617D/ | | | | | |
| | | G619E/M681N/K732W/L749F/L750D/ | | | | | |
| | | I775G/T1148N/L1248D/L1377D/ | | | | | |
| | | V1439E | | | | | |
| 1475/1476 | L211Q/V534I/ | V63Q/L171P/L211Q/S260T/E306G/ | ++ | ++ | ++ | ++ | ++ |
| | M558W/Q611E/ | S332P/F387I/I390A/V393G/V534I/ | | | | | |
| | M681N | M558W/Q611E/M681N/K732W/L749F/ | | | | | |
| | | L750D/I775G/T1148N/L1248D/ | | | | | |
| | | L1377D/V1439E | | | | | |
| 1477/1478 | L211K/M320R/ | V63Q/L171P/L211K/S260T/E306G/ | +++ | ++ | ++ | +++ | ++ |
| | P617E/G619E/ | M320R/S332P/F387I/I390A/V393G/ | | | | | |
| | M681G | P617E/G619E/M681G/K732W/L749F/ | | | | | |
| | | L750D/I775G/T1148N/L1248D/ | | | | | |
| | | L1377D/V1439E | | | | | |
| 1479/1480 | M558W/P617D/ | V63Q/L171P/S260T/E306G/S332P/ | ++ | ++ | ++ | ++ | ++ |
| | M681G/M797W | F387I/I390A/V393G/M558W/P617D/ | | | | | |
| | | M681G/K732W/L749F/L750D/I775G/ | | | | | |
| | | M797W/T1148N/L1248D/L1377D/ | | | | | |
| | | V1439E | | | | | |
| 1481/1482 | M320R/V534I/ | V63Q/L171P/S260T/E306G/M320R/ | +++ | +++ | ++ | ++ | ++ |
| | G619E/W732K | S332P/F387I/I390A/V393G/ | | | | | |
| | | V534I/G619E//L749F/L750D/I775G/ | | | | | |
| | | T1148N/L1248D/L1377D/V1439E | | | | | |
| 1483/1484 | L211K/G619E/ | V63Q/L171P/L211K/S260T/E306G/ | +++ | ++ | ++ | ++ | ++ |
| | M681N | S332P/F387I/I390A/V393G/ | | | | | |
| | | G619E/M681N/K732W/L749F/L750D/ | | | | | |
| | | I775G/T1148N/L1248D/L1377D/ | | | | | |
| | | V1439E | | | | | |
| 1485/1486 | L211K/H212A/ | V63Q/L171P/L211K/H212A/S260T/ | ++ | +++ | ++ | ++ | + |
| | V534I/M558W/ | E306G/S332P/F387I/I390A/V393G/ | | | | | |
| | G619E/W732K/ | V534I/M558W/G619E/L749F/L750D/ | | | | | |
| | S839K | I775G/S839K/T1148N/L1248D/ | | | | | |
| | | L1377D/V1439E | | | | | |
| 1487/1488 | H212A/M320R/ | V63Q/L171P/H212A/S260T/E306G/ | +++ | +++++ | +++ | ++ | ++ |
| | G619E/M681N/ | M320R/S332P/F387I/I390A/V393G/ | | | | | |
| | M797W/S839K | G619E/M681N/K732W/L749F/L750D/ | | | | | |
| | | I775G/M797W/S839K/T1148N/ | | | | | |
| | | L1248D/L1377D/V1439E | | | | | |
| 1489/1490 | H212A/M320R/ | V63Q/L171P/H212A/S260T/E306G/ | ++ | +++ | ++ | ++ | + |
| | Q611E/S839K | M320R/S332P/F387I/I390A/V393G/ | | | | | |
| | | Q611E/K732W/L749F/L750D/I775G/ | | | | | |
| | | S839K/T1148N/L1248D/L1377D/ | | | | | |
| | | V1439E | | | | | |
| 1491/1492 | M320Q/M558W/ | V63Q/L171P/S260T/E306G/M320Q/ | +++ | +++ | +++ | +++ | ++ |
| | G619E/M681N | S332P/F387I/I390A/V393G/M558W/ | | | | | |
| | | G619E/M681N/K732W/L749F/L750D/ | | | | | |
| | | I775G/T1148N/L1248D/L1377D/ | | | | | |
| | | V1439E | | | | | |
| 1493/1494 | F312L/T533R/ | V63Q/L171P/S260T/E306G/F312L/ | ++ | +++ | ++ | ++ | ++ |
| | P617D/M681N/ | S332P/F387I/I390A/V393G/T533R/ | | | | | |
| | M797W/S839K | P617D/M681N/K732W/L749F/L750D/ | | | | | |
| | | I775G/M797W/S839K/T1148N/ | | | | | |
| | | L1248D/L1377D/V1439E | | | | | |
| 1495/1496 | M558W/Q611E/ | V63Q/L171P/S260T/E306G/S332P/ | ++ | +++ | + | ++ | ++ |
| | M681N | F387I/I390A/V393G/M558W/Q611E/ | | | | | |
| | | M681N/K732W/L749F/L750D/I775G/ | | | | | |
| | | T1148N/L1248D/L1377D/V1439E | | | | | |
| 1497/1498 | F312L | V63Q/L171P/S260T/E306G/F312L/ | ++ | ++ | ++ | ++ | + |
| | | S332P/F387I/I390A/V393G/K732W/ | | | | | |
| | | L749F/L750D/I775G/T1148N/ | | | | | |
| | | L1248D/L1377D/V1439E | | | | | |
| 1499/1500 | L211Q/M320R/ | V63Q/L171P/L211Q/S260T/E306G/ | ++ | ++ | ++ | ++ | + |
| | M558W/G619E/ | M320R/S332P/F387I/I390A/V393G/ | | | | | |
| | M681G/W732K/ | M558W/G619E/M681G/L749F/L750D/ | | | | | |
| | M797W/S839K | I775G/M797W/S839K/T1148N/ | | | | | |
| | | L1248D/L1377D/V1439E | | | | | |
| 1501/1502 | M320Q/M558W/ | V63Q/L171P/S260T/E306G/M320Q/ | ++ | + | ++ | ++ | + |
| | W732K/M797W | S332P/F387I/I390A/V393G/M558W/ | | | | | |
| | | L749F/L750D/I775G/M797W/T1148N/ | | | | | |
| | | L1248D/L1377D/V1439E | | | | | |
| 1503/1504 | T533R/M558W/ | V63Q/L171P/S260T/E306G/S332P/ | ++ | + | ++ | ++ | + |
| | Q611E/G619E/ | F387I/I390A/V393G/T533R/M558W/ | | | | | |
| | F716L/W732K/ | Q611E/G619E/F716L//L749F/L750D/ | | | | | |
| | S839K | I775G/S839K/T1148N/L1248D/ | | | | | |
| | | L1377D/V1439E | | | | | |
| 1505/1506 | F312L/M681G | V63Q/L171P/S260T/E306G/F312L/ | +++ | ++ | ++ | +++ | ++ |
| | | S332P/F387I/I390A/V393G/M681G/ | | | | | |
| | | K732W/L749F/L750D/I775G/T1148N/ | | | | | |
| | | L1248D/L1377D/V1439E | | | | | |
| 1507/1508 | M320Q/V534I/ | V63Q/L171P/S260T/E306G/M320Q/ | ++ | +++ | ++ | ++ | ++ |
| | G619E/M681N | S332P/F387I/I390A/V393G/V534I/ | | | | | |
| | | G619E/M681N/K732W/L749F/L750D/ | | | | | |
| | | I775G/T1148N/L1248D/L1377D/ | | | | | |
| | | V1439E | | | | | |
| 1509/1510 | L211K/M320Q/ | V63Q/L171P/L211K/S260T/E306G/ | + | ++ | + | + | + |
| | T533R/V536L/ | M320Q/S332P/F387I/I390A/V393G/ | | | | | |
| | G619E | T533R/V536L/G619E/K732W/L749F/ | | | | | |
| | | L750D/I775G/T1148N/L1248D/ | | | | | |
| | | L1377D/V1439E | | | | | |
| 1511/1512 | M558W/P617E/ | V63Q/L171P/S260T/E306G/S332P/ | ++ | ++ | ++ | ++ | ++ |
| | M681N/S839K | F387I/I390A/V393G/M558W/P617E/ | | | | | |
| | | M681N/K732W/L749F/L750D/I775G/ | | | | | |
| | | S839K/T1148N/L1248D/L1377D/ | | | | | |
| | | V1439E | | | | | |
| 1513/1514 | H212A/M320R/ | V63Q/L171P/H212A/S260T/E306G/ | +++ | ++++ | ++ | ++ | + |
| | V534I/M558W/ | M320R/S332P/F387I/I390A/V393G/ | | | | | |
| | M681G | V534I/M558W/M681G/K732W/L749F/ | | | | | |
| | | L750D/I775G/T1148N/L1248D/ | | | | | |
| | | L1377D/V1439E | | | | | |
| 1515/1516 | T533R/V534I/ | V63Q/L171P/S260T/E306G/S332P/ | ++ | ++ | + | ++ | + |
| | M681N/S839K | F387I/I390A/V393G/T533R/V534I/ | | | | | |
| | | M681N/K732W/L749F/L750D/I775G/ | | | | | |
| | | S839K/T1148N/L1248D/L1377D/ | | | | | |
| | | V1439E | | | | | |
| 1517/1518 | H212A/V534I/ | V63Q/L171P/H212A/S260T/E306G/ | +++ | +++ | ++ | +++ | ++ |
| | G619E/M681G | S332P/F387I/I390A/V393G/V534I/ | | | | | |
| | | G619E/M681G/K732W/L749F/L750D/ | | | | | |
| | | I775G/T1148N/L1248D/L1377D/ | | | | | |
| | | V1439E | | | | | |
| 1519/1520 | P617E/G619E/ | V63Q/L171P/S260T/E306G/S332P/ | ++ | ++ | + | ++ | ++ |
| | M681G | F387I/I390A/V393G/P617E/G619E/ | | | | | |
| | | M681G/K732W/L749F/L750D/I775G/ | | | | | |
| | | T1148N/L1248D/L1377D/V1439E | | | | | |
| 1521/1522 | L211Q/H212A/ | V63Q/L171P/L211Q/H212A/S260T/ | +++ | +++ | ++ | ++ | ++ |
| | M320R/M558W/ | E306G/M320R/S332P/F387I/I390A/ | | | | | |
| | P617E/M681N | V393G/M558W/P617E/M681N/K732W/ | | | | | |
| | | L749F/L750D/I775G/T1148N/ | | | | | |
| | | L1248D/L1377D/V1439E | | | | | |
| 1523/1524 | H212A/V534I/ | V63Q/L171P/H212A/S260T/E306G/ | ++ | ++ | ++ | ++ | ++ |
| | M558W/M681N/ | S332P/F387I/I390A/V393G/V534I/ | | | | | |
| | M797W | M558W/M681N/K732W/L749F/L750D/ | | | | | |
| | | I775G/M797W/T1148N/L1248D/ | | | | | |
| | | L1377D/V1439E | | | | | |
| 1525/1526 | H212A/M320R/ | V63Q/L171P/H212A/S260T/E306G/ | +++ | +++ | ++ | ++ | ++ |
| | V534I | M320R/S332P/F387I/I390A/V393G/ | | | | | |
| | | V534I/K732W/L749F/L750D/I775G/ | | | | | |
| | | T1148N/L1248D/L1377D/V1439E | | | | | |
| 1527/1528 | L211K/F312L/ | V63Q/L171P/L211K/S260T/E306G/ | ++ | ++ | + | + | ++ |
| | G619E | F312L/S332P/F387I/I390A/V393G/ | | | | | |
| | | G619E/K732W/L749F/L750D/I775G/ | | | | | |
| | | T1148N/L1248D/L1377D/V1439E | | | | | |
| 1529/1530 | H212A/F312L/ | V63Q/L171P/H212A/S260T/E306G/ | ++ | ++ | ++ | ++ | + |
| | G619E/S839K | F312L/S332P/F387I/I390A/V393G/ | | | | | |
| | | G619E/K732W/L749F/L750D/I775G/ | | | | | |
| | | S839K/T1148N/L1248D/L1377D/ | | | | | |
| | | V1439E | | | | | |
| 1531/1532 | T210P/H212A/ | V63Q/L171P/T210P/H212A/S260T/ | ++ | +++ | ++ | ++ | + |
| | M320R/M558W/ | E306G/M320R/S332P/F387I/I390A/ | | | | | |
| | M681G | V393G/M558W/M681G/K732W/L749F/ | | | | | |
| | | L750D/I775G/T1148N/L1248D/ | | | | | |
| | | L1377D/V1439E | | | | | |
| 1533/1534 | H212A/F312L/ | V63Q/L171P/H212A/S260T/E306G/ | +++ | ++ | ++ | +++ | ++ |
| | V534I/M681N/ | F312L/S332P/F387I/I390A/V393G/ | | | | | |
| | M797W/S839K | V534I/M681N/K732W/L749F/L750D/ | | | | | |
| | | I775G/M797W/S839K/T1148N/ | | | | | |
| | | L1248D/L1377D/V1439E | | | | | |
| 1535/1536 | L211K/M320R/ | V63Q/L171P/L211K/S260T/E306G/ | ++ | ++ | ++ | ++ | ++ |
| | M558W/S839K | M320R/S332P/F387I/I390A/V393G/ | | | | | |
| | | M558W/K732W/L749F/L750D/I775G/ | | | | | |
| | | S839K/T1148N/L1248D/L1377D/ | | | | | |
| | | V1439E | | | | | |
| 1537/1538 | G924Q | V63Q/L171P/S260T/E306G/S332P/ | + | + | ++ | ++ | + |
| | | F387I/I390A/V393G/K732W/L749F/ | | | | | |
| | | L750D/I775G/G924Q/T1148N/L1248D/ | | | | | |
| | | L1377D/V1439E | | | | | |
| 1539/1540 | S916L | V63Q/L171P/S260T/E306G/S332P/ | + | + | + | + | ++ |
| | | F387I/I390A/V393G/K732W/L749F/ | | | | | |
| | | L750D/I775G/S916L/T1148N/L1248D/ | | | | | |
| | | L1377D/V1439E | | | | | |
| 1541/1542 | E757T | V63Q/L171P/S260T/E306G/S332P/ | + | ++ | ++ | + | |
| | | F387I/I390A/V393G/K732W/L749F/ | | | | | |
| | | L750D/E757T/I775G/T1148N/L1248D/ | | | | | |
| | | L1377D/V1439E | | | | | |
| 1543/1544 | Y737K | V63Q/L171P/S260T/E306G/S332P/ | ++ | ++ | ++ | ++ | |
| | | F3871/I390A/V393G/K732W/Y737K/ | | | | | |
| | | L749F/L750D/I775G/T1148N/L1248D/ | | | | | |
| | | L1377D/V1439E | | | | | |
| 1545/1546 | K818V | V63Q/L171P/S260T/E306G/S332P/ | ++ | | ++ | ++ | + |
| | | F3871/I390A/V393G/K732W/L749F/ | | | | | |
| | | L750D/I775G/K818V/T1148N/L1248D/ | | | | | |
| | | L1377D/V1439E | | | | | |
| 1547/1548 | D801G | V63Q/L171P/S260T/E306G/S332P/ | ++ | ++ | ++ | ++ | ++ |
| | | F387I/I390A/V393G/K732W/L749F/ | | | | | |
| | | L750D/I775G/D801G/T1148N/L1248D/ | | | | | |
| | | L1377D/V1439E | | | | | |
| 1549/1550 | T294G | V63Q/L171P/S260T/T294G/E306G/ | ++ | ++ | | + | + |
| | | S332P/F387I/I390A/V393G/K732W/ | | | | | |
| | | L749F/L750D/I775G/T1148N/L1248D/ | | | | | |
| | | L1377D/V1439E | | | | | |
| 1551/1552 | K799S | V63Q/L171P/S260T/E306G/S332P/ | ++ | | ++ | ++ | ++ |
| | | F387I/I390A/V393G/K732W/L749F/ | | | | | |
| | | L750D/I775G/K799S/T1148N/L1248D/ | | | | | |
| | | L1377D/V1439E | | | | | |
| 1553/1554 | K799E | V63Q/L171P/S260T/E306G/S332P/ | + | | + | + | ++ |
| | | F387I/I390A/V393G/K732W/L749F/ | | | | | |
| | | L750D/I775G/K799E/T1148N/L1248D/ | | | | | |
| | | L1377D/V1439E | | | | | |
| 1555/1556 | E809G | V63Q/L171P/S260T/E306G/S332P/ | + | + | + | ++ | + |
| | | F387I/I390A/V393G/K732W/L749F/ | | | | | |
| | | L750D/I775G/E809G/T1148N/L1248D/ | | | | | |
| | | L1377D/V1439E | | | | | |
| 1557/1558 | D791M | V63Q/L171P/S260T/E306G/S332P/ | + | ++ | ++ | + | + |
| | | F387I/I390A/V393G/K732W/L749F/ | | | | | |
| | | L750D/I775G/D791M/T1148N/L1248D/ | | | | | |
| | | L1377D/V1439E | | | | | |
| 1559/1560 | Y737V | V63Q/L171P/S260T/E306G/S332P/ | ++ | ++ | ++ | ++ | + |
| | | F387I/I390A/V393G/K732W/Y737V/ | | | | | |
| | | L749F/L750D/I775G/T1148N/L1248D/ | | | | | |
| | | L1377D/V1439E | | | | | |
| 1561/1562 | Y805Q | V63Q/L171P/S260T/E306G/S332P/ | ++ | +++ | ++ | ++ | + |
| | | F387I/I390A/V393G/K732W/L749F/ | | | | | |
| | | L750D/I775G/Y805Q/T1148N/L1248D/ | | | | | |
| | | L1377D/V1439E | | | | | |
| 1563/1564 | K799Q | V63Q/L171P/S260T/E306G/S332P/ | + | + | + | ++ | + |
| | | F3871/I390A/V393G/K732W/L749F/ | | | | | |
| | | L750D/I775G/K799Q/T1148N/L1248D/ | | | | | |
| | | L1377D/V1439E | | | | | |
| 1565/1566 | Y737S | V63Q/L171P/S260T/E306G/S332P/ | + | ++ | + | + | + |
| | | F3871/I390A/V393G/K732W/Y737S/ | | | | | |
| | | L749F/L750D/I775G/T1148N/L1248D/ | | | | | |
| | | L1377D/V1439E | | | | | |
| 1567/1568 | S916M | V63Q/L171P/S260T/E306G/S332P/ | ++ | + | + | + | ++ |
| | | F387I/I390A/V393G/K732W/L749F/ | | | | | |
| | | L750D/I775G/S916M/T1148N/L1248D/ | | | | | |
| | | L1377D/V1439E | | | | | |
| 1569/1570 | R759S | V63Q/L171P/S260T/E306G/S332P/ | + | | | + | ++ |
| | | F387I/I390A/V393G/K732W/L749F/ | | | | | |
| | | L750D/R759S/I775G/T1148N/L1248D/ | | | | | |
| | | L1377D/V1439E | | | | | |
| 1571/1572 | K799V | V63Q/L171P/S260T/E306G/S332P/ | ++ | + | ++ | ++ | ++ |
| | | F3871/I390A/V393G/K732W/L749F/ | | | | | |
| | | L750D/I775G/K799V/T1148N/L1248D/ | | | | | |
| | | L1377D/V1439E | | | | | |
| 1573/1574 | D538V | V63Q/L171P/S260T/E306G/S332P/ | ++ | + | + | ++ | + |
| | | F387I/I390A/V393G/D538V/K732W/ | | | | | |
| | | L749F/L750D/I775G/T1148N/L1248D/ | | | | | |
| | | L1377D/V1439E | | | | | |
| 1575/1576 | E1109G | V63Q/L171P/S260T/E306G/S332P/ | ++ | ++ | + | + | ++ |
| | | F387I/I390A/V393G/K732W/L749F/ | | | | | |
| | | L750D/I775G/E1109G/T1148N/L1248D/ | | | | | |
| | | L1377D/V1439E | | | | | |
| 1577/1578 | S168R | V63Q/S168R/L171P/S260T/E306G/ | + | ++ | | + | ++ |
| | | S332P/F387I/I390A/V393G/K732W/ | | | | | |
| | | L749F/L750D/I775G/T1148N/L1248D/ | | | | | |
| | | L1377D/V1439E | | | | | |
| 1579/1580 | Q921R | V63Q/L171P/S260T/E306G/S332P/ | ++ | + | ++ | ++ | + |
| | | F3871/I390A/V393G/K732W/L749F/ | | | | | |
| | | L750D/I775G/Q921R/T1148N/L1248D/ | | | | | |
| | | L1377D/V1439E | | | | | |
| 1581/1582 | E926T | V63Q/L171P/S260T/E306G/S332P/ | ++ | | ++ | + | ++ |
| | | F387I/I390A/V393G/K732W/L749F/ | | | | | |
| | | L750D/I775G/E926T/T1148N/L1248D/ | | | | | |
| | | L1377D/V1439E | | | | | |
| 1583/1584 | S916T | V63Q/L171P/S260T/E306G/S332P/ | ++ | +++ | + | + | + |
| | | F387I/I390A/V393G/K732W/L749F/ | | | | | |
| | | L750D/I775G/S916T/T1148N/L1248D/ | | | | | |
| | | L1377D/V1439E | | | | | |
| 1585/1586 | Y737G | V63Q/L171P/S260T/E306G/S332P/ | ++ | + | ++ | + | + |
| | | F387I/I390A/V393G/K732W/Y737G/ | | | | | |
| | | L749F/L750D/I775G/T1148N/L1248D/ | | | | | |
| | | L1377D/V1439E | | | | | |
| 1587/1588 | D801R | V63Q/L171P/S260T/E306G/S332P/ | + | ++ | + | + | + |
| | | F387I/I390A/V393G/K732W/L749F/ | | | | | |
| | | L750D/I775G/D801R/T1148N/L1248D/ | | | | | |
| | | L1377D/V1439E | | | | | |

All activities were determined relative to the reference polypeptide of SEQ ID NO: 1200. Levels of increased activity are defined as follows:
“+” 0.9 to 1.1,
“++” >1.1,
“+++” >2,
“++++” >3.5,
”+++++” >5

### Example 10

### FVIII Variants Derived from SEQ ID NO: 1514

[0360] In this Example, experiments conducted to determine FVIII variant activity by assaying the protein activity after a challenge is described. These variants were tested for FVIII activity after no incubation and after incubation in Hemophilia A patient plasma (George King Bio-Medical, Inc.), as described in Example 3. Variants were tested using the chromogenic and clotting assays, as described in Example 3. Results are shown in Tables 10.1 and 10.2 for variants expressed using Expi293F cells or HepG2 cells.

TABLE 10.1
Activity of FVIII Variants Relative to SEQ ID NO: 1514

| | | | (Expi293F) | (Expi293F) |
|---|---|---|---|---|
| | | | Unchallenged | Chromogenic |
| | | | Chromogenic | Activity after |
| | Amino Acid | | Activity | Plasma |
| | Differences | Amino Acid | FIOPC | Challenge |
| SEQ ID | (Relative to | Differences | Relative to | FIOPC Relative |
| NO: | SEQ ID | (Relative to | SEQ ID NO: | to SEQ ID NO: |
| (nt/aa) | NO: 1514) | SEQ ID NO: 2) | 1514 | 1514 |
| 1513/1514 | | V63Q/L171P/H212A/S260T/E306G/ | + | + |
| | | M320R/S332P/F387I/I390A/V393G/ | | |
| | | V534I/M558W/M681G/K732W/L749F/ | | |
| | | L750D/I775G/T1148N/L1248D/L1377D/ | | |
| | | V1439E | | |
| 1589/1590 | R1042E | V63Q/L171P/H212A/S260T/E306G/ | + | + |
| | | M320R/S332P/F387I/I390A/V393G/ | | |
| | | V534I/M558W/M681G/K732W/L749F/ | | |
| | | L750D/I775G/R1042E/T1148N/L1248D/ | | |
| | | L1377D/V1439E | | |
| 1591/1592 | Y1041N | V63Q/L171P/H212A/S260T/E306G/ | + | + |
| | | M320R/S332P/F387I/I390A/V393G/ | | |
| | | V534I/M558W/M681G/K732W/L749F/ | | |
| | | L750D/I775G/Y1041N/T1148N/L1248D/ | | |
| | | L1377D/V1439E | | |
| 1593/1594 | M1051H | V63Q/L171P/H212A/S260T/E306G/ | + | + |
| | | M320R/S332P/F387I/I390A/V393G/ | | |
| | | V534I/M558W/M681G/K732W/L749F/ | | |
| | | L750D/I775G/M1051H/T1148N/L1248D/ | | |
| | | L1377D/V1439E | | |
| 1595/1596 | I1283H | V63Q/L171P/H212A/S260T/E306G/ | | + |
| | | M320R/S332P/F387I/I390A/V393G/ | | |
| | | V534I/M558W/M681G/K732W/L749F/ | | |
| | | L750D/I775G/T1148N/L1248D/I1283H/ | | |
| | | L1377D/V1439E | | |
| 1597/1598 | I1283T | V63Q/L171P/H212A/S260T/E306G/ | | + |
| | | M320R/S332P/F387I/I390A/V393G/ | | |
| | | V534I/M558W/M681G/K732W/L749F/ | | |
| | | L750D/I775G/T1148N/L1248D/I1283T/ | | |
| | | L1377D/V1439E | | |
| 1599/1600 | Y1281Q | V63Q/L171P/H212A/S260T/E306G/ | | + |
| | | M320R/S332P/F387I/I390A/V393G/ | | |
| | | V534I/M558W/M681G/K732W/L749F/ | | |
| | | L750D/I775G/T1148N/L1248D/Y1281Q/ | | |
| | | L1377D/V1439E | | |
| 1601/1602 | Y1281P | V63Q/L171P/H212A/S260T/E306G/ | + | + |
| | | M320R/S332P/F387I/I390A/V393G/ | | |
| | | V534I/M558W/M681G/K732W/L749F/ | | |
| | | L750D/I775G/T1148N/L1248D/Y1281P/ | | |
| | | L1377D/V1439E | | |
| 1603/1604 | S916E | V63Q/L171P/H212A/S260T/E306G/ | + | + |
| | | M320R/S332P/F387I/I390A/V393G/ | | |
| | | V534I/M558W/M681G/K732W/L749F/ | | |
| | | L750D/I775G/S916E/T1148N/L1248D/ | | |
| | | L1377D/V1439E | | |
| 1605/1606 | M1051W | V63Q/L171P/H212A/S260T/E306G/ | ++ | ++ |
| | | M320R/S332P/F387I/I390A/V393G/ | | |
| | | V534I/M558W/M681G/K732W/L749F/ | | |
| | | L750D/I775G/M1051W/T1148N/L1248D/ | | |
| | | L1377D/V1439E | | |
| 1607/1608 | L187C | V63Q/L171P/L187C/H212A/S260T/ | + | + |
| | | E306G/M320R/S332P/F387I/I390A/ | | |
| | | V393G/V534I/M558W/M681G/K732W/ | | |
| | | 9L74F/L750D/I775G/T1148N/L1248D/ | | |
| | | L1377D/V1439E | | |
| 1609/1610 | I215E | V63Q/L171P/H212A/I215E/S260T/ | | + |
| | | E306G/M320R/S332P/F387I/I390A/ | | |
| | | V393G/V534I/M558W/M681G/K732W/ | | |
| | | L749F/L750D/I775G/T1148N/L1248D/ | | |
| | | L1377D/V1439E | | |
| 1611/1612 | I215P | V63Q/L171P/H212A/I215P/S260T/ | + | + |
| | | E306G/M320R/S332P/F387I/I390A/ | | |
| | | V393G/V534I/M558W/M681G/K732W/ | | |
| | | L749F/L750D/I775G/T1148N/L1248D/ | | |
| | | L1377D/V1439E | | |
| 1613/1614 | I215S | V63Q/L171P/H212A/I215S/S260T/ | | + |
| | | E306G/M320R/S332P/F387I/I390A/ | | |
| | | V393G/V534I/M558W/M681G/K732W/ | | |
| | | L749F/L750D/I775G/T1148N/L1248D/ | | |
| | | L1377D/V1439E | | |
| 1615/1616 | L178C | V63Q/L171P/L178C/H212A/S260T/ | ++ | ++ |
| | | E306G/M320R/S332P/F387I/I390A/ | | |
| | | V393G/V534I/M558W/M681G/K732W/ | | |
| | | L749F/L750D/I775G/T1148N/L1248D/ | | |
| | | L1377D/V1439E | | |
| 1617/1618 | I1050T | V63Q/L171P/H212A/S260T/E306G/ | ++ | + |
| | | 320R/S332P/F387I/I390A/V393G/ | | |
| | | V534I/M558W/M681G/K732W/L749F/ | | |
| | | L750D/I775G/I1050T/T1148N/L1248D/ | | |
| | | L1377D/V1439E | | |
| 1619/1620 | K1210T | V63Q/L171P/H212A/S260T/E306G/ | ++ | + |
| | | 320R/S332P/F387I/I390A/V393G/ | | |
| | | V534I/M558W/M681G/K732W/L749F/ | | |
| | | L750D/I775G/T1148N/K1210T/L1248D/ | | |
| | | L1377D/V1439E | | |
| 1621/1622 | Y1281K | V63Q/L171P/H212A/S260T/E306G/ | ++ | + |
| | | 320R/S332P/F387I/I390A/V393G/ | | |
| | | V534I/M558W/M681G/K732W/L749F/ | | |
| | | L750D/I775G/T1148N/L1248D/Y1281K/ | | |
| | | L1377D/V1439E | | |
| 1623/1624 | R1042A | V63Q/L171P/H212A/S260T/E306G/ | + | + |
| | | 320R/S332P/F387I/I390A/V393G/ | | |
| | | V534I/M558W/M681G/K732W/L749F/ | | |
| | | L750D/I775G/R1042A/T1148N/L1248D/ | | |
| | | L1377D/V1439E | | |
| 1625/1626 | V104S | V63Q/V104S/L171P/H212A/S260T/ | + | + |
| | | E306G/M320R/S332P/F387I/I390A/ | | |
| | | V393G/V534I/M558W/M681G/K732W/ | | |
| | | L749F/L750D/I775G/T1148N/L1248D/ | | |
| | | L1377D/V1439E | | |
| 1627/1628 | P615D | V63Q/L171P/H212A/S260T/E306G/ | + | + |
| | | 320R/S332P/F387I/I390A/V393G/ | | |
| | | V534I/M558W/P615D/M681G/K732W/ | | |
| | | L749F/L750D/I775G/T1148N/L1248D/ | | |
| | | L1377D/V1439E | | |
| 1629/1630 | I610S | V63Q/L171P/H212A/S260T/E306G/ | + | ++ |
| | | 320R/S332P/F387I/I390A/V393G/ | | |
| | | V534I/M558W/I610S/M681G/K732W/ | | |
| | | L749F/L750D/I775G/T1148N/L1248D/ | | |
| | | L1377D/V1439E | | |
| 1631/1632 | I610K | V63Q/L171P/H212A/S260T/E306G/ | | + |
| | | 320R/S332P/F387I/I390A/V393G/ | | |
| | | V534I/M558W/I610K/M681G/K732W/ | | |
| | | L749F/L750D/I775G/T1148N/L1248D/ | | |
| | | L1377D/V1439E | | |
| 1633/1634 | I610T | V63Q/L171P/H212A/S260T/E306G/ | + | ++ |
| | | 320R/S332P/F387I/I390A/V393G/ | | |
| | | V534I/M558W/I610T/M681G/K732W/ | | |
| | | L749F/L750D/I775G/T1148N/L1248D/ | | |
| | | L1377D/V1439E | | |
| 1635/1636 | V536P | V63Q/L171P/H212A/S260T/E306G/ | + | ++ |
| | | 320R/S332P/F387I/I390A/V393G/ | | |
| | | V534I/V536P/M558W/M681G/K732W/ | | |
| | | L749F/L750D/I775G/T1148N/L1248D/ | | |
| | | L1377D/V1439E | | |
| 1637/1638 | A618Y | V63Q/L171P/H212A/S260T/E306G/ | ++ | + |
| | | 320R/S332P/F387I/I390A/V393G/ | | |
| | | V534I/M558W/A618Y/M681G/K732W/ | | |
| | | L749F/L750D/I775G/T1148N/L1248D/ | | |
| | | L1377D/V1439E | | |
| 1639/1640 | Q621W | V63Q/L171P/H212A/S260T/E306G/ | + | + |
| | | 320R/S332P/F387I/I390A/V393G/ | | |
| | | V534I/M558W/Q621W/M681G/K732W/ | | |
| | | L749F/L750D/I775G/T1148N/L1248D/ | | |
| | | L1377D/V1439E | | |
| 1641/1642 | A618P | V63Q/L171P/H212A/S260T/E306G/ | ++ | ++ |
| | | 320R/S332P/F387I/I390A/V393G/ | | |
| | | V534I/M558W/A618P/M681G/K732W/ | | |
| | | L749F/L750D/I775G/T1148N/L1248D/ | | |
| | | L1377D/V1439E | | |
| 1643/1644 | L614F | V63Q/L171P/H212A/S260T/E306G/ | | + |
| | | 320R/S332P/F387I/I390A/V393G/ | | |
| | | V534I/M558W/L614F/M681G/K732W/ | | |
| | | L749F/L750D/I775G/T1148N/L1248D/ | | |
| | | L1377D/V1439E | | |
| 1645/1646 | M110H | V63Q/M110H/L171P/H212A/S260T/ | | + |
| | | E306G/M320R/S332P/F387I/I390A/ | | |
| | | V393G/V534I/M558W/M681G/K732W/ | | |
| | | L749F/L750D/I775G/T1148N/L1248D/ | | |
| | | L1377D/V1439E | | |
| 1647/1648 | R301K | V63Q/L171P/H212A/S260T/R301K/ | | + |
| | | E306G/M320R/S332P/F387I/I390A/ | | |
| | | V393G/V534I/M558W/M681G/K732W/ | | |
| | | L749F/L750D/I775G/T1148N/L1248D/ | | |
| | | L1377D/V1439E | | |

All activities were determined relative to the reference polypoptide of SEQ ID NO: 1514. Levels of increased activity are defined as follows: “+” 0.9 to 1.1, “++” >1.1

TABLE 10.2
Activity of FVIII Variants Relative to SEQ ID NO: 1514

| | | | | | | | | | (HepG2) | |
|---|---|---|---|---|---|---|---|---|---|---|
| | | | | | (Expi293F) | (Expi293F) | | | Chromo | (HepG2) |
| | | | | | Chromogenic | Clotting | | | genic | Clotting |
| | Amino Acid | | (Expi293F) | (Expi293F) | Activity | Activity | (HepG2) | (HepG2) | Activity | Activity |
| | Differences | Amino Acid | Unchallenged | Unchallenged | after | after | Unchallenged | Unchallenged | after | after |
| SEQ ID | (Relative to | Differences | Chromogenic | Clotting | Plasma | Plasma | Chromogenic | Clotting | Plasma | Plasma |
| NO: | SEQ ID | (Relative to | Activity | Activity | Challenge | Challenge | Activity | Activity | Challenge | Challenge |
| (nt/aa) | NO: 1514) | SEQ ID NO: 2) | FIOPC | FIOPC | FIOPC | FIOPC | FIOPC | FIOPC | FIOPC | FIOPC |
| 1513/1514 | | V63Q/L171P/H212A/S260T/E306G/ | + | + | + | + | + | + | + | + |
| | | M320R/S332P/F387I/I390A/V393G/ | | | | | | | | |
| | | V534I/M558W/M681G/K732W/ | | | | | | | | |
| | | L749F/L750D/I775G/T1148N/ | | | | | | | | |
| | | L1248D/L1377D/V1439E | | | | | | | | |
| 1649/1650 | I1078S | V63Q/L171P/H212A/S260T/E306G/ | ++ | + | ++ | ++ | + | + | | |
| | | M320R/S332P/F387I/I390A/V393G/ | | | | | | | | |
| | | V534I/M558W/M681G/K732W/ | | | | | | | | |
| | | L749F/L750D/I775G/I1078S/ | | | | | | | | |
| | | T1148N/L1248D/L1377D/V1439E | | | | | | | | |
| 1651/1652 | S812G | V63Q/L171P/H212A/S260T/E306G/ | ++ | + | ++ | ++ | | + | | |
| | | M320R/S332P/F387I/I390A/V393G/ | | | | | | | | |
| | | V534I/M558W/M681G/K732W/ | | | | | | | | |
| | | L749F/L750D/I775G/S812G/ | | | | | | | | |
| | | T1148N/L1248D/L1377D/V1439E | | | | | | | | |
| 1653/1654 | E786C | V63Q/L171P/H212A/S260T/E306G/ | ++ | + | + | | ++ | ++ | | |
| | | M320R/S332P/F387I/I390A/V393G/ | | | | | | | | |
| | | V534I/M558W/M681G/K732W/ | | | | | | | | |
| | | L749F/L750D/I775G/E786C/ | | | | | | | | |
| | | T1148N/L1248D/L1377D/V1439E | | | | | | | | |
| 1655/1656 | A127V | V63Q/A127V/L171P/H212A/S260T/ | + | + | ++ | ++ | + | + | + | + |
| | | E306G/M320R/S332P/F387I/I390A/ | | | | | | | | |
| | | V393G/V534I/M558W/M681G/ | | | | | | | | |
| | | K732W/L749F/L750D/I775G/ | | | | | | | | |
| | | T1148N/L1248D/L1377D/V1439E | | | | | | | | |
| 1657/1658 | Y175G | V63Q/L171P/Y175G/H212A/S260T/ | | | | | | + | | |
| | | E306G/M320R/S332P/F387I/I390A/ | | | | | | | | |
| | | V393G/V534I/M558W/M681G/ | | | | | | | | |
| | | K732W/L749F/L750D/I775G/ | | | | | | | | |
| | | T1148N/L1248D/L1377D/V1439E | | | | | | | | |
| 1659/1660 | K1093W | V63Q/L171P/H212A/S260T/E306G/ | ++ | ++ | ++ | ++ | + | ++ | + | ++ |
| | | M320R/S332P/F387I/I390A/V393G/ | | | | | | | | |
| | | V534I/M558W/M681G/K732W/ | | | | | | | | |
| | | L749F/L750D/I775G/K1093W/ | | | | | | | | |
| | | T1148N/L1248D/L1377D/V1439E | | | | | | | | |
| 1661/1662 | F1088G | V63Q/L171P/H212A/S260T/E306G/ | ++ | + | ++ | ++ | | ++ | | + |
| | | M320R/S332P/F387I/I390A/V393G/ | | | | | | | | |
| | | V534I/M558W/M681G/K732W/ | | | | | | | | |
| | | L749F/L750D/I775G/F1088G/T1148N/ | | | | | | | | |
| | | L1248D/L1377D/V1439E | | | | | | | | |
| 1663/1664 | K1093T | V63Q/L171P/H212A/S260T/E306G/ | ++ | ++ | + | ++ | ++ | ++ | + | + |
| | | M320R/S332P/F387I/I390A/V393G/ | | | | | | | | |
| | | V534I/M558W/M681G/K732W/ | | | | | | | | |
| | | L749F/L750D/I775G/K1093T/T1148N/ | | | | | | | | |
| | | L1248D/L1377D/V1439E | | | | | | | | |
| 1665/1666 | L650M | V63Q/L171P/H212A/S260T/E306G/ | | + | + | ++ | ++ | ++ | ++ | |
| | | M320R/S332P/F387I/I390A/V393G/ | | | | | | | | |
| | | V534I/M558W/L650M/M681G/ | | | | | | | | |
| | | K732W/L749F/L750D/I775G/T1148N/ | | | | | | | | |
| | | L1248D/L1377D/V1439E | | | | | | | | |
| 1667/1668 | R301M | V63Q/L171P/H212A/S260T/R301M/ | + | + | + | | | | | + |
| | | E306G/M320R/S332P/F387I/I390A/ | | | | | | | | |
| | | V393G/V534I/M558W/M681G/ | | | | | | | | |
| | | K732W/L749F/L750D/I775G/T1148N/ | | | | | | | | |
| | | L1248D/L1377D/V1439E | | | | | | | | |
| 1669/1670 | T535N | V63Q/L171P/H212A/S260T/E306G/ | ++ | + | ++ | ++ | | + | | |
| | | M320R/S332P/F387I/I390A/V393G/ | | | | | | | | |
| | | V534I/T535N/M558W/M681G/ | | | | | | | | |
| | | K732W/L749F/L750D/I775G/T1148N/ | | | | | | | | |
| | | L1248D/L1377D/V1439E | | | | | | | | |
| 1671/1672 | D806R | V63Q/L171P/H212A/S260T/E306G/ | ++ | + | ++ | ++ | ++ | ++ | + | |
| | | M320R/S332P/F387I/I390A/V393G/ | | | | | | | | |
| | | V534I/M558W/M681G/K732W/ | | | | | | | | |
| | | L749F/L750D/I775G/D806R/T1148N/ | | | | | | | | |
| | | L1248D/L1377D/V1439E | | | | | | | | |
| 1673/1674 | Y738E | V63Q/L171P/H212A/S260T/E306G/ | ++ | + | + | + | ++ | ++ | ++ | |
| | | M320R/S332P/F387I/I390A/V393G/ | | | | | | | | |
| | | V534I/M558W/M681G/K732W/ | | | | | | | | |
| | | Y738E/L749F/L750D/I775G/T1148N/ | | | | | | | | |
| | | L1248D/L1377D/V1439E | | | | | | | | |
| 1675/1676 | S700E | V63Q/L171P/H212A/S260T/E306G/ | ++ | ++ | + | ++ | ++ | ++ | ++ | |
| | | M320R/S332P/F387I/I390A/V393G/ | | | | | | | | |
| | | V534I/M558W/M681G/S700E/ | | | | | | | | |
| | | K732W/L749F/L750D/I775G/T1148N/ | | | | | | | | |
| | | L1248D/L1377D/V1439E | | | | | | | | |
| 1677/1678 | E132R | V63Q/E132R/L171P/H212A/S260T/ | | | + | + | ++ | + | ++ | |
| | | E306G/M320R/S332P/F387I/I390A/ | | | | | | | | |
| | | V393G/V534I/M558W/M681G/ | | | | | | | | |
| | | K732W/L749F/L750D/I775G/T1148N/ | | | | | | | | |
| | | L1248D/L1377D/V1439E | | | | | | | | |
| 1679/1680 | E1076G | V63Q/L171P/H212A/S260T/E306G/ | + | + | ++ | ++ | ++ | + | | + |
| | | M320R/S332P/F387I/I390A/V393G/ | | | | | | | | |
| | | V534I/M558W/M681G/K732W/ | | | | | | | | |
| | | L749F/L750D/I775G/E1076G/T1148N/ | | | | | | | | |
| | | L1248D/L1377D/V1439E | | | | | | | | |
| 1681/1682 | S1084L | V63Q/L171P/H212A/S260T/E306G/ | | + | ++ | | | | | + |
| | | M320R/S332P/F387I/I390A/V393G/ | | | | | | | | |
| | | V534I/M558W/M681G/K732W/ | | | | | | | | |
| | | L749F/L750D/I775G/S1084L/T1148N/ | | | | | | | | |
| | | L1248D/L1377D/V1439E | | | | | | | | |
| 1683/1684 | G498A | V63Q/L171P/H212A/S260T/E306G/ | + | + | ++ | | | + | | |
| | | M320R/S332P/F387I/I390A/V393G/ | | | | | | | | |
| | | G498A/V534I/M558W/M681G/ | | | | | | | | |
| | | K732W/L749F/L750D/I775G/T1148N/ | | | | | | | | |
| | | L1248D/L1377D/V1439E | | | | | | | | |
| 1685/1686 | E786L | V63Q/L171P/H212A/S260T/E306G/ | + | + | ++ | ++ | | + | + | + |
| | | M320R/S332P/F387I/I390A/V393G/ | | | | | | | | |
| | | V534I/M558W/M681G/K732W/ | | | | | | | | |
| | | L749F/L750D/I775G/E786L/T1148N/ | | | | | | | | |
| | | L1248D/L1377D/V1439E | | | | | | | | |
| 1687/1688 | Y738F | V63Q/L171P/H212A/S260T/E306G/ | + | | + | + | ++ | | + | |
| | | M320R/S332P/F387I/I390A/V393G/ | | | | | | | | |
| | | V534I/M558W/M681G/K732W/ | | | | | | | | |
| | | Y738F/L749F/L750D/I775G/T1148N/ | | | | | | | | |
| | | L1248D/L1377D/V1439E | | | | | | | | |
| 1689/1690 | T535G | V63Q/L171P/H212A/S260T/E306G/ | ++ | ++ | + | ++ | ++ | + | | ++ |
| | | M320R/S332P/F387I/I390A/V393G/ | | | | | | | | |
| | | V534I/T535G/M558W/M681G/ | | | | | | | | |
| | | K732W/L749F/L750D/I775G/T1148N/ | | | | | | | | |
| | | L1248D/L1377D/V1439E | | | | | | | | |
| 1691/1692 | D806E | V63Q/L171P/H212A/S260T/E306G/ | + | + | + | | + | | | + |
| | | M320R/S332P/F387I/I390A/V393G/ | | | | | | | | |
| | | V534I/M558W/M681G/K732W/ | | | | | | | | |
| | | L749F/L750D/I775G/D806E/T1148N/ | | | | | | | | |
| | | L1248D/L1377D/V1439E | | | | | | | | |
| 1693/1694 | I756G | V63Q/L171P/H212A/S260T/E306G/ | ++ | + | ++ | | ++ | + | + | |
| | | M320R/S332P/F387I/I390A/V393G/ | | | | | | | | |
| | | V534I/M558W/M681G/K732W/ | | | | | | | | |
| | | L749F/L750D/I756G/I775G/T1148N/ | | | | | | | | |
| | | L1248D/L1377D/V1439E | | | | | | | | |
| 1695/1696 | F1108S | V63Q/L171P/H212A/S260T/E306G/ | ++ | + | ++ | ++ | ++ | + | + | + |
| | | M320R/S332P/F387I/I390A/V393G/ | | | | | | | | |
| | | V534I/M558W/M681G/K732W/ | | | | | | | | |
| | | L749F/L750D/I775G/F1108S/T1148N/ | | | | | | | | |
| | | L1248D/L1377D/V1439E | | | | | | | | |
| 1697/1698 | K1093V | V63Q/L171P/H212A/S260T/E306G/ | ++ | ++ | + | ++ | | ++ | | + |
| | | M320R/S332P/F387I/I390A/V393G/ | | | | | | | | |
| | | V534I/M558W/M681G/K732W/ | | | | | | | | |
| | | L749F/L750D/I775G/K1093V/ | | | | | | | | |
| | | T1148N/L1248D/L1377D/V1439E | | | | | | | | |
| 1699/1700 | S746P | V63Q/L171P/H212A/S260T/E306G/ | ++ | | + | + | | | | |
| | | M320R/S332P/F387I/I390A/V393G/ | | | | | | | | |
| | | V534I/M558W/M681G/K732W/ | | | | | | | | |
| | | S746P/L749F/L750D/I775G/T1148N/ | | | | | | | | |
| | | L1248D/L1377D/V1439E | | | | | | | | |
| 1701/1702 | L160E | V63Q/L160E/L171P/H212A/S260T/ | ++ | + | + | + | + | + | + | + |
| | | E306G/M320R/S332P/F387I/I390A/ | | | | | | | | |
| | | V393G/V534I/M558W/M681G/ | | | | | | | | |
| | | K732W/L749F/L750D/I775G/T1148N/ | | | | | | | | |
| | | L1248D/L1377D/V1439E | | | | | | | | |
| 1703/1704 | L160T | V63Q/L160T/L171P/H212A/S260T/ | + | + | + | + | + | + | + | |
| | | E306G/M320R/S332P/F387I/I390A/ | | | | | | | | |
| | | V393G/V534I/M558W/M681G/ | | | | | | | | |
| | | K732W/L749F/L750D/I775G/T1148N/ | | | | | | | | |
| | | L1248D/L1377D/V1439E | | | | | | | | |
| 1705/1706 | L178V | V63Q/L171P/L178V/H212A/S260T/ | + | + | + | ++ | +++ | + | + | + |
| | | E306G/M320R/S332P/F387I/I390A/ | | | | | | | | |
| | | V393G/V534I/M558W/M681G/ | | | | | | | | |
| | | K732W/L749F/L750D/I775G/T1148N/ | | | | | | | | |
| | | L1248D/L1377D/V1439E | | | | | | | | |
| 1707/1708 | S543L | V63Q/L171P/H212A/S260T/E306G/ | + | + | ++ | | +++ | | + | + |
| | | M320R/S332P/F387I/I390A/V393G/ | | | | | | | | |
| | | V534I/S543L/M558W/M681G/ | | | | | | | | |
| | | K732W/L749F/L750D/I775G/T1148N/ | | | | | | | | |
| | | L1248D/L1377D/V1439E | | | | | | | | |
| 1709/1710 | I310G | V63Q/L171P/H212A/S260T/E306G/ | ++ | ++ | ++ | ++ | | + | | |
| | | I310G/M320R/S332P/F387I/I390A/ | | | | | | | | |
| | | V393G/V534I/M558W/M681G/ | | | | | | | | |
| | | K732W/L749F/L750D/I775G/T1148N/ | | | | | | | | |
| | | L1248D/L1377D/V1439E | | | | | | | | |
| 1711/1712 | S700Q | V63Q/L171P/H212A/S260T/E306G/ | ++ | + | ++ | + | ++ | ++ | ++ | |
| | | M320R/S332P/F387I/I390A/V393G/ | | | | | | | | |
| | | V534I/M558W/M681G/S700Q/ | | | | | | | | |
| | | K732W/L749F/L750D/I775G/T1148N/ | | | | | | | | |
| | | L1248D/L1377D/V1439E | | | | | | | | |
| 1713/1714 | K1093A | V63Q/L171P/H212A/S260T/E306G/ | ++ | ++ | +++ | ++ | + | ++ | ++ | |
| | | M320R/S332P/F387I/I390A/V393G/ | | | | | | | | |
| | | V534I/M558W/M681G/K732W/ | | | | | | | | |
| | | L749F/L750D/I775G/K1093A/ | | | | | | | | |
| | | T1148N/L1248D/L1377D/V1439E | | | | | | | | |
| 1715/1716 | Q584A | V63Q/L171P/H212A/S260T/E306G/ | | + | | + | | | | |
| | | M320R/S332P/F387I/I390A/V393G/ | | | | | | | | |
| | | V534I/M558W/Q584A/M681G/ | | | | | | | | |
| | | K732W/L749F/L750D/I775G/T1148N/ | | | | | | | | |
| | | L1248D/L1377D/V1439E | | | | | | | | |
| 1717/1718 | E918S | V63Q/L171P/H212A/S260T/E306G/ | ++ | ++ | +++ | | ++ | ++ | ++ | |
| | | M320R/S332P/F387I/I390A/V393G/ | | | | | | | | |
| | | V534I/M558W/M681G/K732W/ | | | | | | | | |
| | | L749F/L750D/I775G/E918S/T1148N/ | | | | | | | | |
| | | L1248D/L1377D/V1439E | | | | | | | | |
| 1719/1720 | E1452L | V63Q/L171P/H212A/S260T/E306G/ | + | + | + | + | + | + | + | |
| | | M320R/S332P/F387I/I390A/V393G/ | | | | | | | | |
| | | V534I/M558W/M681G/K732W/ | | | | | | | | |
| | | L749F/L750D/I775G/T1148N/L1248D/ | | | | | | | | |
| | | L1377D/V1439E/E1452L | | | | | | | | |
| 1721/1722 | Y738P | V63Q/L171P/H212A/S260T/E306G/ | | | + | | | + | | |
| | | M320R/S332P/F387I/I390A/V393G/ | | | | | | | | |
| | | V534I/M558W/M681G/K732W/ | | | | | | | | |
| | | Y738P/L749F/L750D/I775G/T1148N/ | | | | | | | | |
| | | L1248D/L1377D/V1439E | | | | | | | | |
| 1723/1724 | D790W | V63Q/L171P/H212A/S260T/E306G/ | + | + | ++ | | ++ | + | | |
| | | M320R/S332P/F387I/I390A/V393G/ | | | | | | | | |
| | | V534I/M558W/M681G/K732W/ | | | | | | | | |
| | | L749F/L750D/I775G/D790W/T1148N/ | | | | | | | | |
| | | L1248D/L1377D/V1439E | | | | | | | | |
| 1725/1726 | D790I | V63Q/L171P/H212A/S260T/E306G/ | ++ | + | ++ | + | + | + | | |
| | | M320R/S332P/F387I/I390A/V393G/ | | | | | | | | |
| | | V534I/M558W/M681G/K732W/ | | | | | | | | |
| | | L749F/L750D/I775G/D790I/T1148N/ | | | | | | | | |
| | | L1248D/L1377D/V1439E | | | | | | | | |
| 1727/1728 | G292D | V63Q/L171P/H212A/S260T/G292D/ | + | + | ++ | | ++ | + | + | |
| | | E306G/M320R/S332P/F387I/I390A/ | | | | | | | | |
| | | V393G/V534I/M558W/M681G/ | | | | | | | | |
| | | K732W/L749F/L750D/I775G/T1148N/ | | | | | | | | |
| | | L1248D/L1377D/V1439E | | | | | | | | |
| 1729/1730 | E800M | V63Q/L171P/H212A/S260T/E306G/ | + | + | ++ | | + | + | + | |
| | | M320R/S332P/F387I/I390A/V393G/ | | | | | | | | |
| | | V534I/M558W/M681G/K732W/ | | | | | | | | |
| | | L749F/L750D/I775G/E800M/T1148N/ | | | | | | | | |
| | | L1248D/L1377D/V1439E | | | | | | | | |
| 1731/1732 | F1108M | V63Q/L171P/H212A/S260T/E306G/ | + | + | ++ | ++ | ++ | + | ++ | + |
| | | M320R/S332P/F387I/I390A/V393G/ | | | | | | | | |
| | | V534I/M558W/M681G/K732W/ | | | | | | | | |
| | | L749F/L750D/I775G/F1108M/ | | | | | | | | |
| | | T1148N/L1248D/L1377D/V1439E | | | | | | | | |
| 1733/1734 | F1088S | V63Q/L171P/H212A/S260T/E306G/ | | + | | + | | + | | |
| | | M320R/S332P/F387I/I390A/V393G/ | | | | | | | | |
| | | V534I/M558W/M681G/K732W/ | | | | | | | | |
| | | L749F/L750D/I775G/F1088S/T1148N/ | | | | | | | | |
| | | L1248D/L1377D/V1439E | | | | | | | | |
| 1735/1736 | A167G | V63Q/A167G/L171P/H212A/S260T/ | + | + | + | + | ++ | + | + | + |
| | | E306G/M320R/S332P/F387I/I390A/ | | | | | | | | |
| | | V393G/V534I/M558W/M681G/ | | | | | | | | |
| | | K732W/L749F/L750D/I775G/T1148N/ | | | | | | | | |
| | | L1248D/L1377D/V1439E | | | | | | | | |
| 1737/1738 | V892T | V63Q/L171P/H212A/S260T/E306G/ | | + | + | + | | + | + | + |
| | | M320R/S332P/F387I/I390A/V393G/ | | | | | | | | |
| | | V534I/M558W/M681G/K732W/ | | | | | | | | |
| | | L749F/L750D/I775G/V892T/T1148N/ | | | | | | | | |
| | | L1248D/L1377D/V1439E | | | | | | | | |
| 1739/1740 | D790P | V63Q/L171P/H212A/S260T/E306G/ | ++ | + | ++ | | | + | + | |
| | | M320R/S332P/F387I/I390A/V393G/ | | | | | | | | |
| | | V534I/M558W/M681G/K732W/ | | | | | | | | |
| | | L749F/L750D/I775G/D790P/T1148N/ | | | | | | | | |
| | | L1248D/L1377D/V1439E | | | | | | | | |
| 1741/1742 | E800R | V63Q/L171P/H212A/S260T/E306G/ | + | + | ++ | + | | + | | + |
| | | M320R/S332P/F387I/I390A/V393G/ | | | | | | | | |
| | | V534I/M558W/M681G/K732W/ | | | | | | | | |
| | | L749F/L750D/I775G/E800R/T1148N/ | | | | | | | | |
| | | L1248D/L1377D/V1439E | | | | | | | | |
| 1743/1744 | Y738K | V63Q/L171P/H212A/S260T/E306G/ | ++ | | + | + | +++ | + | + | + |
| | | M320R/S332P/F387I/I390A/V393G/ | | | | | | | | |
| | | V534I/M558W/M681G/K732W/ | | | | | | | | |
| | | Y738K/L749F/L750D/I775G/T1148N/ | | | | | | | | |
| | | L1248D/L1377D/V1439E | | | | | | | | |
| 1745/1746 | S304G | V63Q/L171P/H212A/S260T/S304G/ | + | + | + | ++ | | | | |
| | | E306G/M320R/S332P/F387I/I390A/ | | | | | | | | |
| | | V393G/V534I/M558W/M681G/ | | | | | | | | |
| | | K732W/L749F/L750D/I775G/T1148N/ | | | | | | | | |
| | | L1248D/L1377D/V1439E | | | | | | | | |
| 1747/1748 | S1116G | V63Q/L171P/H212A/S260T/E306G/ | + | + | + | ++ | ++ | + | | |
| | | M320R/S332P/F387I/I390A/V393G/ | | | | | | | | |
| | | V534I/M558W/M681G/K732W/ | | | | | | | | |
| | | L749F/L750D/I775G/S1116G/T1148N/ | | | | | | | | |
| | | L1248D/L1377D/V1439E | | | | | | | | |
| 1749/1750 | L178Q | V63Q/L171P/L178Q/H212A/S260T/ | ++ | + | + | | ++++ | ++ | ++ | ++ |
| | | E306G/M320R/S332P/F387I/I390A/ | | | | | | | | |
| | | V393G/V534I/M558W/M681G/ | | | | | | | | |
| | | K732W/L749F/L750D/I775G/T1148N/ | | | | | | | | |
| | | L1248D/L1377D/V1439E | | | | | | | | |
| 1751/1752 | S1116A | V63Q/L171P/H212A/S260T/E306G/ | + | + | + | + | | + | | |
| | | M320R/S332P/F387I/I390A/V393G/ | | | | | | | | |
| | | V534I/M558W/M681G/K732W/ | | | | | | | | |
| | | L749F/L750D/I775G/S1116A/T1148N/ | | | | | | | | |
| | | L1248D/L1377D/V1439E | | | | | | | | |
| 1753/1754 | K752G | V63Q/L171P/H212A/S260T/E306G/ | + | ++ | ++ | | ++ | ++ | + | + |
| | | M320R/S332P/F387I/I390A/V393G/ | | | | | | | | |
| | | V534I/M558W/M681G/K732W/ | | | | | | | | |
| | | L749F/L750D/K752G/I775G/T1148N/ | | | | | | | | |
| | | L1248D/L1377D/V1439E | | | | | | | | |
| 1755/1756 | F1108W | V63Q/L171P/H212A/S260T/E306G/ | + | + | | + | ++ | + | | |
| | | M320R/S332P/F387I/I390A/V393G/ | | | | | | | | |
| | | V534I/M558W/M681G/K732W/ | | | | | | | | |
| | | L749F/L750D/I775G/F1108W/T1148N/ | | | | | | | | |
| | | L1248D/L1377D/V1439E | | | | | | | | |
| 1757/1758 | Y738D | V63Q/L171P/H212A/S260T/E306G/ | ++ | + | ++ | | + | + | + | ++ |
| | | M320R/S332P/F387I/I390A/V393G/ | | | | | | | | |
| | | V534I/M558W/M681G/K732W/ | | | | | | | | |
| | | Y738D/L749F/L750D/I775G/T1148N/ | | | | | | | | |
| | | L1248D/L1377D/V1439E | | | | | | | | |
| 1759/1760 | T281A | V63Q/L171P/H212A/S260T/T281A/ | | + | | ++ | + | + | + | + |
| | | E306G/M320R/S332P/F387I/I390A/ | | | | | | | | |
| | | V393G/V534I/M558W/M681G/ | | | | | | | | |
| | | K732W/L749F/L750D/I775G/T1148N/ | | | | | | | | |
| | | L1248D/L1377D/V1439E | | | | | | | | |
| 1761/1762 | Y917G | V63Q/L171P/H212A/S260T/E306G/ | + | + | ++ | + | ++ | + | + | + |
| | | M320R/S332P/F387I/I390A/V393G/ | | | | | | | | |
| | | V534I/M558W/M681G/K732W/ | | | | | | | | |
| | | L749F/L750D/I775G/Y917G/T1148N/ | | | | | | | | |
| | | L1248D/L1377D/V1439E | | | | | | | | |
| 1763/1764 | H712M | V63Q/L171P/H212A/S260T/E306G/ | + | + | + | ++ | ++ | + | ++ | |
| | | M320R/S332P/F387I/I390A/V393G/ | | | | | | | | |
| | | V534I/M558W/M681G/H712M/ | | | | | | | | |
| | | K732W/L749F/L750D/I775G/T1148N/ | | | | | | | | |
| | | L1248D/L1377D/V1439E | | | | | | | | |
| 1765/1766 | S1080V | V63Q/L171P/H212A/S260T/E306G/ | ++ | + | + | ++ | + | + | | + |
| | | M320R/S332P/F387I/I390A/V393G/ | | | | | | | | |
| | | V534I/M558W/M681G/K732W/ | | | | | | | | |
| | | L749F/L750D/I775G/S1080V/T1148N/ | | | | | | | | |
| | | L1248D/L1377D/V1439E | | | | | | | | |
| 1767/1768 | D806G/ | V63Q/L171P/H212A/S260T/E306G/ | ++ | + | ++ | ++ | + | | | + |
| | K1352E | M320R/S332P/F387I/I390A/V393G/ | | | | | | | | |
| | | V534I/M558W/M681G/K732W/ | | | | | | | | |
| | | L749F/L750D/I775G/D806G/T1148N/ | | | | | | | | |
| | | L1248D/K1352E/L1377D/ | | | | | | | | |
| | | V1439E | | | | | | | | |
| 1769/1770 | E1095G | V63Q/L171P/H212A/S260T/E306G/ | + | + | | | + | ++ | | + |
| | | M320R/S332P/F387I/I390A/V393G/ | | | | | | | | |
| | | V534I/M558W/M681G/K732W/ | | | | | | | | |
| | | L749F/L750D/I775G/E1095G/T1148N/ | | | | | | | | |
| | | L1248D/L1377D/V1439E | | | | | | | | |
| 1771/1772 | K1093G | V63Q/L171P/H212A/S260T/E306G/ | ++ | ++ | ++ | ++ | ++ | ++ | ++ | ++ |
| | | M320R/S332P/F387I/I390A/V393G/ | | | | | | | | |
| | | V534I/M558W/M681G/K732W/ | | | | | | | | |
| | | L749F/L750D/I775G/K1093G/ | | | | | | | | |
| | | T1148N/L1248D/L1377D/V1439E | | | | | | | | |
| 1773/1774 | D744A | V63Q/L171P/H212A/S260T/E306G/ | ++ | | + | | | | | |
| | | M320R/S332P/F387I/I390A/V393G/ | | | | | | | | |
| | | V534I/M558W/M681G/K732W/ | | | | | | | | |
| | | D744A/L749F/L750D/I775G/T1148N/ | | | | | | | | |
| | | L1248D/L1377D/V1439E | | | | | | | | |
| 1775/1776 | S543G | V63Q/L171P/H212A/S260T/E306G/ | ++ | + | + | ++ | ++ | ++ | | |
| | | M320R/S332P/F387I/I390A/V393G/ | | | | | | | | |
| | | V534I/S543G/M558W/M681G/ | | | | | | | | |
| | | K732W/L749F/L750D/I775G/T1148N/ | | | | | | | | |
| | | L1248D/L1377D/V1439E | | | | | | | | |
| 1777/1778 | M1098G | V63Q/L171P/H212A/S260T/E306G/ | + | + | | | + | + | + | + |
| | | M320R/S332P/F387I/I390A/V393G/ | | | | | | | | |
| | | V534I/M558W/M681G/K732W/ | | | | | | | | |
| | | L749F/L750D/I775G/M1098G/ | | | | | | | | |
| | | T1148N/L1248D/L1377D/V1439E | | | | | | | | |
| 1779/1780 | T281S | V63Q/L171P/H212A/S260T/T281S/E306G/ | ++ | + | + | + | + | + | | |
| | | M320R/S332P/F387I/I390A/ | | | | | | | | |
| | | V393G/V534I/M558W/M681G/K732W/ | | | | | | | | |
| | | L749F/L750D/I775G/T1148N/ | | | | | | | | |
| | | L1248D/L1377D/V1439E | | | | | | | | |
| 1781/1782 | I756T | V63Q/L171P/H212A/S260T/E306G/ | ++ | + | ++ | | ++ | + | + | ++ |
| | | M320R/S332P/F387I/I390A/V393G/ | | | | | | | | |
| | | V534I/M558W/M681G/K732W/ | | | | | | | | |
| | | L749F/L750D/I756T/I775G/T1148N/ | | | | | | | | |
| | | L1248D/L1377D/V1439E | | | | | | | | |
| 1783/1784 | M948S | V63Q/L171P/H212A/S260T/E306G/ | + | + | | | ++ | + | | + |
| | | M320R/S332P/F387I/I390A/V393G/ | | | | | | | | |
| | | V534I/M558W/M681G/K732W/ | | | | | | | | |
| | | L749F/L750D/I775G/M948S/T1148N/ | | | | | | | | |
| | | L1248D/L1377D/V1439E | | | | | | | | |
| 1785/1786 | A119V | V63Q/A119V/L171P/H212A/S260T/ | | + | | | | + | | |
| | | E306G/M320R/S332P/F387I/I390A/ | | | | | | | | |
| | | V393G/V534I/M558W/M681G/K732W/ | | | | | | | | |
| | | L749F/L750D/I775G/T1148N/ | | | | | | | | |
| | | L1248D/L1377D/V1439E | | | | | | | | |
| 1787/1788 | S1116L | V63Q/L171P/H212A/S260T/E306G/ | ++ | + | + | + | + | + | | + |
| | | M320R/S332P/F387I/I390A/V393G/ | | | | | | | | |
| | | V534I/M558W/M681G/K732W/ | | | | | | | | |
| | | L749F/L750D/I775G/S1116L/T1148N/ | | | | | | | | |
| | | L1248D/L1377D/V1439E | | | | | | | | |
| 1789/1790 | E785V | V63Q/L171P/H212A/S260T/E306G/ | ++ | + | + | + | + | + | + | + |
| | | M320R/S332P/F387I/I390A/V393G/ | | | | | | | | |
| | | V534I/M558W/M681G/K732W/ | | | | | | | | |
| | | L749F/L750D/I775G/E785V/T1148N/ | | | | | | | | |
| | | L1248D/L1377D/V1439E | | | | | | | | |
| 1791/1792 | M1113F | V63Q/L171P/H212A/S260T/E306G/ | + | + | + | | | + | | + |
| | | M320R/S332P/F387I/I390A/V393G/ | | | | | | | | |
| | | V534I/M558W/M681G/K732W/ | | | | | | | | |
| | | L749F/L750D/I775G/M1113F/T1148N/ | | | | | | | | |
| | | L1248D/L1377D/V1439E | | | | | | | | |
| 1793/1794 | S700A | V63Q/L171P/H212A/S260T/E306G/ | ++ | + | + | + | | + | | + |
| | | M320R/S332P/F387I/I390A/V393G/ | | | | | | | | |
| | | V534I/M558W/M681G/S700A/ | | | | | | | | |
| | | K732W/L749F/L750D/I775G/T1148N/ | | | | | | | | |
| | | L1248D/L1377D/V1439E | | | | | | | | |
| 1795/1796 | E786D | V63Q/L171P/H212A/S260T/E306G/ | + | + | + | ++ | | + | | + |
| | | M320R/S332P/F387I/I390A/V393G/ | | | | | | | | |
| | | V534I/M558W/M681G/K732W/ | | | | | | | | |
| | | L749F/L750D/I775G/E786D/T1148N/ | | | | | | | | |
| | | L1248D/L1377D/V1439E | | | | | | | | |
| 1797/1798 | Y175A | V63Q/L171P/Y175A/H212A/S260T/ | | + | | + | | | | + |
| | | E306G/M320R/S332P/F387I/I390A/ | | | | | | | | |
| | | V393G/V534I/M558W/M681G/K732W/ | | | | | | | | |
| | | L749F/L750D/I775G/T1148N/ | | | | | | | | |
| | | L1248D/L1377D/V1439E | | | | | | | | |
| 1799/1800 | D790M | V63Q/L171P/H212A/S260T/E306G/ | ++ | + | ++ | | + | + | + | + |
| | | M320R/S332P/F387I/I390A/V393G/ | | | | | | | | |
| | | V534I/M558W/M681G/K732W/ | | | | | | | | |
| | | L749F/L750D/I775G/D790M/T1148N/ | | | | | | | | |
| | | L1248D/L1377D/V1439E | | | | | | | | |
| 1801/1802 | F667I | V63Q/L171P/H212A/S260T/E306G/ | + | + | + | + | + | + | + | + |
| | | M320R/S332P/F387I/I390A/V393G/ | | | | | | | | |
| | | V534I/M558W/F667I/M681G/K732W/ | | | | | | | | |
| | | L749F/L750D/I775G/T1148N/ | | | | | | | | |
| | | L1248D/L1377D/V1439E | | | | | | | | |
| 1803/1804 | Q158G | V63Q/Q158G/L171P/H212A/S260T/ | + | + | | ++ | | + | | |
| | | E306G/M320R/S332P/F387I/I390A/ | | | | | | | | |
| | | V393G/V534I/M558W/M681G/K732W/ | | | | | | | | |
| | | L749F/L750D/I775G/T1148N/ | | | | | | | | |
| | | L1248D/L1377D/V1439E | | | | | | | | |
| 1805/1806 | Q580S | V63Q/L171P/H212A/S260T/E306G/ | ++ | + | + | ++ | + | + | + | + |
| | | M320R/S332P/F387I/I390A/V393G/ | | | | | | | | |
| | | V534I/M558W/Q580S/M681G/ | | | | | | | | |
| | | K732W/L749F/L750D/I775G/T1148N/ | | | | | | | | |
| | | L1248D/L1377D/V1439E | | | | | | | | |
| 1807/1808 | W707H | V63Q/L171P/H212A/S260T/E306G/ | ++ | + | + | | | + | | + |
| | | M320R/S332P/F387I/I390A/V393G/ | | | | | | | | |
| | | V534I/M558W/M681G/W707H/ | | | | | | | | |
| | | K732W/L749F/L750D/I775G/T1148N/ | | | | | | | | |
| | | L1248D/L1377D/V1439E | | | | | | | | |
| 1809/1810 | D731I | V63Q/L171P/H212A/S260T/E306G/ | + | + | | | | + | | |
| | | M320R/S332P/F387I/I390A/V393G/ | | | | | | | | |
| | | V534I/M558W/M681G/D731I/ | | | | | | | | |
| | | K732W/L749F/L750D/I775G/T1148N/ | | | | | | | | |
| | | L1248D/L1377D/V1439E | | | | | | | | |
| 1811/1812 | E918M | V63Q/L171P/H212A/S260T/E306G/ | ++ | + | | + | | + | | + |
| | | M320R/S332P/F387I/I390A/V393G/ | | | | | | | | |
| | | V534I/M558W/M681G/K732W/ | | | | | | | | |
| | | L749F/L750D/I775G/E918M/T1148N/ | | | | | | | | |
| | | L1248D/L1377D/V1439E | | | | | | | | |
| 1813/1814 | L1100S | V63Q/L171P/H212A/S260T/E306G/ | ++ | + | | + | + | + | + | + |
| | | M320R/S332P/F387I/I390A/V393G/ | | | | | | | | |
| | | V534I/M558W/M681G/K732W/ | | | | | | | | |
| | | L749F/L750D/I775G/L1100S/T1148N/ | | | | | | | | |
| | | L1248D/L1377D/V1439E | | | | | | | | |
| 1815/1816 | T1089S | V63Q/L171P/H212A/S260T/E306G/ | + | + | | + | + | + | + | |
| | | M320R/S332P/F387I/I390A/V393G/ | | | | | | | | |
| | | V534I/M558W/M681G/K732W/ | | | | | | | | |
| | | L749F/L750D/I775G/T1089S/T1148N/ | | | | | | | | |
| | | L1248D/L1377D/V1439E | | | | | | | | |
| 1817/1818 | H712Y | V63Q/L171P/H212A/S260T/E306G/ | + | + | + | + | + | + | + | + |
| | | M320R/S332P/F387I/I390A/V393G/ | | | | | | | | |
| | | V534I/M558W/M681G/H712Y/ | | | | | | | | |
| | | K732W/L749F/L750D/I775G/T1148N/ | | | | | | | | |
| | | L1248D/L1377D/V1439E | | | | | | | | |
| 1819/1820 | Y175H | V63Q/L171P/Y175H/H212A/S260T/ | + | + | + | | + | + | | |
| | | E306G/M320R/S332P/F387I/I390A/ | | | | | | | | |
| | | V393G/V534I/M558W/M681G/K732W/ | | | | | | | | |
| | | L749F/L750D/I775G/T1148N/ | | | | | | | | |
| | | L1248D/L1377D/V1439E | | | | | | | | |
| 1821/1822 | K1092G | V63Q/L171P/H212A/S260T/E306G/ | | + | ++ | | | + | | + |
| | | M320R/S332P/F387I/I390A/V393G/ | | | | | | | | |
| | | V534I/M558W/M681G/K732W/ | | | | | | | | |
| | | L749F/L750D/I775G/K1092G/T1148N/ | | | | | | | | |
| | | L1248D/L1377D/V1439E | | | | | | | | |
| 1823/1824 | T939E | V63Q/L171P/H212A/S260T/E306G/ | | | + | | | | | |
| | | M320R/S332P/F387I/I390A/V393G/ | | | | | | | | |
| | | V534I/M558W/M681G/K732W/ | | | | | | | | |
| | | L749F/L750D/I775G/T939E/T1148N/ | | | | | | | | |
| | | L1248D/L1377D/V1439E | | | | | | | | |
| 1825/1826 | Y1104E | V63Q/L171P/H212A/S260T/E306G/ | + | + | + | | | + | | |
| | | M320R/S332P/F387I/I390A/V393G/ | | | | | | | | |
| | | V534I/M558W/M681G/K732W/ | | | | | | | | |
| | | L749F/L750D/I775G/Y1104E/T1148N/ | | | | | | | | |
| | | L1248D/L1377D/V1439E | | | | | | | | |
| 1827/1828 | E800G | V63Q/L171P/H212A/S260T/E306G/ | ++ | + | ++ | ++ | + | + | + | + |
| | | M320R/S332P/F387I/I390A/V393G/ | | | | | | | | |
| | | V534I/M558W/M681G/K732W/ | | | | | | | | |
| | | L749F/L750D/I775G/E800G/T1148N/ | | | | | | | | |
| | | L1248D/L1377D/V1439E | | | | | | | | |
| 1829/1830 | D736F | V63Q/L171P/H212A/S260T/E306G/ | + | + | ++ | | + | | | |
| | | M320R/S332P/F387I/I390A/V393G/ | | | | | | | | |
| | | V534I/M558W/M681G/K732W/ | | | | | | | | |
| | | D736F/L749F/L750D/I775G/T1148N/ | | | | | | | | |
| | | L1248D/L1377D/V1439E | | | | | | | | |
| 1831/1832 | S543W | V63Q/L171P/H212A/S260T/E306G/ | | + | + | | ++ | + | + | |
| | | M320R/S332P/F387I/I390A/V393G/ | | | | | | | | |
| | | V534I/S543W/M558W/M681G/ | | | | | | | | |
| | | K732W/L749F/L750D/I775G/T1148N/ | | | | | | | | |
| | | L1248D/L1377D/V1439E | | | | | | | | |
| 1833/1834 | N1297A | V63Q/L171P/H212A/S260T/E306G/ | ++ | + | + | | ++ | ++ | + | ++ |
| | | M320R/S332P/F387I/I390A/V393G/ | | | | | | | | |
| | | V534I/M558W/M681G/K732W/ | | | | | | | | |
| | | L749F/L750D/I775G/T1148N/L1248D/ | | | | | | | | |
| | | N1297A/L1377D/V1439E | | | | | | | | |
| 1835/1836 | H712L | V63Q/L171P/H212A/S260T/E306G/ | + | + | + | | + | + | + | + |
| | | M320R/S332P/F387I/I390A/V393G/ | | | | | | | | |
| | | V534I/M558W/M681G/H712L/ | | | | | | | | |
| | | K732W/L749F/L750D/I775G/T1148N/ | | | | | | | | |
| | | L1248D/L1377D/V1439E | | | | | | | | |
| 1837/1838 | I1127V | V63Q/L171P/H212A/S260T/E306G/ | ++ | + | ++ | | | + | + | |
| | | M320R/S332P/F387I/I390A/V393G/ | | | | | | | | |
| | | V534I/M558W/M681G/K732W/ | | | | | | | | |
| | | L749F/L750D/I775G/I1127V/T1148N/ | | | | | | | | |
| | | L1248D/L1377D/V1439E | | | | | | | | |
| 1839/1840 | T939S | V63Q/L171P/H212A/S260T/E306G/ | + | + | + | + | + | + | + | + |
| | | M320R/S332P/F387I/I390A/V393G/ | | | | | | | | |
| | | V534I/M558W/M681G/K732W/ | | | | | | | | |
| | | L749F/L750D/I775G/T939S/T1148N/ | | | | | | | | |
| | | L1248D/L1377D/V1439E | | | | | | | | |
| 1841/1842 | L178M | V63Q/L171P/L178M/H212A/S260T/ | + | + | ++ | + | ++ | | ++ | |
| | | E306G/M320R/S332P/F387I/I390A/ | | | | | | | | |
| | | V393G/V534I/M558W/M681G/K732W/ | | | | | | | | |
| | | L749F/L750D/I775G/T1148N/ | | | | | | | | |
| | | L1248D/L1377D/V1439E | | | | | | | | |
| 1843/1844 | D731R | V63Q/L171P/H212A/S260T/E306G/ | ++ | + | + | | | + | | + |
| | | M320R/S332P/F387I/I390A/V393G/ | | | | | | | | |
| | | V534I/M558W/M681G/D731R/ | | | | | | | | |
| | | K732W/L749F/L750D/I775G/T1148N/ | | | | | | | | |
| | | L1248D/L1377D/V1439E | | | | | | | | |
| 1845/1846 | T686W | V63Q/L171P/H212A/S260T/E306G/ | + | + | | + | ++ | + | | |
| | | M320R/S332P/F387I/I390A/V393G/ | | | | | | | | |
| | | V534I/M558W/M681G/T686W/ | | | | | | | | |
| | | K732W/L749F/L750D/I775G/T1148N/ | | | | | | | | |
| | | L1248D/L1377D/V1439E | | | | | | | | |
| 1847/1848 | S543P | V63Q/L171P/H212A/S260T/E306G/ | ++ | + | + | ++ | +++ | ++ | ++ | ++ |
| | | M320R/S332P/F387I/I390A/V393G/ | | | | | | | | |
| | | V534I/S543P/M558W/M681G/ | | | | | | | | |
| | | K732W/L749F/L750D/I775G/T1148N/ | | | | | | | | |
| | | L1248D/L1377D/V1439E | | | | | | | | |
| 1849/1850 | D736G | V63Q/L171P/H212A/S260T/E306G/ | + | | + | | | | | |
| | | M320R/S332P/F387I/I390A/V393G/ | | | | | | | | |
| | | V534I/M558W/M681G/K732W/ | | | | | | | | |
| | | D736G/L749F/L750D/I775G/T1148N/ | | | | | | | | |
| | | L1248D/L1377D/V1439E | | | | | | | | |
| 1851/1852 | E1129P | V63Q/L171P/H212A/S260T/E306G/ | + | + | ++ | ++ | + | + | + | + |
| | | M320R/S332P/F387I/I390A/V393G/ | | | | | | | | |
| | | V534I/M558W/M681G/K732W/ | | | | | | | | |
| | | L749F/L750D/I775G/T1148N/E1129P/ | | | | | | | | |
| | | L1248D/L1377D/V1439E | | | | | | | | |
| 1853/1854 | L1138Q | V63Q/L171P/H212A/S260T/E306G/ | + | + | + | | + | + | | + |
| | | M320R/S332P/F387I/I390A/V393G/ | | | | | | | | |
| | | V534I/M558W/M681G/K732W/ | | | | | | | | |
| | | L749F/L750D/I775G/L1138Q/T1148N/ | | | | | | | | |
| | | L1248D/L1377D/V1439E | | | | | | | | |
| 1855/1856 | S812V | V63Q/L171P/H212A/S260T/E306G/ | ++ | + | | ++ | | + | + | ++ |
| | | M320R/S332P/F387I/I390A/V393G/ | | | | | | | | |
| | | V534I/M558W/M681G/K732W/ | | | | | | | | |
| | | L749F/L750D/I775G/S812V/T1148N/ | | | | | | | | |
| | | L1248D/L1377D/V1439E | | | | | | | | |
| 1857/1858 | E786D/ | V63Q/L171P/H212A/S260T/E306G/ | + | + | | + | | + | | + |
| | R821Q | M320R/S332P/F387I/I390A/V393G/ | | | | | | | | |
| | | V534I/M558W/M681G/K732W/ | | | | | | | | |
| | | L749F/L750D/I775G/E786D/R821Q/ | | | | | | | | |
| | | T1148N/L1248D/L1377D/V1439E | | | | | | | | |
| 1859/1860 | T535C | V63Q/L171P/H212A/S260T/E306G/ | | + | | | | + | | + |
| | | M320R/S332P/F387I/I390A/V393G/ | | | | | | | | |
| | | V534I/T535C/M558W/M681G/ | | | | | | | | |
| | | K732W/L749F/L750D/I775G/T1148N/ | | | | | | | | |
| | | L1248D/L1377D/V1439E | | | | | | | | |
| 1861/1862 | K680R | V63Q/L171P/H212A/S260T/E306G/ | + | + | + | ++ | | + | + | |
| | | M320R/S332P/F387I/I390A/V393G/ | | | | | | | | |
| | | V534I/M558W/K680R/M681G/ | | | | | | | | |
| | | K732W/L749F/L750D/I775G/T1148N/ | | | | | | | | |
| | | L1248D/L1377D/V1439E | | | | | | | | |
| 1863/1864 | S1116I | V63Q/L171P/H212A/S260T/E306G/ | + | + | + | + | ++ | ++ | ++ | |
| | | M320R/S332P/F387I/I390A/V393G/ | | | | | | | | |
| | | V534I/M558W/M681G/K732W/ | | | | | | | | |
| | | L749F/L750D/I775G/S1116I/T1148N/ | | | | | | | | |
| | | L1248D/L1377D/V1439E | | | | | | | | |
| 1865/1866 | T1089F | V63Q/L171P/H212A/S260T/E306G/ | + | + | + | + | | + | | + |
| | | M320R/S332P/F387I/I390A/V393G/ | | | | | | | | |
| | | V534I/M558W/M681G/K732W/ | | | | | | | | |
| | | L749F/L750D/I775G/T1089F/T1148N/ | | | | | | | | |
| | | L1248D/L1377D/V1439E | | | | | | | | |
| 1867/1868 | S304E | V63Q/L171P/H212A/S260T/S304E/ | ++ | + | ++ | + | | + | + | + |
| | | E306G/M320R/S332P/F3871/I390A/ | | | | | | | | |
| | | V393G/V534I/M558W/M681G/K732W/ | | | | | | | | |
| | | L749F/L750D/I775G/T1148N/ | | | | | | | | |
| | | L1248D/L1377D/V1439E | | | | | | | | |
| 1869/1870 | L178W | V63Q/L171P/L178W/H212A/S260T/ | + | + | | | | | | |
| | | E306G/M320R/S332P/F387I/I390A/ | | | | | | | | |
| | | V393G/V534I/M558W/M681G/K732W/ | | | | | | | | |
| | | L749F/L750D/I775G/T1148N/ | | | | | | | | |
| | | L1248D/L1377D/V1439E | | | | | | | | |
| 1871/1872 | Y1104C | V63Q/L171P/H212A/S260T/E306G/ | | | | | | + | | + |
| | | M320R/S332P/F387I/I390A/V393G/ | | | | | | | | |
| | | V534I/M558W/M681G/K732W/ | | | | | | | | |
| | | L749F/L750D/I775G/Y1104C/T1148N/ | | | | | | | | |
| | | L1248D/L1377D/V1439E | | | | | | | | |
| 1873/1874 | D744R | V63Q/L171P/H212A/S260T/E306G/ | + | | ++ | | + | | | |
| | | M320R/S332P/F387I/I390A/V393G/ | | | | | | | | |
| | | V534I/M558W/M681G/K732W/ | | | | | | | | |
| | | D744R/L749F/L750D/I775G/T1148N/ | | | | | | | | |
| | | L1248D/L1377D/V1439E | | | | | | | | |
| 1875/1876 | Y738R | V63Q/L171P/H212A/S260T/E306G/ | | | + | | ++ | | | |
| | | M320R/S332P/F387I/I390A/V393G/ | | | | | | | | |
| | | V534I/M558W/M681G/K732W/ | | | | | | | | |
| | | Y738R/L749F/L750D/I775G/T1148N/ | | | | | | | | |
| | | L1248D/L1377D/V1439E | | | | | | | | |
| 1877/1878 | K1093S | V63Q/L171P/H212A/S260T/E306G/ | ++ | ++ | ++ | ++ | + | ++ | ++ | + |
| | | M320R/S332P/F387I/I390A/V393G/ | | | | | | | | |
| | | V534I/M558W/M681G/K732W/ | | | | | | | | |
| | | L749F/L750D/I775G/K1093S/T1148N/ | | | | | | | | |
| | | L1248D/L1377D/V1439E | | | | | | | | |
| 1879/1880 | H712S | V63Q/L171P/H212A/S260T/E306G/ | ++ | + | ++ | ++ | | + | + | + |
| | | M320R/S332P/F387I/I390A/V393G/ | | | | | | | | |
| | | V534I/M558W/M681G/H712S/ | | | | | | | | |
| | | K732W/L749F/L750D/I775G/T1148N/ | | | | | | | | |
| | | L1248D/L1377D/V1439E | | | | | | | | |
| 1881/1882 | L187G | V63Q/L171P/L187G/H212A/S260T/ | | + | ++ | | | + | | |
| | | E306G/M320R/S332P/F387I/I390A/ | | | | | | | | |
| | | V393G/V534I/M558W/M681G/K732W/ | | | | | | | | |
| | | L749F/L750D/I775G/T1148N/ | | | | | | | | |
| | | L1248D/L1377D/V1439E | | | | | | | | |
| 1883/1884 | E132P | V63Q/L171P/H212A/S260T/E306G/ | + | | | + | ++ | | | |
| | | E132P/M320R/S332P/F387I/I390A/ | | | | | | | | |
| | | V393G/V534I/M558W/M681G/K732W/ | | | | | | | | |
| | | L749F/L750D/I775G/T1148N/ | | | | | | | | |
| | | L1248D/L1377D/V1439E | | | | | | | | |
| 1885/1886 | S812I | V63Q/L171P/H212A/S260T/E306G/ | + | + | ++ | | | | | |
| | | M320R/S332P/F387I/I390A/V393G/ | | | | | | | | |
| | | V534I/M558W/M681G/K732W/ | | | | | | | | |
| | | L749F/L750D/I775G/S812I/T1148N/ | | | | | | | | |
| | | L1248D/L1377D/V1439E | | | | | | | | |
| 1887/1888 | S1080G | V63Q/L171P/H212A/S260T/E306G/ | ++ | + | ++ | | + | + | + | |
| | | M320R/S332P/F387I/I390A/V393G/ | | | | | | | | |
| | | V534I/M558W/M681G/K732W/ | | | | | | | | |
| | | L749F/L750D/I775G/S1080G/T1148N/ | | | | | | | | |
| | | L1248D/L1377D/V1439E | | | | | | | | |
| 1889/1890 | E800C | V63Q/L171P/H212A/S260T/E306G/ | + | + | | ++ | | + | | + |
| | | M320R/S332P/F387I/I390A/V393G/ | | | | | | | | |
| | | V534I/M558W/M681G/K732W/ | | | | | | | | |
| | | L749F/L750D/I775G/E800C/T1148N/ | | | | | | | | |
| | | L1248D/L1377D/V1439E | | | | | | | | |
| 1891/1892 | Y1101G | V63Q/L171P/H212A/S260T/E306G/ | ++ | ++ | ++ | | + | ++ | + | |
| | | M320R/S332P/F387I/I390A/V393G/ | | | | | | | | |
| | | V534I/M558W/M681G/K732W/ | | | | | | | | |
| | | L749F/L750D/I775G/Y1101G/T1148N/ | | | | | | | | |
| | | L1248D/L1377D/V1439E | | | | | | | | |
| 1893/1894 | D808K | V63Q/L171P/H212A/S260T/E306G/ | + | ++ | + | ++ | + | + | | ++ |
| | | M320R/S332P/F387I/I390A/V393G/ | | | | | | | | |
| | | V534I/M558W/M681G/K732W/ | | | | | | | | |
| | | L749F/L750D/I775G/D808K/T1148N/ | | | | | | | | |
| | | L1248D/L1377D/V1439E | | | | | | | | |
| 1895/1896 | D808S | V63Q/L171P/H212A/S260T/E306G/ | ++ | + | ++ | + | + | + | + | + |
| | | M320R/S332P/F387I/I390A/V393G/ | | | | | | | | |
| | | V534I/M558W/M681G/K732W/ | | | | | | | | |
| | | L749F/L750D/I775G/D808S/T1148N/ | | | | | | | | |
| | | L1248D/L1377D/V1439E | | | | | | | | |
| 1897/1898 | D790A | V63Q/L171P/H212A/S260T/E306G/ | ++ | + | | | | + | | + |
| | | M320R/S332P/F387I/I390A/V393G/ | | | | | | | | |
| | | V534I/M558W/M681G/K732W/ | | | | | | | | |
| | | L749F/L750D/I775G/D790A/T1148N/ | | | | | | | | |
| | | L1248D/L1377D/V1439E | | | | | | | | |
| 1899/1900 | E800V | V63Q/L171P/H212A/S260T/E306G/ | ++ | + | ++ | +++ | ++ | ++ | ++ | + |
| | | M320R/S332P/F387I/I390A/V393G/ | | | | | | | | |
| | | V534I/M558W/M681G/K732W/ | | | | | | | | |
| | | L749F/L750D/I775G/E800V/T1148N/ | | | | | | | | |
| | | L1248D/L1377D/V1439E | | | | | | | | |
| 1901/1902 | K680L | V63Q/L171P/H212A/S260T/E306G/ | + | + | + | | | + | | ++ |
| | | M320R/S332P/F387I/I390A/V393G/ | | | | | | | | |
| | | V534I/M558W/K680L/M681G/ | | | | | | | | |
| | | K732W/L749F/L750D/I775G/T1148N/ | | | | | | | | |
| | | L1248D/L1377D/V1439E | | | | | | | | |
| 1903/1904 | A167R | V63Q/A167R/L171P/H212A/S260T/ | ++ | + | + | ++ | + | + | + | + |
| | | E306G/M320R/S332P/F387I/I390A/ | | | | | | | | |
| | | V393G/V534I/M558W/M681G/K732W/ | | | | | | | | |
| | | L749F/L750D/I775G/T1148N/ | | | | | | | | |
| | | L1248D/L1377D/V1439E | | | | | | | | |
| 1905/1906 | K752E | V63Q/L171P/H212A/S260T/E306G/ | ++ | ++ | ++ | ++ | + | ++ | ++ | |
| | | M320R/S332P/F387I/I390A/V393G/ | | | | | | | | |
| | | V534I/M558W/M681G/K732W/ | | | | | | | | |
| | | L749F/L750D/K752E/I775G/T1148N/ | | | | | | | | |
| | | L1248D/L1377D/V1439E | | | | | | | | |
| 1907/1908 | K1093N | V63Q/L171P/H212A/S260T/E306G/ | + | ++ | + | ++ | | ++ | + | + |
| | | M320R/S332P/F387I/I390A/V393G/ | | | | | | | | |
| | | V534I/M558W/M681G/K732W/ | | | | | | | | |
| | | L749F/L750D/I775G/K1093N/T1148N/ | | | | | | | | |
| | | L1248D/L1377D/V1439E | | | | | | | | |
| 1909/1910 | A119G | V63Q/A119G/L171P/H212A/S260T/ | ++ | + | ++ | | ++ | ++ | + | |
| | | E306G/M320R/S332P/F387I/I390A/ | | | | | | | | |
| | | V393G/V534I/M558W/M681G/K732W/ | | | | | | | | |
| | | L749F/L750D/I775G/T1148N/ | | | | | | | | |
| | | L1248D/L1377D/V1439E | | | | | | | | |
| 1911/1912 | E739G | V63Q/L171P/H212A/S260T/E306G/ | ++ | + | ++ | ++ | ++++ | + | ++ | ++ |
| | | M320R/S332P/F387I/I390A/V393G/ | | | | | | | | |
| | | V534I/M558W/M681G/K732W/ | | | | | | | | |
| | | E739G/L749F/L750D/I775G/T1148N/ | | | | | | | | |
| | | L1248D/L1377D/V1439E | | | | | | | | |
| 1913/1914 | S1116R | V63Q/L171P/H212A/S260T/E306G/ | + | + | ++ | + | + | + | + | + |
| | | M320R/S332P/F387I/I390A/V393G/ | | | | | | | | |
| | | V534I/M558W/M681G/K732W/ | | | | | | | | |
| | | L749F/L750D/I775G/S1116R/T1148N/ | | | | | | | | |
| | | L1248D/L1377D/V1439E | | | | | | | | |
| 1915/1916 | Q580Y | V63Q/L171P/H212A/S260T/E306G/ | + | + | ++ | ++ | | + | | + |
| | | M320R/S332P/F387I/I390A/V393G/ | | | | | | | | |
| | | V534I/M558W/Q580Y/M681G/ | | | | | | | | |
| | | K732W/L749F/L750D/I775G/T1148N/ | | | | | | | | |
| | | L1248D/L1377D/V1439E | | | | | | | | |
| 1917/1918 | S304A | V63Q/L171P/H212A/S260T/S304A/ | + | + | + | | ++ | ++ | + | |
| | | E306G/M320R/S332P/F387I/I390A/ | | | | | | | | |
| | | V393G/V534I/M558W/M681G/ | | | | | | | | |
| | | K732W/L749F/L750D/I775G/T1148N/ | | | | | | | | |
| | | L1248D/L1377D/V1439E | | | | | | | | |
| 1919/1920 | H712Q | V63Q/L171P/H212A/S260T/E306G/ | ++ | + | + | | ++ | ++ | ++ | |
| | | M320R/S332P/F387I/I390A/V393G/ | | | | | | | | |
| | | V534I/M558W/M681G/H712Q/ | | | | | | | | |
| | | K732W/L749F/L750D/I775G/T1148N/ | | | | | | | | |
| | | L1248D/L1377D/V1439E | | | | | | | | |
| 1921/1922 | D806S | V63Q/L171P/H212A/S260T/E306G/ | + | + | ++ | ++ | + | + | | |
| | | M320R/S332P/F387I/I390A/V393G/ | | | | | | | | |
| | | V534I/M558W/M681G/K732W/ | | | | | | | | |
| | | L749F/L750D/I775G/D806S/T1148N/ | | | | | | | | |
| | | L1248D/L1377D/V1439E | | | | | | | | |
| 1923/1924 | H712G | V63Q/L171P/H212A/S260T/E306G/ | + | + | + | + | + | ++ | + | |
| | | M320R/S332P/F387I/I390A/V393G/ | | | | | | | | |
| | | V534I/M558W/M681G/H712G/ | | | | | | | | |
| | | K732W/L749F/L750D/I775G/T1148N/ | | | | | | | | |
| | | L1248D/L1377D/V1439E | | | | | | | | |
| 1925/1926 | D790G | V63Q/L171P/H212A/S260T/E306G/ | + | + | + | + | | + | | |
| | | M320R/S332P/F387I/I390A/V393G/ | | | | | | | | |
| | | V534I/M558W/M681G/K732W/ | | | | | | | | |
| | | L749F/L750D/I775G/D790G/T1148N/ | | | | | | | | |
| | | L1248D/L1377D/V1439E | | | | | | | | |
| 1927/1928 | F1108V | V63Q/L171P/H212A/S260T/E306G/ | + | + | + | ++ | | + | + | ++ |
| | | M320R/S332P/F387I/I390A/V393G/ | | | | | | | | |
| | | V534I/M558W/M681G/K732W/ | | | | | | | | |
| | | L749F/L750D/I775G/F1108V/T1148N/ | | | | | | | | |
| | | L1248D/L1377D/V1439E | | | | | | | | |
| 1929/1930 | D731L | V63Q/L171P/H212A/S260T/E306G/ | + | + | + | ++ | ++ | + | + | + |
| | | M320R/S332P/F387I/I390A/V393G/ | | | | | | | | |
| | | V534I/M558W/M681G/D731L/ | | | | | | | | |
| | | K732W/L749F/L750D/I775G/T1148N/ | | | | | | | | |
| | | L1248D/L1377D/V1439E | | | | | | | | |
| 1931/1932 | S1084N | V63Q/L171P/H212A/S260T/E306G/ | ++ | + | | ++ | + | + | | + |
| | | M320R/S332P/F387I/I390A/V393G/ | | | | | | | | |
| | | V534I/M558W/M681G/K732W/ | | | | | | | | |
| | | L749F/L750D/I775G/S1084N/T1148N/ | | | | | | | | |
| | | L1248D/L1377D/V1439E | | | | | | | | |
| 1933/1934 | I1127L | V63Q/L171P/H212A/S260T/E306G/ | + | + | ++ | ++ | | + | | + |
| | | M320R/S332P/F387I/I390A/V393G/ | | | | | | | | |
| | | V534I/M558W/M681G/K732W/ | | | | | | | | |
| | | L749F/L750D/I775G/I1127L/T1148N/ | | | | | | | | |
| | | L1248D/L1377D/V1439E | | | | | | | | |
| 1935/1936 | S308P | V63Q/L171P/H212A/S260T/E306G/ | + | + | + | + | | + | + | + |
| | | S308P/M320R/S332P/F387I/I390A/ | | | | | | | | |
| | | V393G/V534I/M558W/M681G/K732W/ | | | | | | | | |
| | | L749F/L750D/I775G/T1148N/ | | | | | | | | |
| | | L1248D/L1377D/V1439E | | | | | | | | |
| 1937/1938 | E1076S | V63Q/L171P/H212A/S260T/E306G/ | ++ | + | ++ | ++ | ++ | ++ | ++ | ++ |
| | | M320R/S332P/F387I/I390A/V393G/ | | | | | | | | |
| | | V534I/M558W/M681G/K732W/ | | | | | | | | |
| | | L749F/L750D/I775G/E1076S/T1148N/ | | | | | | | | |
| | | L1248D/L1377D/V1439E | | | | | | | | |
| 1939/1940 | K1093P | V63Q/L171P/H212A/S260T/E306G/ | + | ++ | ++ | + | | + | | + |
| | | M320R/S332P/F387I/I390A/V393G/ | | | | | | | | |
| | | V534I/M558W/M681G/K732W/ | | | | | | | | |
| | | L749F/L750D/I775G/K1093P/T1148N/ | | | | | | | | |
| | | L1248D/L1377D/V1439E | | | | | | | | |
| 1941/1942 | K1093Y | V63Q/L171P/H212A/S260T/E306G/ | + | ++ | + | ++ | + | ++ | + | ++ |
| | | M320R/S332P/F387I/I390A/V393G/ | | | | | | | | |
| | | V534I/M558W/M681G/K732W/ | | | | | | | | |
| | | L749F/L750D/I775G/K1093Y/T1148N/ | | | | | | | | |
| | | L1248D/L1377D/V1439E | | | | | | | | |
| 1943/1944 | E739R | V63Q/L171P/H212A/S260T/E306G/ | | | + | | + | | | |
| | | M320R/S332P/F387I/I390A/V393G/ | | | | | | | | |
| | | V534I/M558W/M681G/K732W/ | | | | | | | | |
| | | E739R/L749F/L750D/I775G/T1148N/ | | | | | | | | |
| | | L1248D/L1377D/V1439E | | | | | | | | |
| 1945/1946 | E739P | V63Q/L171P/H212A/S260T/E306G/ | + | + | + | + | + | + | + | + |
| | | M320R/S332P/F387I/I390A/V393G/ | | | | | | | | |
| | | V534I/M558W/M681G/K732W/ | | | | | | | | |
| | | E739P/L749F/L750D/I775G/T1148N/ | | | | | | | | |
| | | L1248D/L1377D/V1439E | | | | | | | | |
| 1947/1948 | I310V | V63Q/L171P/H212A/S260T/E306G/ | ++ | + | ++ | ++ | + | + | | |
| | | I310V/M320R/S332P/F387I/I390A/ | | | | | | | | |
| | | V393G/V534I/M558W/M681G/K732W/ | | | | | | | | |
| | | L749F/L750D/I775G/T1148N/ | | | | | | | | |
| | | L1248D/L1377D/V1439E | | | | | | | | |
| 1949/1950 | H712T | V63Q/L171P/H212A/S260T/E306G/ | | + | | | | | | |
| | | M320R/S332P/F387I/I390A/V393G/ | | | | | | | | |
| | | V534I/M558W/M681G/H712T/ | | | | | | | | |
| | | K732W/L749F/L750D/I775G/T1148N/ | | | | | | | | |
| | | L1248D/L1377D/V1439E | | | | | | | | |
| 1951/1952 | A167H | V63Q/A167H/L171P/H212A/S260T/ | + | + | + | + | + | + | + | |
| | | E306G/M320R/S332P/F387I/I390A/ | | | | | | | | |
| | | V393G/V534I/M558W/M681G/K732W/ | | | | | | | | |
| | | L749F/L750D/I775G/T1148N/ | | | | | | | | |
| | | L1248D/L1377D/V1439E | | | | | | | | |
| 1953/1954 | K1093R | V63Q/L171P/H212A/S260T/E306G/ | + | + | + | ++ | + | + | + | |
| | | M320R/S332P/F387I/I390A/V393G/ | | | | | | | | |
| | | V534I/M558W/M681G/K732W/ | | | | | | | | |
| | | L749F/L750D/I775G/K1093R/T1148N/ | | | | | | | | |
| | | L1248D/L1377D/V1439E | | | | | | | | |
| 1955/1956 | V536P/F555E/ | V63Q/L171P/H212A/S260T/E306G/ | ++ | + | ++++ | | + | + | ++ | |
| | G619E/ | M320R/S332P/F387I/I390A/V393G/ | | | | | | | | |
| | W732K/K799S/ | V534I/V536P/F555E/M558W/G619E/ | | | | | | | | |
| | Y805Q | M681G/L749F/L750D/I775G/ | | | | | | | | |
| | | K799S/Y805Q/T1148N/L1248D/ | | | | | | | | |
| | | L1377D/V1439E | | | | | | | | |
| 1957/1958 | F555E/G619E/ | V63Q/L171P/H212A/S260T/E306G/ | ++ | ++ | ++ | ++ | + | ++ | + | |
| | D801G | M320R/S332P/F387I/I390A/V393G/ | | | | | | | | |
| | | V534I/F555E/M558W/G619E/M681G/ | | | | | | | | |
| | | K732W/L749F/L750D/I775G/ | | | | | | | | |
| | | D801G/T1148N/L1248D/L1377D/ | | | | | | | | |
| | | V1439E | | | | | | | | |
| 1959/1960 | F555E/G619E/ | V63Q/L171P/H212A/S260T/E306G/ | ++ | ++ | ++ | ++ | ++ | ++ | ++ | + |
| | K799S | M320R/S332P/F387I/I390A/V393G/ | | | | | | | | |
| | | V534I/F555E/M558W/G619E/M681G/ | | | | | | | | |
| | | K732W/L749F/L750D/I775G/ | | | | | | | | |
| | | K799S/T1148N/L1248D/L1377D/ | | | | | | | | |
| | | V1439E | | | | | | | | |
| 1961/1962 | G619E/K799S/ | V63Q/L171P/H212A/S260T/E306G/ | ++ | ++ | ++ | ++ | ++ | + | ++ | |
| | D801G/ | M320R/S332P/F387I/I390A/V393G/ | | | | | | | | |
| | Y805Q | V534I/M558W/G619E/M681G/ | | | | | | | | |
| | | K732W/L749F/L750D/I775G/K799S/ | | | | | | | | |
| | | D801G/Y805Q/T1148N/L1248D/ | | | | | | | | |
| | | L1377D/V1439E | | | | | | | | |
| 1963/1964 | V536P/F555E/ | V63Q/L171P/H212A/S260T/E306G/ | ++ | + | ++ | | ++ | + | + | + |
| | G619E/ | M320R/S332P/F387I/I390A/V393G/ | | | | | | | | |
| | W732K/K799S | V534I/V536P/F555E/M558W/G619E/ | | | | | | | | |
| | | M681G/L749F/L750D/I775G/ | | | | | | | | |
| | | K799S/T1148N/L1248D/L1377D/ | | | | | | | | |
| | | V1439E | | | | | | | | |
| 1965/1966 | K799S/ | V63Q/L171P/H212A/S260T/E306G/ | ++ | + | ++ | + | ++ | + | + | |
| | Y805Q | M320R/S332P/F387I/I390A/V393G/ | | | | | | | | |
| | | V534I/M558W/M681G/K732W/ | | | | | | | | |
| | | L749F/L750D/I775G/K799S/Y805Q/ | | | | | | | | |
| | | T1148N/L1248D/L1377D/V1439E | | | | | | | | |
| | | V63Q/ | | | | | | | | |
| 1967/1968 | D801G | L171P/H212A/S260T/E306G/ | ++ | + | ++ | + | + | + | | |
| | | M320R/S332P/F387I/I390A/V393G/ | | | | | | | | |
| | | V534I/M558W/M681G/K732W/ | | | | | | | | |
| | | L749F/L750D/I775G/D801G/T1148N/ | | | | | | | | |
| | | L1248D/L1377D/V1439E | | | | | | | | |
| 1969/1970 | A246D/G619E/ | V63Q/L171P/H212A/A246D/S260T/ | ++ | ++ | ++ | ++ | | + | | + |
| | K799S/D801G | E306G/M320R/S332P/F387I/I390A/ | | | | | | | | |
| | | V393G/V534I/M558W/G619E/M681G/ | | | | | | | | |
| | | K732W/L749F/L750D/I775G/ | | | | | | | | |
| | | K799S/D801G/T1148N/L1248D/ | | | | | | | | |
| | | L1377D/V1439E | | | | | | | | |
| 1971/1972 | V536P/F555E/ | V63Q/L171P/H212A/S260T/E306G/ | ++ | ++ | ++ | ++ | ++ | + | + | + |
| | G619E | M320R/S332P/F387I/I390A/V393G/ | | | | | | | | |
| | | V534I/V536P/F555E/M558W/G619E/ | | | | | | | | |
| | | M681G/K732W/L749F/L750D/ | | | | | | | | |
| | | I775G/T1148N/L1248D/L1377D/ | | | | | | | | |
| | | V1439E | | | | | | | | |
| 1973/1974 | G619E/S839K | V63Q/L171P/H212A/S260T/E306G/ | ++ | + | ++ | | + | | ++ | + |
| | | M320R/S332P/F387I/I390A/V393G/ | | | | | | | | |
| | | V534I/M558W/G619E/M681G/ | | | | | | | | |
| | | K732W/L749F/L750D/I775G/S839K/ | | | | | | | | |
| | | T1148N/L1248D/L1377D/V1439E | | | | | | | | |
| 1975/1976 | G619E/K799S/ | V63Q/L171P/H212A/S260T/E306G/ | ++ | ++ | ++ | ++ | + | + | | |
| | Y805Q | M320R/S332P/F387I/I390A/V393G/ | | | | | | | | |
| | | V534I/M558W/G619E/M681G/ | | | | | | | | |
| | | K732W/L749F/L750D/I775G/K799S/ | | | | | | | | |
| | | Y805Q/T1148N/L1248D/L1377D/ | | | | | | | | |
| | | V1439E | | | | | | | | |
| 1977/1978 | V536P/D801G/ | V63Q/L171P/H212A/S260T/E306G/ | ++ | + | ++ | ++ | + | + | + | + |
| | Y805Q | M320R/S332P/F387I/I390A/V393G/ | | | | | | | | |
| | | V534I/V536P/M558W/M681G/ | | | | | | | | |
| | | K732W/L749F/L750D/I775G/D801G/ | | | | | | | | |
| | | Y805Q/T1148N/L1248D/L1377D/ | | | | | | | | |
| | | V1439E | | | | | | | | |
| 1979/1980 | F555E/G619E/ | V63Q/L171P/H212A/S260T/E306G/ | ++ | ++ | ++ | ++ | + | + | + | + |
| | K799S/ | M320R/S332P/F387I/I390A/V393G/ | | | | | | | | |
| | Y805Q | V534I/F555E/M558W/G619E/M681G/ | | | | | | | | |
| | | K732W/L749F/L750D/I775G/ | | | | | | | | |
| | | K799S/Y805Q/T1148N/L1248D/ | | | | | | | | |
| | | L1377D/V1439E | | | | | | | | |
| 1981/1982 | G619E/D801G/ | V63Q/L171P/H212A/S260T/E306G/ | ++ | ++ | ++ | ++ | + | + | | + |
| | Y805Q | M320R/S332P/F387I/I390A/V393G/ | | | | | | | | |
| | | V534I/M558W/G619E/M681G/ | | | | | | | | |
| | | K732W/L749F/L750D/I775G/D801G/ | | | | | | | | |
| | | Y805Q/T1148N/L1248D/L1377D/ | | | | | | | | |
| | | V1439E | | | | | | | | |
| 1983/1984 | F555E/ | V63Q/L171P/H212A/S260T/E306G/ | ++ | + | + | ++ | + | + | | + |
| | G619E | M320R/S332P/F387I/I390A/V393G/ | | | | | | | | |
| | | V534I/F555E/M558W/G619E/M681G/ | | | | | | | | |
| | | K732W/L749F/L750D/I775G/ | | | | | | | | |
| | | T1148N/L1248D/L1377D/V1439E | | | | | | | | |
| 1985/1986 | V536P/G619E/ | V63Q/L171P/H212A/S260T/E306G/ | ++ | ++ | ++ | ++ | + | + | + | + |
| | D801G | M320R/S332P/F387I/I390A/V393G/ | | | | | | | | |
| | | V534I/V536P/M558W/G619E/M681G/ | | | | | | | | |
| | | K732W/L749F/L750D/I775G/ | | | | | | | | |
| | | D801G/T1148N/L1248D/L1377D/ | | | | | | | | |
| | | V1439E | | | | | | | | |
| 1987/1988 | D801G/ | V63Q/L171P/H212A/S260T/E306G/ | + | + | ++ | + | ++ | + | + | + |
| | Y805Q | M320R/S332P/F387I/I390A/V393G/ | | | | | | | | |
| | | V534I/M558W/M681G/K732W/ | | | | | | | | |
| | | L749F/L750D/I775G/D801G/Y805Q/ | | | | | | | | |
| | | T1148N/L1248D/L1377D/V1439E | | | | | | | | |
| 1989/1990 | V536P/G619E/ | V63Q/L171P/H212A/S260T/E306G/ | ++ | ++ | ++ | ++ | + | + | + | |
| | K799S/ | M320R/S332P/F387I/I390A/V393G/ | | | | | | | | |
| | Y805Q | V534I/V536P/M558W/G619E/M681G/ | | | | | | | | |
| | | K732W/L749F/L750D/I775G/ | | | | | | | | |
| | | K799S/Y805Q/T1148N/L1248D/ | | | | | | | | |
| | | L1377D/V1439E | | | | | | | | |
| 1991/1992 | F555E/G619E/ | V63Q/L171P/H212A/S260T/E306G/ | ++ | + | ++ | + | ++ | + | + | |
| | W732K/K799S/ | M320R/S332P/F387I/I390A/V393G/ | | | | | | | | |
| | D801G/ | V534I/F555E/M558W/G619E/M681G/ | | | | | | | | |
| | Y805Q | L749F/L750D/I775G/K799S/ | | | | | | | | |
| | | D801G/Y805Q/T1148N/L1248D/ | | | | | | | | |
| | | L1377D/V1439E | | | | | | | | |
| 1993/1994 | Y1281H | V63Q/L171P/H212A/S260T/E306G/ | | + | | | + | + | | |
| | | M320R/S332P/F387I/I390A/V393G/ | | | | | | | | |
| | | V534I/M558W/M681G/K732W/ | | | | | | | | |
| | | L749F/L750D/I775G/T1148N/L1248D/ | | | | | | | | |
| | | Y1281H/L1377D/V1439E | | | | | | | | |
| 1995/1996 | F749L | V63Q/L171P/H212A/S260T/E306G/ | + | | ++ | | + | | ++ | |
| | | M320R/S332P/F387I/I390A/V393G/ | | | | | | | | |
| | | V534I/M558W/M681G/K732W/ | | | | | | | | |
| | | L750D/I775G/T1148N/L1248D/L1377D/ | | | | | | | | |
| | | V1439E | | | | | | | | |
| 1997/1998 | L614H | V63Q/L171P/H212A/S260T/E306G/ | | + | | + | | | | |
| | | M320R/S332P/F387I/I390A/V393G/ | | | | | | | | |
| | | V534I/M558W/L614H/M681G/ | | | | | | | | |
| | | K732W/L749F/L750D/I775G/T1148N/ | | | | | | | | |
| | | L1248D/L1377D/V1439E | | | | | | | | |
| 1999/2000 | N616D | V63Q/L171P/H212A/S260T/E306G/ | + | + | + | + | + | + | + | + |
| | | M320R/S332P/F387I/I390A/V393G/ | | | | | | | | |
| | | V534I/M558W/N616D/M681G/ | | | | | | | | |
| | | K732W/L749F/L750D/I775G/T1148N/ | | | | | | | | |
| | | L1248D/L1377D/V1439E | | | | | | | | |
| 2001/2002 | Q621K | V63Q/L171P/H212A/S260T/E306G/ | + | + | | + | ++ | ++ | + | |
| | | M320R/S332P/F387I/I390A/V393G/ | | | | | | | | |
| | | V534I/M558W/Q621K/M681G/ | | | | | | | | |
| | | K732W/L749F/L750D/I775G/T1148N/ | | | | | | | | |
| | | L1248D/L1377D/V1439E | | | | | | | | |
| 2003/2004 | I1050E | V63Q/L171P/H212A/S260T/E306G/ | ++ | + | + | | + | + | | + |
| | | M320R/S332P/F387I/I390A/V393G/ | | | | | | | | |
| | | V534I/M558W/M681G/K732W/ | | | | | | | | |
| | | L749F/L750D/I775G/I1050E/T1148N/ | | | | | | | | |
| | | L1248D/L1377D/V1439E | | | | | | | | |
| 2005/2006 | I610H | V63Q/L171P/H212A/S260T/E306G/ | + | + | | | | + | | |
| | | M320R/S332P/F387I/I390A/V393G/ | | | | | | | | |
| | | V534I/M558W/I610H/M681G/ | | | | | | | | |
| | | K732W/L749F/L750D/I775G/T1148N/ | | | | | | | | |
| | | L1248D/L1377D/V1439E | | | | | | | | |
| 2007/2008 | Q611D | V63Q/L171P/H212A/S260T/E306G/ | + | + | + | + | | + | | |
| | | M320R/S332P/F387I/I390A/V393G/ | | | | | | | | |
| | | V534I/M558W/Q611D/M681G/ | | | | | | | | |
| | | K732W/L749F/L750D/I775G/T1148N/ | | | | | | | | |
| | | L1248D/L1377D/V1439E | | | | | | | | |
| 2009/2010 | R1042T | V63Q/L171P/H212A/S260T/E306G/ | + | | | | + | | + | |
| | | M320R/S332P/F387I/I390A/V393G/ | | | | | | | | |
| | | V534I/M558W/M681G/K732W/ | | | | | | | | |
| | | L749F/L750D/I775G/R1042T/T1148N/ | | | | | | | | |
| | | L1248D/L1377D/V1439E | | | | | | | | |
| 2011/2012 | N616Q | V63Q/L171P/H212A/S260T/E306G/ | ++ | + | + | | ++ | + | | |
| | | M320R/S332P/F387I/I390A/V393G/ | | | | | | | | |
| | | V534I/M558W/N616Q/M681G/ | | | | | | | | |
| | | K732W/L749F/L750D/I775G/T1148N/ | | | | | | | | |
| | | L1248D/L1377D/V1439E | | | | | | | | |
| 2013/2014 | L614N | V63Q/L171P/H212A/S260T/E306G/ | + | + | | ++ | + | + | | + |
| | | M320R/S332P/F387I/I390A/V393G/ | | | | | | | | |
| | | V534I/M558W/L614N/M681G/ | | | | | | | | |
| | | K732W/L749F/L750D/I775G/T1148N/ | | | | | | | | |
| | | L1248D/L1377D/V1439E | | | | | | | | |
| 2015/2016 | T370A/ | V63Q/L171P/H212A/S260T/E306G/ | + | + | ++ | ++ | + | + | | |
| | L614A | M320R/S332P/T370A/F387I/I390A/ | | | | | | | | |
| | | V393G/V534I/M558W/L614A/ | | | | | | | | |
| | | M681G/K732W/L749F/L750D/I775G/ | | | | | | | | |
| | | T1148N/L1248D/L1377D/V1439E | | | | | | | | |
| 2017/2018 | H1156D | V63Q/L171P/H212A/S260T/E306G/ | + | + | + | | | + | + | + |
| | | M320R/S332P/F387I/I390A/V393G/ | | | | | | | | |
| | | V534I/M558W/M681G/K732W/ | | | | | | | | |
| | | L749F/L750D/I775G/T1148N/H1156D/ | | | | | | | | |
| | | L1248D/L1377D/V1439E | | | | | | | | |
| 2019/2020 | K1210V | V63Q/L171P/H212A/S260T/E306G/ | + | + | + | + | ++ | + | + | |
| | | M320R/S332P/F387I/I390A/V393G/ | | | | | | | | |
| | | V534I/M558W/M681G/K732W/ | | | | | | | | |
| | | L749F/L750D/I775G/T1148N/K1210V/ | | | | | | | | |
| | | L1248D/L1377D/V1439E | | | | | | | | |
| 2021/2022 | L614T | V63Q/L171P/H212A/S260T/E306G/ | ++ | + | + | | | + | + | + |
| | | M320R/S332P/F387I/I390A/V393G/ | | | | | | | | |
| | | V534I/M558W/L614T/M681G/ | | | | | | | | |
| | | K732W/L749F/L750D/I775G/T1148N/ | | | | | | | | |
| | | L1248D/L1377D/V1439E | | | | | | | | |
| 2023/2024 | R1158N | V63Q/L171P/H212A/S260T/E306G/ | + | + | | + | | | | |
| | | M320R/S332P/F387I/I390A/V393G/ | | | | | | | | |
| | | V534I/M558W/M681G/K732W/ | | | | | | | | |
| | | L749F/L750D/I775G/T1148N/R1158N/ | | | | | | | | |
| | | L1248D/L1377D/V1439E | | | | | | | | |
| 2025/2026 | Y1281S | V63Q/L171P/H212A/S260T/E306G/ | + | + | + | + | + | + | | + |
| | | M320R/S332P/F387I/I390A/V393G/ | | | | | | | | |
| | | V534I/M558W/M681G/K732W/ | | | | | | | | |
| | | L749F/L750D/I775G/T1148N/L1248D/ | | | | | | | | |
| | | Y1281S/L1377D/V1439E | | | | | | | | |
| 2027/2028 | A618E | V63Q/L171P/H212A/S260T/E306G/ | ++ | + | + | + | + | + | + | + |
| | | M320R/S332P/F387I/I390A/V393G/ | | | | | | | | |
| | | V534I/M558W/A618E/M681G/ | | | | | | | | |
| | | K732W/L749F/L750D/I775G/T1148N/ | | | | | | | | |
| | | L1248D/L1377D/V1439E | | | | | | | | |
| 2029/2030 | F555E/G681N/ | V63Q/L171P/H212A/S260T/E306G/ | + | | | + | ++ | + | + | |
| | Y737K/ | M320R/S332P/F387I/I390A/V393G/ | | | | | | | | |
| | K799Q | V534I/F555E/M558W/M681N/ | | | | | | | | |
| | | K732W/Y737K/L749F/L750D/I775G/ | | | | | | | | |
| | | K799Q/T1148N/L1248D/L1377D/ | | | | | | | | |
| | | V1439E | | | | | | | | |
| 2031/2032 | V536P/G619E/ | V63Q/L171P/H212A/S260T/E306G/ | ++ | ++ | ++ | ++ | ++ | ++ | + | |
| | E809G/ | M320R/S332P/F387I/I390A/V393G/ | | | | | | | | |
| | E1109G | V534I/V536P/M558W/G619E/M681G/ | | | | | | | | |
| | | K732W/L749F/L750D/I775G/ | | | | | | | | |
| | | E809G/E1109G/T1148N/L1248D/ | | | | | | | | |
| | | L1377D/V1439E | | | | | | | | |
| 2033/2034 | V536K/F555G/ | V63Q/L171P/H212A/S260T/E306G/ | ++ | | ++ | | | | | |
| | G619E/Y737K/ | M320R/S332P/F387I/I390A/V393G/ | | | | | | | | |
| | K799Q/ | V534I/V536K/F555G/M558W/ | | | | | | | | |
| | E809G/S839K/ | G619E/M681G/K732W/Y737K/L749F/ | | | | | | | | |
| | S916T/Q921R | L750D/I775G/K799Q/E809G/ | | | | | | | | |
| | | S839K/S916T/Q921R/T1148N/L1248D/ | | | | | | | | |
| | | L1377D/V1439E | | | | | | | | |
| 2035/2036 | S916T/ | V63Q/L171P/H212A/S260T/E306G/ | + | + | ++ | ++ | + | + | + | |
| | E1109G | M320R/S332P/F387I/I390A/V393G/ | | | | | | | | |
| | | V534I/M558W/M681G/K732W/ | | | | | | | | |
| | | L749F/L750D/I775G/S916T/E1109G/ | | | | | | | | |
| | | T1148N/L1248D/L1377D/V1439E | | | | | | | | |
| 2037/2038 | V536R/G619E/ | V63Q/L171P/H212A/S260T/E306G/ | ++ | + | ++ | ++ | | + | | |
| | G681N/K799Q/ | M320R/S332P/F387I/I390A/V393G/ | | | | | | | | |
| | S916T/ | V534I/V536R/M558W/G619E/ | | | | | | | | |
| | E1109G | M681N/K732W/L749F/L750D/I775G/ | | | | | | | | |
| | | K799Q/S916T/E1109G/T1148N/ | | | | | | | | |
| | | L1248D/L1377D/V1439E | | | | | | | | |
| 2039/2040 | F555G/G619E/ | V63Q/L171P/H212A/S260T/E306G/ | ++ | ++ | ++ | ++ | + | ++ | + | ++ |
| | G681N/E807R/ | M320R/S332P/F387I/I390A/V393G/ | | | | | | | | |
| | E1109G | V534I/F555G/M558W/G619E/M681N/ | | | | | | | | |
| | | K732W/L749F/L750D/I775G/ | | | | | | | | |
| | | E807R/E1109G/T1148N/L1248D/ | | | | | | | | |
| | | L1377D/V1439E | | | | | | | | |
| 2041/2042 | F555E/G619E/ | V63Q/L171P/H212A/S260T/E306G/ | ++ | | ++ | | + | | + | |
| | G681N/Y737K/ | M320R/S332P/F387I/I390A/V393G/ | | | | | | | | |
| | K799Q | V534I/F555E/M558W/G619E/M681N/ | | | | | | | | |
| | | L749F/L750D/I775G/K799Q/ | | | | | | | | |
| | | T1148N/L1248D/L1377D/V1439E | | | | | | | | |
| 2043/2044 | G619E/G681N/ | V63Q/L171P/H212A/S260T/E306G/ | ++ | ++ | ++ | ++ | + | ++ | + | ++ |
| | K799S/S916T/ | M320R/S332P/F387I/I390A/V393G/ | | | | | | | | |
| | E1109G | V534I/M558W/G619E/M681N/ | | | | | | | | |
| | | K732W/L749F/L750D/I775G/K799S/ | | | | | | | | |
| | | S916T/E1109G/T1148N/L1248D/ | | | | | | | | |
| | | L1377D/V1439E | | | | | | | | |
| 2045/2046 | G619E/G681N | V63Q/L171P/H212A/S260T/E306G/ | ++ | ++ | ++ | +++ | + | ++ | + | ++ |
| | | M320R/S332P/F387I/I390A/V393G/ | | | | | | | | |
| | | V534I/M558W/G619E/M681N/ | | | | | | | | |
| | | K732W/L749F/L750D/I775G/T1148N/ | | | | | | | | |
| | | L1248D/L1377D/V1439E | | | | | | | | |
| 2047/2048 | F555G/Q921R | V63Q/L171P/H212A/S260T/E306G/ | + | + | ++ | + | | + | + | |
| | | M320R/S332P/F387I/I390A/V393G/ | | | | | | | | |
| | | V534I/F555G/M558W/M681G/ | | | | | | | | |
| | | K732W/L749F/L750D/I775G/Q921R/ | | | | | | | | |
| | | T1148N/L1248D/L1377D/V1439E | | | | | | | | |
| | | V63Q/ | | | | | | | | |
| 2049/2050 | G619E/G681N/ | L171P/H212A/S260T/E306G/ | ++ | ++ | ++ | ++ | + | ++ | | + |
| | S916T | M320R/S332P/F387I/I390A/V393G/ | | | | | | | | |
| | | V534I/M558W/G619E/M681N/ | | | | | | | | |
| | | K732W/L749F/L750D/I775G/S916T/ | | | | | | | | |
| | | T1148N/L1248D/L1377D/V1439E | | | | | | | | |
| | | V63Q/ | | | | | | | | |
| 2051/2052 | F555G/G619E/ | L171P/H212A/S260T/E306G/ | + | ++ | ++ | ++ | + | ++ | + | + |
| | G681N/K799S | M320R/S332P/F387I/I390A/V393G/ | | | | | | | | |
| | | V534I/F555G/M558W/G619E/M681N/ | | | | | | | | |
| | | K732W/L749F/L750D/I775G/ | | | | | | | | |
| | | K799S/T1148N/L1248D/L1377D/ | | | | | | | | |
| | | V1439E | | | | | | | | |
| 2053/2054 | F555E | V63Q/L171P/H212A/S260T/E306G/ | + | + | + | | | + | | |
| | | M320R/S332P/F387I/I390A/V393G/ | | | | | | | | |
| | | V534I/F555E/M558W/M681G/ | | | | | | | | |
| | | K732W/L749F/L750D/I775G/T1148N/ | | | | | | | | |
| | | L1248D/L1377D/V1439E | | | | | | | | |
| 2055/2056 | W732K | V63Q/L171P/H212A/S260T/E306G/ | | + | + | | | + | | |
| | | M320R/S332P/F387I/I390A/V393G/ | | | | | | | | |
| | | V534I/M558W/M681G/L749F/ | | | | | | | | |
| | | L750D/I775G/T1148N/L1248D/L1377D/ | | | | | | | | |
| | | V1439E | | | | | | | | |
| 2057/2058 | G619E/ | V63Q/L171P/H212A/S260T/E306G/ | ++ | ++ | ++ | | ++ | + | + | + |
| | K799S | M320R/S332P/F387I/I390A/V393G/ | | | | | | | | |
| | | V534I/M558W/G619E/M681G/ | | | | | | | | |
| | | K732W/L749F/L750D/I775G/K799S/ | | | | | | | | |
| | | T1148N/L1248D/L1377D/V1439E | | | | | | | | |
| 2059/2060 | G619E | V63Q/L171P/H212A/S260T/E306G/ | + | + | | + | ++ | ++ | | |
| | | M320R/S332P/F387I/I390A/V393G/ | | | | | | | | |
| | | V534I/M558W/G619E/M681G/ | | | | | | | | |
| | | K732W/L749F/L750D/I775G/T1148N/ | | | | | | | | |
| | | L1248D/L1377D/V1439E | | | | | | | | |
| 2061/2062 | G681N | V63Q/L171P/H212A/S260T/E306G/ | + | ++ | ++ | ++ | + | + | + | |
| | | M320R/S332P/F387I/I390A/V393G/ | | | | | | | | |
| | | V534I/M558W/M681N/K732W/ | | | | | | | | |
| | | L749F/L750D/I775G/T1148N/L1248D/ | | | | | | | | |
| | | L1377D/V1439E | | | | | | | | |
| 2063/2064 | F555G/S916T | V63Q/L171P/H212A/S260T/E306G/ | + | + | ++ | + | | + | + | |
| | | M320R/S332P/F387I/I390A/V393G/ | | | | | | | | |
| | | V534I/F555G/M558W/M681G/ | | | | | | | | |
| | | K732W/L749F/L750D/I775G/S916T/ | | | | | | | | |
| | | T1148N/L1248D/L1377D/V1439E | | | | | | | | |
| 2065/2066 | S839K | V63Q/L171P/H212A/S260T/E306G/ | + | + | + | | ++ | | | + |
| | | M320R/S332P/F387I/I390A/V393G/ | | | | | | | | |
| | | V534I/M558W/M681G/K732W/ | | | | | | | | |
| | | L749F/L750D/I775G/S839K/T1148N/ | | | | | | | | |
| | | L1248D/L1377D/V1439E | | | | | | | | |
| 2067/2068 | K799Q | V63Q/L171P/H212A/S260T/E306G/ | + | + | + | ++ | + | + | | + |
| | | M320R/S332P/F387I/I390A/V393G/ | | | | | | | | |
| | | V534I/M558W/M681G/K732W/ | | | | | | | | |
| | | L749F/L750D/I775G/K799Q/T1148N/ | | | | | | | | |
| | | L1248D/L1377D/V1439E | | | | | | | | |

All activities were determined relative to the reference polypeptide of SEQ ID NO: 1514. Levels of increased activity are defined as follows:
“+” 0.9 to 1.1,
“++” >1.1,
“+++” >2,
“++++” >2.5

### Example 11

### FVIII Variants Derived from SEQ ID NO: 2072

[0361] In this Example, experiments conducted to determine FVIII variant activity by assaying the protein activity after a challenge is described. These variants were tested for FVIII activity after no incubation and after incubation in Hemophilia A patient plasma (George King Bio-Medical, Inc.), as described in Example 3. Variants were tested using the chromogenic and clotting assays, as described in Example 3. Results are shown in Table 11.1 for variants expressed using Expi293F cells or HepG2 cells.

TABLE 11.1
Activity of FVIII Variants Relative to SEQ ID NO: 2072

| | | | FIOP | FIOP inv | FIOP | FIOP | FIOP inv | FIOP |
|---|---|---|---|---|---|---|---|---|
| | | | Unchallenged | Unchallenged | Challenged | Unchallenged | Unchallenged | Challenged |
| | Amino Acid | | Biophen | APTT | Biophen | Biophen | APTT | Biophen |
| | Differences | Amino Acid | (Expi) | (Expi) | (Expi) | (HepG2) | (HepG2) | (HepG2) |
| | (Relative to | Differences | Relative to | Relative to | Relative to | Relative to | Relative to | Relative to |
| SEQ ID | SEQ ID NO: | (Relative to | SEQ ID NO | SEQ ID NO | SEQ ID NO | SEQ ID NO | SEQ ID NO | SEQ ID NO |
| NO: (nt/aa) | 2072) | SEQ ID NO: 2) | 2072 | 2072 | 2072 | 2072 | 2072 | 2072 |
| 2073/2074 | A167G | V63Q/A167G/L171P/H212A/S260T/ | +++ | ++ | + | + | + | |
| | | E306G/L318G/M320R/S332P/ | | | | | | |
| | | F387I/I390A/V393G/V534I/M558W/ | | | | | | |
| | | M681G/K732W/Y738E/L749F/ | | | | | | |
| | | L750D/I775G/T1148N/L1248D/ | | | | | | |
| | | L1377D/V1439E | | | | | | |
| 2075/2076 | A167G/E738Y/ | V63Q/A167G/L171P/H212A/S260T/ | ++ | ++ | + | + | + | ++ |
| | E1076S/K1093G | E306G/L318G/M320R/S332P/ | | | | | | |
| | | F387I/I390A/V393G/V534I/M558W/ | | | | | | |
| | | M681G/K732W/L749F/L750D/ | | | | | | |
| | | I775G/E1076S/K1093G/T1148N/ | | | | | | |
| | | L1248D/L1377D/V1439E | | | | | | |
| 2077/2078 | A167G/E738Y/ | V63Q/A167G/L171P/H212A/S260T/ | ++ | ++ | + | + | + | ++ |
| | K752E/E800V/Y805Q/ | E306G/L318G/M320R/S332P/ | | | | | | |
| | D808S/E809G/ | F387I/I390A/V393G/V534I/M558W/ | | | | | | |
| | S1116I | M681G/K732W/L749F/L750D/ | | | | | | |
| | | K752E/I775G/E800V/Y805Q/ | | | | | | |
| | | D808S/E809G/S1116I/T1148N/L1248D/ | | | | | | |
| | | L1377D/V1439E | | | | | | |
| 2079/2080 | A167G/E800V/ | V63Q/A167G/L171P/H212A/S260T/ | ++ | ++ | + | + | + | + |
| | E809G/E1076S | E306G/L318G/M320R/S332P/ | | | | | | |
| | | F387I/I390A/V393G/V534I/M558W/ | | | | | | |
| | | M681G/K732W/Y738E/L749F/ | | | | | | |
| | | L750D/I775G/E800V/E809G/E1076S/ | | | | | | |
| | | T1148N/L1248D/L1377D/ | | | | | | |
| | | V1439E | | | | | | |
| 2081/2082 | A167G/G318L | V63Q/A167G/L171P/H212A/S260T/ | +++ | + | ++ | ++ | ++ | ++ |
| | | E306G/M320R/S332P/F387I/I390A/ | | | | | | |
| | | V393G/V534I/M558W/M681G/ | | | | | | |
| | | K732W/Y738E/L749F/L750D/ | | | | | | |
| | | I775G/T1148N/L1248D/L1377D/ | | | | | | |
| | | V1439E | | | | | | |
| 2083/2084 | A167G/G318L/ | V63Q/A167G/L171P/H212A/S260T/ | +++ | ++ | + | ++ | ++ | ++ |
| | E800V/Y805Q/ | E306G/M320R/S332P/F387I/I390A/ | | | | | | |
| | D808S/E809G | V393G/V534I/M558W/M681G/ | | | | | | |
| | | K732W/Y738E/L749F/L750D/ | | | | | | |
| | | I775G/E800V/Y805Q/D808S/E809G/ | | | | | | |
| | | T1148N/L1248D/L1377D/ | | | | | | |
| | | V1439E | | | | | | |
| 2085/2086 | A167G/G318L/ | V63Q/A167G/L171P/H212A/S260T/ | ++ | + | + | ++ | ++ | ++ |
| | G681N | E306G/M320R/S332P/F387I/I390A/ | | | | | | |
| | | V393G/V534I/M558W/M681N/ | | | | | | |
| | | K732W/Y738E/L749F/L750D/ | | | | | | |
| | | I775G/T1148N/L1248D/L1377D/ | | | | | | |
| | | V1439E | | | | | | |
| 2087/2088 | A167G/G318L/ | V63Q/A167G/L171P/H212A/S260T/ | ++ | ++ | + | ++ | ++ | ++ |
| | G681N/S700E/ | E306G/M320R/S332P/F387I/I390A/ | | | | | | |
| | Y805Q/D808S/ | V393G/V534I/M558W/M681N/ | | | | | | |
| | E809G/E1076S/ | S700E/K732W/Y738E/L749F/ | | | | | | |
| | S1116I | L750D/I775G/Y805Q/D808S/E809G/ | | | | | | |
| | | E1076S/S1116I/T1148N/L1248D/ | | | | | | |
| | | L1377D/V1439E | | | | | | |
| 2089/2090 | A167G/G318L/ | V63Q/A167G/L171P/H212A/S260T/ | ++ | ++ | + | ++ | ++ | ++ |
| | S700E | E306G/M320R/S332P/F387I/I390A/ | | | | | | |
| | | V393G/V534I/M558W/M681G/ | | | | | | |
| | | S700E/K732W/Y738E/L749F/ | | | | | | |
| | | L750D/I775G/T1148N/L1248D/ | | | | | | |
| | | L1377D/V1439E | | | | | | |
| 2091/2092 | A167G/G318L/ | V63Q/A167G/L171P/H212A/S260T/ | ++ | + | ++ | ++ | ++ | ++ |
| | S700E/E1076S | E306G/M320R/S332P/F387I/I390A/ | | | | | | |
| | | V393G/V534I/M558W/M681G/ | | | | | | |
| | | S700E/K732W/Y738E/L749F/ | | | | | | |
| | | L750D/I775G/E1076S/T1148N/ | | | | | | |
| | | L1248D/L1377D/V1439E | | | | | | |
| 2093/2094 | A167G/G318L/ | V63Q/A167G/L171P/H212A/S260T/ | ++ | + | + | ++ | ++ | ++ |
| | S700E/E738Y/ | E306G/M320R/S332P/F387I/I390A/ | | | | | | |
| | E739G/E1076S | V393G/V534I/M558W/M681G/ | | | | | | |
| | | S700E/K732W/E739G/L749F/ | | | | | | |
| | | L750D/I775G/E1076S/T1148N/ | | | | | | |
| | | L1248D/L1377D/V1439E | | | | | | |
| 2095/2096 | A167G/G681N/ | V63Q/A167G/L171P/H212A/S260T/ | ++ | ++ | + | + | + | ++ |
| | E738Y/E800V/ | E306G/L318G/M320R/S332P/ | | | | | | |
| | D808S/E809G | F387I/I390A/V393G/V534I/M558W/ | | | | | | |
| | | M681N/K732W/L749F/L750D/ | | | | | | |
| | | I775G/E800V/D808S/E809G/T1148N/ | | | | | | |
| | | L1248D/L1377D/V1439E | | | | | | |
| 2097/2098 | A167G/L178Q/ | V63Q/A167G/L171P/L178Q/H212A/ | ++ | ++ | + | ++ | ++ | ++ |
| | S700E/K752E/ | S260T/E306G/L318G/M320R/ | | | | | | |
| | K1093G | S332P/F387I/I390A/V393G/V534I/ | | | | | | |
| | | M558W/M681G/S700E/K732W/ | | | | | | |
| | | Y738E/L749F/L750D/K752E/I775G/ | | | | | | |
| | | K1093G/T1148N/L1248D/ | | | | | | |
| | | L1377D/V1439E | | | | | | |
| 2099/2100 | A167G/S700E | V63Q/A167G/L171P/H212A/S260T/ | +++ | + | + | + | + | ++ |
| | | E306G/L318G/M320R/S332P/ | | | | | | |
| | | F387I/I390A/V393G/V534I/M558W/ | | | | | | |
| | | M681G/S700E/K732W/Y738E/ | | | | | | |
| | | L749F/L750D/I775G/T1148N/ | | | | | | |
| | | L1248D/L1377D/V1439E | | | | | | |
| 2101/2102 | A167G/S700E/ | V63Q/A167G/L171P/H212A/S260T/ | + | ++ | + | + | + | ++ |
| | E738Y/E739G/ | E306G/L318G/M320R/S332P/ | | | | | | |
| | K1093G | F387I/I390A/V393G/V534I/M558W/ | | | | | | |
| | | M681G/S700E/K732W/E739G/ | | | | | | |
| | | L749F/L750D/I775G/K1093G/ | | | | | | |
| | | T1148N/L1248D/L1377D/V1439E | | | | | | |
| 2103/2104 | A167G/S700E/ | V63Q/A167G/L171P/H212A/S260T/ | + | ++ | + | + | ++ | +++ |
| | E738Y/K752E/ | E306G/L318G/M320R/S332P/ | | | | | | |
| | K1093G | F387I/I390A/V393G/V534I/M558W/ | | | | | | |
| | | M681G/S700E/K732W/L749F/ | | | | | | |
| | | L750D/K752E/I775G/K1093G/ | | | | | | |
| | | T1148N/L1248D/L1377D/V1439E | | | | | | |
| 2105/2106 | A167G/S700E/ | V63Q/A167G/L171P/H212A/S260T/ | + | ++ | + | + | + | ++ |
| | E738Y/K752E/ | E306G/L318G/M320R/S332P/ | | | | | | |
| | Y805Q/D808S/ | F387I/I390A/V393G/V534I/M558W/ | | | | | | |
| | E809G/K1093A/ | M681G/S700E/K732W/L749F/ | | | | | | |
| | S1116I | L750D/K752E/I775G/Y805Q/D808S/ | | | | | | |
| | | E809G/K1093A/S1116I/T1148N/ | | | | | | |
| | | L1248D/L1377D/V1439E | | | | | | |
| 2107/2108 | D808S/E809G | V63Q/L171P/H212A/S260T/E306G/ | ++ | ++ | ++ | + | + | ++ |
| | | L318G/M320R/S332P/F387I/I390A/ | | | | | | |
| | | V393G/V534I/M558W/M681G/ | | | | | | |
| | | K732W/Y738E/L749F/L750D/ | | | | | | |
| | | I775G/D808S/E809G/T1148N/ | | | | | | |
| | | L1248D/L1377D/V1439E | | | | | | |
| 2109/2110 | E1076S | V63Q/L171P/H212A/S260T/E306G/ | + | + | + | + | + | + |
| | | L318G/M320R/S332P/F387I/I390A/ | | | | | | |
| | | V393G/V534I/M558W/M681G/ | | | | | | |
| | | K732W/Y738E/L749F/L750D/ | | | | | | |
| | | I775G/E1076S/T1148N/L1248D/ | | | | | | |
| | | L1377D/V1439E | | | | | | |
| 2111/2112 | E738Y | V63Q/L171P/H212A/S260T/E306G/ | ++ | ++ | + | ++ | + | ++ |
| | | L318G/M320R/S332P/F387I/I390A/ | | | | | | |
| | | V393G/V534I/M558W/M681G/ | | | | | | |
| | | K732W/L749F/L750D/I775G/ | | | | | | |
| | | T1148N/L1248D/L1377D/V1439E | | | | | | |
| 2113/2114 | E738Y/D808S/ | V63Q/L171P/H212A/S260T/E306G/ | ++ | ++ | + | ++ | + | ++ |
| | E809G | L318G/M320R/S332P/F387I/I390A/ | | | | | | |
| | | V393G/V534I/M558W/M681G/ | | | | | | |
| | | K732W/L749F/L750D/I775G/ | | | | | | |
| | | D808S/E809G/T1148N/L1248D/ | | | | | | |
| | | L1377D/V1439E | | | | | | |
| 2115/2116 | E738Y/E1076S | V63Q/L171P/H212A/S260T/E306G/ | ++ | + | + | + | + | ++ |
| | | L318G/M320R/S332P/F387I/I390A/ | | | | | | |
| | | V393G/V534I/M558W/M681G/ | | | | | | |
| | | K732W/L749F/L750D/I775G/ | | | | | | |
| | | E1076S/T1148N/L1248D/L1377D/ | | | | | | |
| | | V1439E | | | | | | |
| 2117/2118 | E738Y/E739G | V63Q/L171P/H212A/S260T/E306G/ | ++ | + | + | ++ | + | + |
| | | L318G/M320R/S332P/F387I/I390A/ | | | | | | |
| | | V393G/V534I/M558W/M681G/ | | | | | | |
| | | K732W/E739G/L749F/L750D/ | | | | | | |
| | | I775G/T1148N/L1248D/L1377D/ | | | | | | |
| | | V1439E | | | | | | |
| 2119/2120 | E738Y/E739G/ | V63Q/L171P/H212A/S260T/E306G/ | ++ | + | + | ++ | ++ | + |
| | E809G | L318G/M320R/S332P/F387I/I390A/ | | | | | | |
| | | V393G/V534I/M558W/M681G/ | | | | | | |
| | | K732W/E739G/L749F/L750D/ | | | | | | |
| | | I775G/E809G/T1148N/L1248D/ | | | | | | |
| | | L1377D/V1439E | | | | | | |
| 2121/2122 | E738Y/E739G/ | V63Q/L171P/H212A/S260T/E306G/ | + | + | + | ++ | ++ | ++ |
| | E809G/K1093G/ | L318G/M320R/S332P/F387I/I390A/ | | | | | | |
| | S1116I | V393G/V534I/M558W/M681G/ | | | | | | |
| | | K732W/E739G/L749F/L750D/ | | | | | | |
| | | I775G/E809G/K1093G/S1116I/ | | | | | | |
| | | T1148N/L1248D/L1377D/V1439E | | | | | | |
| 2123/2124 | E738Y/E739G/ | V63Q/L171P/H212A/S260T/E306G/ | +++ | ++ | + | ++ | + | ++ |
| | K1093G | L318G/M320R/S332P/F387I/I390A/ | | | | | | |
| | | V393G/V534I/M558W/M681G/ | | | | | | |
| | | K732W/E739G/L749F/L750D/ | | | | | | |
| | | I775G/K1093G/T1148N/L1248D/ | | | | | | |
| | | L1377D/V1439E | | | | | | |
| 2125/2126 | E738Y/E739G/ | V63Q/L171P/H212A/S260T/E306G/ | ++ | ++ | ++ | ++ | ++ | ++ |
| | K752E/K1093G | L318G/M320R/S332P/F387I/I390A/ | | | | | | |
| | | V393G/V534I/M558W/M681G/ | | | | | | |
| | | K732W/E739G/L749F/L750D/ | | | | | | |
| | | K752E/I775G/K1093G/T1148N/ | | | | | | |
| | | L1248D/L1377D/V1439E | | | | | | |
| 2127/2128 | E738Y/E739G/ | V63Q/L171P/H212A/S260T/E306G/ | ++ | + | + | ++ | ++ | |
| | K799S/E800V/ | L318G/M320R/S332P/F387I/I390A/ | | | | | | |
| | K1093G | V393G/V534I/M558W/M681G/ | | | | | | |
| | | K732W/E739G/L749F/L750D/ | | | | | | |
| | | I775G/K799S/E800V/K1093G/ | | | | | | |
| | | T1148N/L1248D/L1377D/V1439E | | | | | | |
| 2129/2130 | E738Y/E739G/ | V63Q/L171P/H212A/S260T/E306G/ | ++ | + | + | + | + | |
| | S1116I | L318G/M320R/S332P/F387I/I390A/ | | | | | | |
| | | V393G/V534I/M558W/M681G/ | | | | | | |
| | | K732W/E739G/L749F/L750D/ | | | | | | |
| | | I775G/S1116I/T1148N/L1248D/ | | | | | | |
| | | L1377D/V1439E | | | | | | |
| 2131/2132 | E738Y/E800V | V63Q/L171P/H212A/S260T/E306G/ | ++ | + | + | + | + | |
| | | L318G/M320R/S332P/F387I/I390A/ | | | | | | |
| | | V393G/V534I/M558W/M681G/ | | | | | | |
| | | K732W/L749F/L750D/I775G/ | | | | | | |
| | | E800V/T1148N/L1248D/L1377D/ | | | | | | |
| | | V1439E | | | | | | |
| 2133/2134 | E738Y/K1093G | V63Q/L171P/H212A/S260T/E306G/ | ++ | ++ | + | ++ | ++ | |
| | | L318G/M320R/S332P/F387I/I390A/ | | | | | | |
| | | V393G/V534I/M558W/M681G/ | | | | | | |
| | | K732W/L749F/L750D/I775G/ | | | | | | |
| | | K1093G/T1148N/L1248D/L1377D/ | | | | | | |
| | | V1439E | | | | | | |
| 2135/2136 | E738Y/K752E | V63Q/L171P/H212A/S260T/E306G/ | + | ++ | + | ++ | ++ | ++ |
| | | L318G/M320R/S332P/F387I/I390A/ | | | | | | |
| | | V393G/V534I/M558W/M681G/ | | | | | | |
| | | K732W/L749F/L750D/K752E/ | | | | | | |
| | | I775G/T1148N/L1248D/L1377D/ | | | | | | |
| | | V1439E | | | | | | |
| 2137/2138 | E738Y/K752E/ | V63Q/L171P/H212A/S260T/E306G/ | +++ | ++ | + | ++ | ++ | |
| | K1093G | L318G/M320R/S332P/F387I/I390A/ | | | | | | |
| | | V393G/V534I/M558W/M681G/ | | | | | | |
| | | K732W/L749F/L750D/K752E/ | | | | | | |
| | | I775G/K1093G/T1148N/L1248D/ | | | | | | |
| | | L1377D/V1439E | | | | | | |
| 2139/2140 | E738Y/K752E/ | V63Q/L171P/H212A/S260T/E306G/ | ++ | + | + | + | + | |
| | K799S | L318G/M320R/S332P/F387I/I390A/ | | | | | | |
| | | V393G/V534I/M558W/M681G/ | | | | | | |
| | | K732W/L749F/L750D/K752E/ | | | | | | |
| | | I775G/K799S/T1148N/L1248D/ | | | | | | |
| | | L1377D/V1439E | | | | | | |
| 2141/2142 | E738Y/K799S/ | V63Q/L171P/H212A/S260T/E306G/ | + | + | + | ++ | ++ | ++ |
| | E809G/K1093G | L318G/M320R/S332P/F387I/I390A/ | | | | | | |
| | | V393G/V534I/M558W/M681G/ | | | | | | |
| | | K732W/L749F/L750D/I775G/ | | | | | | |
| | | K799S/E809G/K1093G/T1148N/ | | | | | | |
| | | L1248D/L1377D/V1439E | | | | | | |
| 2143/2144 | E738Y/K799S/ | V63Q/L171P/H212A/S260T/E306G/ | ++ | + | ++ | + | ++ | ++ |
| | K1093G | L318G/M320R/S332P/F387I/I390A/ | | | | | | |
| | | V393G/V534I/M558W/M681G/ | | | | | | |
| | | K732W/L749F/L750D/I775G/ | | | | | | |
| | | K799S/K1093G/T1148N/L1248D/ | | | | | | |
| | | L1377D/V1439E | | | | | | |
| 2145/2146 | E739G | V63Q/L171P/H212A/S260T/E306G/ | ++ | + | + | + | + | ++ |
| | | L318G/M320R/S332P/F387I/I390A/ | | | | | | |
| | | V393G/V534I/M558W/M681G/ | | | | | | |
| | | K732W/Y738E/E739G/L749F/ | | | | | | |
| | | L750D/I775G/T1148N/L1248D/ | | | | | | |
| | | L1377D/V1439E | | | | | | |
| 2147/2148 | E739G/E800V/ | V63Q/L171P/H212A/S260T/E306G/ | ++ | + | + | + | + | + |
| | E809G | L318G/M320R/S332P/F387I/I390A/ | | | | | | |
| | | V393G/V534I/M558W/M681G/ | | | | | | |
| | | K732W/Y738E/E739G/L749F/ | | | | | | |
| | | L750D/I775G/E800V/E809G/T1148N/ | | | | | | |
| | | L1248D/L1377D/V1439E | | | | | | |
| 2149/2150 | E800V | V63Q/L171P/H212A/S260T/E306G/ | ++ | + | + | + | + | |
| | | L318G/M320R/S332P/F387I/I390A/ | | | | | | |
| | | V393G/V534I/M558W/M681G/ | | | | | | |
| | | K732W/Y738E/L749F/L750D/ | | | | | | |
| | | I775G/E800V/T1148N/L1248D/ | | | | | | |
| | | L1377D/V1439E | | | | | | |
| 2151/2152 | E800V/Y805Q/ | V63Q/L171P/H212A/S260T/E306G/ | ++ | ++ | + | + | ++ | ++ |
| | E809G | L318G/M320R/S332P/F387I/I390A/ | | | | | | |
| | | V393G/V534I/M558W/M681G/ | | | | | | |
| | | K732W/Y738E/L749F/L750D/ | | | | | | |
| | | I775G/E800V/Y805Q/E809G/ | | | | | | |
| | | T1148N/L1248D/L1377D/V1439E | | | | | | |
| 2153/2154 | E809G | V63Q/L171P/H212A/S260T/E306G/ | ++++ | + | + | ++ | + | + |
| | | L318G/M320R/S332P/F387I/I390A/ | | | | | | |
| | | V393G/V534I/M558W/M681G/ | | | | | | |
| | | K732W/Y738E/L749F/L750D/ | | | | | | |
| | | I775G/E809G/T1148N/L1248D/ | | | | | | |
| | | L1377D/V1439E | | | | | | |
| 2155/2156 | E809G/K1093G | V63Q/L171P/H212A/S260T/E306G/ | ++ | + | ++ | ++ | + | |
| | | L318G/M320R/S332P/F387I/I390A/ | | | | | | |
| | | V393G/V534I/M558W/M681G/ | | | | | | |
| | | K732W/Y738E/L749F/L750D/ | | | | | | |
| | | I775G/E809G/K1093G/T1148N/ | | | | | | |
| | | L1248D/L1377D/V1439E | | | | | | |
| 2157/2158 | E809G/K1093G/ | V63Q/L171P/H212A/S260T/E306G/ | ++ | + | ++ | + | + | ++ |
| | S1116I | L318G/M320R/S332P/F387I/I390A/ | | | | | | |
| | | V393G/V534I/M558W/M681G/ | | | | | | |
| | | K732W/Y738E/L749F/L750D/ | | | | | | |
| | | I775G/E809G/K1093G/S1116I/ | | | | | | |
| | | T1148N/L1248D/L1377D/V1439E | | | | | | |
| 2159/2160 | E809G/S1116I | V63Q/L171P/H212A/S260T/E306G/ | ++ | + | + | ++ | + | ++ |
| | | L318G/M320R/S332P/F387I/I390A/ | | | | | | |
| | | V393G/V534I/M558W/M681G/ | | | | | | |
| | | K732W/Y738E/L749F/L750D/ | | | | | | |
| | | I775G/E809G/S1116I/T1148N/ | | | | | | |
| | | L1248D/L1377D/V1439E | | | | | | |
| 2161/2162 | G318L | V63Q/L171P/H212A/S260T/E306G/ | +++ | + | ++ | ++ | ++ | ++ |
| | | M320R/S332P/F387I/I390A/ | | | | | | |
| | | V393G/V534I/M558W/M681G/K732W/ | | | | | | |
| | | Y738E/L749F/L750D/I775G/ | | | | | | |
| | | T1148N/L1248D/L1377D/V1439E | | | | | | |
| 2163/2164 | G318L/E1076S | V63Q/L171P/H212A/S260T/E306G/ | +++ | ++ | + | ++ | ++ | ++ |
| | | M320R/S332P/F387I/I390A/ | | | | | | |
| | | V393G/V534I/M558W/M681G/K732W/ | | | | | | |
| | | Y738E/L749F/L750D/I775G/ | | | | | | |
| | | E1076S/T1148N/L1248D/L1377D/ | | | | | | |
| | | V1439E | | | | | | |
| 2165/2166 | G318L/E1076S/ | V63Q/L171P/H212A/S260T/E306G/ | ++ | + | + | ++ | ++ | ++ |
| | S1116I | M320R/S332P/F387I/I390A/ | | | | | | |
| | | V393G/V534I/M558W/M681G/K732W/ | | | | | | |
| | | Y738E/L749F/L750D/I775G/ | | | | | | |
| | | E1076S/S1116I/T1148N/L1248D/ | | | | | | |
| | | L1377D/V1439E | | | | | | |
| 2167/2168 | G318L/E739G/ | V63Q/L171P/H212A/S260T/E306G/ | ++ | ++ | ++ | ++ | ++ | ++ |
| | Y805Q/D808S/ | M320R/S332P/F387I/I390A/ | | | | | | |
| | E809G/E1076S | V393G/V534I/M558W/M681G/K732W/ | | | | | | |
| | | Y738E/E739G/L749F/L750D/ | | | | | | |
| | | I775G/Y805Q/D808S/E809G/ | | | | | | |
| | | E1076S/T1148N/L1248D/L1377D/ | | | | | | |
| | | V1439E | | | | | | |
| 2169/2170 | G318L/I499L/S700E/ | V63Q/L171P/H212A/S260T/E306G/ | ++++ | ++ | + | ++ | ++ | +++ |
| | E738Y/E809G | M320R/S332P/F387I/I390A/ | | | | | | |
| | | V393G/I499L/V534I/M558W/M681G/ | | | | | | |
| | | S700E/K732W/L749F/L750D/ | | | | | | |
| | | I775G/E809G/T1148N/L1248D/ | | | | | | |
| | | L1377D/V1439E | | | | | | |
| 2171/2172 | G318L/K1093A | V63Q/L171P/H212A/S260T/E306G/ | ++ | ++ | ++ | ++ | ++ | ++ |
| | | M320R/S332P/F387I/I390A/ | | | | | | |
| | | V393G/V534I/M558W/M681G/K732W/ | | | | | | |
| | | Y738E/L749F/L750D/I775G/ | | | | | | |
| | | K1093A/T1148N/L1248D/L1377D/ | | | | | | |
| | | V1439E | | | | | | |
| 2173/2174 | G318L/K752E/ | V63Q/L171P/H212A/S260T/E306G/ | ++ | ++ | ++ | ++ | ++ | +++ |
| | K1093A | M320R/S332P/F387I/I390A/ | | | | | | |
| | | V393G/V534I/M558W/M681G/K732W/ | | | | | | |
| | | Y738E/L749F/L750D/K752E/ | | | | | | |
| | | I775G/K1093A/T1148N/L1248D/ | | | | | | |
| | | L1377D/V1439E | | | | | | |
| 2175/2176 | G318L/S1116I | V63Q/L171P/H212A/S260T/E306G/ | ++ | ++ | + | ++ | ++ | ++ |
| | | M320R/S332P/F387I/I390A/ | | | | | | |
| | | V393G/V534I/M558W/M681G/K732W/ | | | | | | |
| | | Y738E/L749F/L750D/I775G/ | | | | | | |
| | | S1116I/T1148N/L1248D/L1377D/ | | | | | | |
| | | V1439E | | | | | | |
| 2177/2178 | G318L/S543P/ | V63Q/L171P/H212A/S260T/E306G/ | ++ | + | + | ++ | ++ | ++ |
| | E739G | M320R/S332P/F387I/I390A/ | | | | | | |
| | | V393G/V534I/S543P/M558W/M681G/ | | | | | | |
| | | K732W/Y738E/E739G/L749F/ | | | | | | |
| | | L750D/I775G/T1148N/L1248D/ | | | | | | |
| | | L1377D/V1439E | | | | | | |
| 2179/2180 | G318L/S543P/ | V63Q/L171P/H212A/S260T/E306G/ | ++ | ++ | + | ++ | ++ | +++ |
| | G68IN/K752E/ | M320R/S332P/F387I/I390A/ | | | | | | |
| | S1116I | V393G/V534I/S543P/M558W/M681N/ | | | | | | |
| | | K732W/Y738E/L749F/L750D/ | | | | | | |
| | | K752E/I775G/S1116I/T1148N/ | | | | | | |
| | | L1248D/L1377D/V1439E | | | | | | |
| 2181/2182 | G318L/S543P/ | V63Q/L171P/H212A/S260T/E306G/ | ++ | + | + | ++ | ++ | ++ |
| | K1093A | M320R/S332P/F387I/I390A/ | | | | | | |
| | | V393G/V534I/S543P/M558W/M681G/ | | | | | | |
| | | K732W/Y738E/L749F/L750D/ | | | | | | |
| | | I775G/K1093A/T1148N/L1248D/ | | | | | | |
| | | L1377D/V1439E | | | | | | |
| 2183/2184 | G318L/S700E/E738Y/ | V63Q/L171P/H212A/S260T/E306G/ | +++ | ++ | + | ++ | ++ | ++++ |
| | K1093A/S1414N | M320R/S332P/F387I/I390A/ | | | | | | |
| | | V393G/V534I/M558W/M681G/S700E/ | | | | | | |
| | | K732W/L749F/L750D/I775G/ | | | | | | |
| | | K1093A/T1148N/L1248D/L1377D/ | | | | | | |
| | | S1414N/V1439E | | | | | | |
| 2185/2186 | G681N | V63Q/L171P/H212A/S260T/E306G/ | ++ | ++ | + | ++ | + | ++ |
| | | L318G/M320R/S332P/F387I/I390A/ | | | | | | |
| | | V393G/V534I/M558W/M681N/ | | | | | | |
| | | K732W/Y738E/L749F/L750D/ | | | | | | |
| | | I775G/T1148N/L1248D/L1377D/ | | | | | | |
| | | V1439E | | | | | | |
| 2187/2188 | G681N/E738Y | V63Q/L171P/H212A/S260T/E306G/ | ++ | ++ | + | + | + | ++ |
| | | L318G/M320R/S332P/F387I/I390A/ | | | | | | |
| | | V393G/V534I/M558W/M681N/ | | | | | | |
| | | K732W/L749F/L750D/I775G/ | | | | | | |
| | | T1148N/L1248D/L1377D/V1439E | | | | | | |
| 2189/2190 | G681N/E738Y/ | V63Q/L171P/H212A/S260T/E306G/ | ++ | + | ++ | + | ++ | ++ |
| | E739G/K1093G | L318G/M320R/S332P/F387I/I390A/ | | | | | | |
| | | V393G/V534I/M558W/M681N/ | | | | | | |
| | | K732W/E739G/L749F/L750D/ | | | | | | |
| | | I775G/K1093G/T1148N/L1248D/ | | | | | | |
| | | L1377D/V1439E | | | | | | |
| 2191/2192 | G681N/E738Y/E739G/ | V63Q/L171P/H212A/S260T/E306G/ | ++ | ++ | + | + | + | |
| | K752E/K799S/ | L318G/M320R/S332P/F387I/I390A/ | | | | | | |
| | E800V/E809G/ | V393G/V534I/M558W/M681N/ | | | | | | |
| | S1116I/G1339C | K732W/E739G/L749F/L750D/ | | | | | | |
| | | K752E/I775G/K799S/E800V/E809G/ | | | | | | |
| | | S1116I/T1148N/L1248D/G1339C/ | | | | | | |
| | | L1377D/V1439E | | | | | | |
| 2193/2194 | G681N/E738Y/ | V63Q/L171P/H212A/S260T/E306G/ | +++ | ++ | + | ++ | + | ++ |
| | E739G/S1116I | L318G/M320R/S332P/F387I/I390A/ | | | | | | |
| | | V393G/V534I/M558W/M681N/ | | | | | | |
| | | K732W/E739G/L749F/L750D/ | | | | | | |
| | | I775G/S1116I/T1148N/L1248D/ | | | | | | |
| | | L1377D/V1439E | | | | | | |
| 2195/2196 | G681N/E738Y/ | V63Q/L171P/H212A/S260T/E306G/ | ++ | ++ | + | ++ | + | |
| | E800V | L318G/M320R/S332P/F387I/I390A/ | | | | | | |
| | | V393G/V534I/M558W/M681N/ | | | | | | |
| | | K732W/L749F/L750D/I775G/ | | | | | | |
| | | E800V/T1148N/L1248D/L1377D/ | | | | | | |
| | | V1439E | | | | | | |
| 2197/2198 | G681N/E800V/ | V63Q/L171P/H212A/S260T/E306G/ | ++++ | ++ | + | ++ | ++ | ++ |
| | Y805Q/E809G | L318G/M320R/S332P/F387I/I390A/ | | | | | | |
| | | V393G/V534I/M558W/M681N/ | | | | | | |
| | | K732W/Y738E/L749F/L750D/ | | | | | | |
| | | I775G/E800V/Y805Q/E809G/ | | | | | | |
| | | T1148N/L1248D/L1377D/V1439E | | | | | | |
| 2199/2200 | G681N/E809G/ | V63Q/L171P/H212A/S260T/E306G/ | ++ | ++ | ++ | + | ++ | |
| | K1093G | L318G/M320R/S332P/F387I/I390A/ | | | | | | |
| | | V393G/V534I/M558W/M681N/ | | | | | | |
| | | K732W/Y738E/L749F/L750D/ | | | | | | |
| | | I775G/E809G/K1093G/T1148N/ | | | | | | |
| | | L1248D/L1377D/V1439E | | | | | | |
| 2201/2202 | G681N/K752E/ | V63Q/L171P/H212A/S260T/E306G/ | ++ | ++ | + | + | ++ | +++ |
| | K1093A | L318G/M320R/S332P/F387I/I390A/ | | | | | | |
| | | V393G/V534I/M558W/M681N/ | | | | | | |
| | | K732W/Y738E/L749F/L750D/ | | | | | | |
| | | K752E/I775G/K1093A/T1148N/ | | | | | | |
| | | L1248D/L1377D/V1439E | | | | | | |
| 2203/2204 | G681N/K752E/ | V63Q/L171P/H212A/S260T/E306G/ | ++ | ++ | + | ++ | ++ | +++ |
| | K1093G | L318G/M320R/S332P/F387I/I390A/ | | | | | | |
| | | V393G/V534I/M558W/M681N/ | | | | | | |
| | | K732W/Y738E/L749F/L750D/ | | | | | | |
| | | K752E/I775G/K1093G/T1148N/ | | | | | | |
| | | L1248D/L1377D/V1439E | | | | | | |
| 2205/2206 | G681N/S700E | V63Q/L171P/H212A/S260T/E306G/ | ++ | ++ | + | ++ | ++ | ++ |
| | | L318G/M320R/S332P/F387I/I390A/ | | | | | | |
| | | V393G/V534I/M558W/M681N/ | | | | | | |
| | | S700E/K732W/Y738E/L749F/ | | | | | | |
| | | L750D/I775G/T1148N/L1248D/ | | | | | | |
| | | L1377D/V1439E | | | | | | |
| 2207/2208 | G681N/S700E/ | V63Q/L171P/H212A/S260T/E306G/ | ++ | ++ | + | ++ | + | ++ |
| | E738Y/E739G/ | L318G/M320R/S332P/F387I/I390A/ | | | | | | |
| | K1093G/S1116I | V393G/V534I/M558W/M681N/ | | | | | | |
| | | S700E/K732W/E739G/L749F/ | | | | | | |
| | | L750D/I775G/K1093G/S1116I/ | | | | | | |
| | | T1148N/L1248D/L1377D/V1439E | | | | | | |
| 2209/2210 | G681N/S700E/ | V63Q/L171P/H212A/S260T/E306G/ | + | + | + | ++ | + | ++ |
| | E809G | L318G/M320R/S332P/F387I/I390A/ | | | | | | |
| | | V393G/V534I/M558W/M681N/ | | | | | | |
| | | S700E/K732W/Y738E/L749F/ | | | | | | |
| | | L750D/I775G/E809G/T1148N/ | | | | | | |
| | | L1248D/L1377D/V1439E | | | | | | |
| 2211/2212 | G681N/S700E/ | V63Q/L171P/H212A/S260T/E306G/ | ++ | ++ | + | ++ | ++ | ++ |
| | K1093G | L318G/M320R/S332P/F387I/I390A/ | | | | | | |
| | | V393G/V534I/M558W/M681N/ | | | | | | |
| | | S700E/K732W/Y738E/L749F/ | | | | | | |
| | | L750D/I775G/K1093G/T1148N/ | | | | | | |
| | | L1248D/L1377D/V1439E | | | | | | |
| 2213/2214 | G681N/S700E/ | V63Q/L171P/H212A/S260T/E306G/ | + | ++ | ++ | + | ++ | |
| | K752E/D808S/ | L318G/M320R/S332P/F387I/I390A/ | | | | | | |
| | E809G/K1093G/ | V393G/V534I/M558W/M681N/ | | | | | | |
| | S1116I | S700E/K732W/Y738E/L749F/ | | | | | | |
| | | L750D/K752E/I775G/D808S/E809G/ | | | | | | |
| | | K1093G/S1116I/T1148N/L1248D/ | | | | | | |
| | | L1377D/V1439E | | | | | | |
| 2215/2216 | G681N/S700E/ | V63Q/L171P/H212A/S260T/E306G/ | +++ | ++ | ++ | ++ | ++ | |
| | K752E/K1093G | L318G/M320R/S332P/F387I/I390A/ | | | | | | |
| | | V393G/V534I/M558W/M681N/ | | | | | | |
| | | S700E/K732W/Y738E/L749F/ | | | | | | |
| | | L750D/K752E/I775G/K1093G/ | | | | | | |
| | | T1148N/L1248D/L1377D/V1439E | | | | | | |
| 2217/2218 | G681N/S700E/ | V63Q/L171P/H212A/S260T/E306G/ | + | + | + | + | + | ++ |
| | R844H | L318G/M320R/S332P/F387I/I390A/ | | | | | | |
| | | V393G/V534I/M558W/M681N/ | | | | | | |
| | | S700E/K732W/Y738E/L749F/ | | | | | | |
| | | L750D/I775G/R844H/T1148N/ | | | | | | |
| | | L1248D/L1377D/V1439E | | | | | | |
| 2219/2220 | G681N/S700E/ | V63Q/L171P/H212A/S260T/E306G/ | ++ | ++ | ++ | ++ | + | ++ |
| | Y805Q/E809G | L318G/M320R/S332P/F387I/I390A/ | | | | | | |
| | | V393G/V534I/M558W/M681N/ | | | | | | |
| | | S700E/K732W/Y738E/L749F/ | | | | | | |
| | | L750D/I775G/Y805Q/E809G/T1148N/ | | | | | | |
| | | L1248D/L1377D/V1439E | | | | | | |
| 2221/2222 | K1093A | V63Q/L171P/H212A/S260T/E306G/ | ++ | ++ | + | + | ++ | |
| | | L318G/M320R/S332P/F387I/I390A/ | | | | | | |
| | | V393G/V534I/M558W/M681G/ | | | | | | |
| | | K732W/Y738E/L749F/L750D/ | | | | | | |
| | | I775G/K1093A/T1148N/L1248D/ | | | | | | |
| | | L1377D/V1439E | | | | | | |
| 2223/2224 | K1093G | V63Q/L171P/H212A/S260T/E306G/ | ++ | + | + | ++ | + | + |
| | | L318G/M320R/S332P/F387I/I390A/ | | | | | | |
| | | V393G/V534I/M558W/M681G/ | | | | | | |
| | | K732W/Y738E/L749F/L750D/ | | | | | | |
| | | I775G/K1093G/T1148N/L1248D/ | | | | | | |
| | | L1377D/V1439E | | | | | | |
| 2225/2226 | K1093G/S1116I | V63Q/L171P/H212A/S260T/E306G/ | ++ | ++ | + | ++ | ++ | ++ |
| | | L318G/M320R/S332P/F387I/I390A/ | | | | | | |
| | | V393G/V534I/M558W/M681G/ | | | | | | |
| | | K732W/Y738E/L749F/L750D/ | | | | | | |
| | | I775G/K1093G/S1116I/T1148N/ | | | | | | |
| | | L1248D/L1377D/V1439E | | | | | | |
| 2227/2228 | K752E | V63Q/L171P/H212A/S260T/E306G/ | ++ | + | ++ | ++ | + | |
| | | L318G/M320R/S332P/F387I/I390A/ | | | | | | |
| | | V393G/V534I/M558W/M681G/ | | | | | | |
| | | K732W/Y738E/L749F/L750D/ | | | | | | |
| | | K752E/I775G/T1148N/L1248D/ | | | | | | |
| | | L1377D/V1439E | | | | | | |
| 2229/2230 | K752E/E1076S | V63Q/L171P/H212A/S260T/E306G/ | ++ | ++ | + | + | ++ | ++ |
| | | L318G/M320R/S332P/F387I/I390A/ | | | | | | |
| | | V393G/V534I/M558W/M681G/ | | | | | | |
| | | K732W/Y738E/L749F/L750D/ | | | | | | |
| | | K752E/I775G/E1076S/T1148N/ | | | | | | |
| | | L1248D/L1377D/V1439E | | | | | | |
| 2231/2232 | K752E/E800V/ | V63Q/L171P/H212A/S260T/E306G/ | ++ | ++ | + | + | + | ++ |
| | E809G | L318G/M320R/S332P/F387I/I390A/ | | | | | | |
| | | V393G/V534I/M558W/M681G/ | | | | | | |
| | | K732W/Y738E/L749F/L750D/ | | | | | | |
| | | K752E/I775G/E800V/E809G/T1148N/ | | | | | | |
| | | L1248D/L1377D/V1439E | | | | | | |
| 2233/2234 | K752E/E800V/ | V63Q/L171P/H212A/S260T/E306G/ | ++ | ++ | + | ++ | ++ | ++ |
| | K1093G | L318G/M320R/S332P/F387I/I390A/ | | | | | | |
| | | V393G/V534I/M558W/M681G/ | | | | | | |
| | | K732W/Y738E/L749F/L750D/ | | | | | | |
| | | K752E/I775G/E800V/K1093G/ | | | | | | |
| | | T1148N/L1248D/L1377D/V1439E | | | | | | |
| 2235/2236 | K752E/E809G | V63Q/L171P/H212A/S260T/E306G/ | + | + | + | + | + | ++ |
| | | L318G/M320R/S332P/F387I/I390A/ | | | | | | |
| | | V393G/V534I/M558W/M681G/ | | | | | | |
| | | K732W/Y738E/L749F/L750D/ | | | | | | |
| | | K752E/I775G/E809G/T1148N/ | | | | | | |
| | | L1248D/L1377D/V1439E | | | | | | |
| 2237/2238 | K752E/G866A | V63Q/L171P/H212A/S260T/E306G/ | ++ | ++ | + | + | + | |
| | | L318G/M320R/S332P/F387I/I390A/ | | | | | | |
| | | V393G/V534I/M558W/M681G/ | | | | | | |
| | | K732W/Y738E/L749F/L750D/ | | | | | | |
| | | K752E/I775G/G866A/T1148N/ | | | | | | |
| | | L1248D/L1377D/V1439E | | | | | | |
| 2239/2240 | K752E/K1093G | V63Q/L171P/H212A/S260T/E306G/ | + | ++ | ++ | ++ | ++ | ++ |
| | | L318G/M320R/S332P/F387I/I390A/ | | | | | | |
| | | V393G/V534I/M558W/M681G/ | | | | | | |
| | | K732W/Y738E/L749F/L750D/ | | | | | | |
| | | K752E/I775G/K1093G/T1148N/ | | | | | | |
| | | L1248D/L1377D/V1439E | | | | | | |
| 2241/2242 | K752E/S1116I | V63Q/L171P/H212A/S260T/E306G/ | + | + | + | + | + | ++ |
| | | L318G/M320R/S332P/F387I/I390A/ | | | | | | |
| | | V393G/V534I/M558W/M681G/ | | | | | | |
| | | K732W/Y738E/L749F/L750D/ | | | | | | |
| | | K752E/I775G/S1116I/T1148N/ | | | | | | |
| | | L1248D/L1377D/V1439E | | | | | | |
| 2243/2244 | L178Q/G318L/E739G/ | V63Q/L171P/L178Q/H212A/S260T/ | ++ | ++ | + | ++ | ++ | ++ |
| | K752E/E809G/ | E306G/M320R/S332P/F387I/I390A/ | | | | | | |
| | E1076S/S1116I | V393G/V534I/M558W/M681G/ | | | | | | |
| | | K732W/Y738E/E739G/L749F/ | | | | | | |
| | | L750D/K752E/I775G/E809G/E1076S/ | | | | | | |
| | | S1116I/T1148N/L1248D/L1377D/ | | | | | | |
| | | V1439E | | | | | | |
| 2245/2246 | L178Q/G318L/ | V63Q/L171P/L178Q/H212A/S260T/ | ++ | + | + | ++ | ++ | ++ |
| | E800V/E809G | E306G/M320R/S332P/F387I/I390A/ | | | | | | |
| | | V393G/V534I/M558W/M681G/ | | | | | | |
| | | K732W/Y738E/L749F/L750D/ | | | | | | |
| | | I775G/E800V/E809G/T1148N/ | | | | | | |
| | | L1248D/L1377D/V1439E | | | | | | |
| 2247/2248 | L178Q/G318L/G681N/ | V63Q/L171P/L178Q/H212A/S260T/ | ++ | ++ | + | ++ | ++ | ++ |
| | E800V/D808S/ | E306G/M320R/S332P/F387I/I390A/ | | | | | | |
| | E809G/E1076S | V393G/V534I/M558W/M681N/ | | | | | | |
| | | K732W/Y738E/L749F/L750D/ | | | | | | |
| | | I775G/E800V/D808S/E809G/E1076S/ | | | | | | |
| | | T1148N/L1248D/L1377D/ | | | | | | |
| | | V1439E | | | | | | |
| 2249/2250 | L178Q/G681N | V63Q/L171P/L178Q/H212A/S260T/ | ++ | ++ | + | ++ | ++ | ++ |
| | | E306G/L318G/M320R/S332P/ | | | | | | |
| | | F387I/I390A/V393G/V534I/M558W/ | | | | | | |
| | | M681N/K732W/Y738E/L749F/ | | | | | | |
| | | L750D/I775G/T1148N/L1248D/ | | | | | | |
| | | L1377D/V1439E | | | | | | |
| 2251/2252 | L178Q/G681N/ | V63Q/L171P/L178Q/H212A/S260T/ | ++ | ++ | + | ++ | ++ | ++ |
| | E738Y/S1116I | E306G/L318G/M320R/S332P/ | | | | | | |
| | | F387I/I390A/V393G/V534I/M558W/ | | | | | | |
| | | M681N/K732W/L749F/L750D/ | | | | | | |
| | | I775G/S1116I/T1148N/L1248D/ | | | | | | |
| | | L1377D/V1439E | | | | | | |
| 2253/2254 | L178Q/K752E/ | V63Q/L171P/L178Q/H212A/S260T/ | + | ++ | + | ++ | + | ++ |
| | E809G | E306G/L318G/M320R/S332P/ | | | | | | |
| | | F387I/I390A/V393G/V534I/M558W/ | | | | | | |
| | | M681G/K732W/Y738E/L749F/ | | | | | | |
| | | L750D/K752E/I775G/E809G/T1148N/ | | | | | | |
| | | L1248D/L1377D/V1439E | | | | | | |
| 2255/2256 | L178Q/S700E/E800V/ | V63Q/L171P/L178Q/H212A/S260T/ | ++ | ++ | + | ++ | + | ++ |
| | Y805Q/D808S/ | E306G/L318G/M320R/S332P/ | | | | | | |
| | E809G | F387I/I390A/V393G/V534I/M558W/ | | | | | | |
| | | M681G/S700E/K732W/Y738E/ | | | | | | |
| | | L749F/L750D/I775G/E800V/Y805Q/ | | | | | | |
| | | D808S/E809G/T1148N/L1248D/ | | | | | | |
| | | L1377D/V1439E | | | | | | |
| 2257/2258 | L178Q/Y805Q/ | V63Q/L171P/L178Q/H212A/S260T/ | ++ | + | + | ++ | ++ | + |
| | E809G/G866A | E306G/L318G/M320R/S332P/ | | | | | | |
| | | F387I/I390A/V393G/V534I/M558W/ | | | | | | |
| | | M681G/K732W/Y738E/L749F/ | | | | | | |
| | | L750D/I775G/Y805Q/E809G/G866A/ | | | | | | |
| | | T1148N/L1248D/L1377D/ | | | | | | |
| | | V1439E | | | | | | |
| 2259/2260 | S1116I | V63Q/L171P/H212A/S260T/E306G/ | ++ | + | + | + | + | |
| | | L318G/M320R/S332P/F387I/I390A/ | | | | | | |
| | | V393G/V534I/M558W/M681G/ | | | | | | |
| | | K732W/Y738E/L749F/L750D/ | | | | | | |
| | | I775G/S1116I/T1148N/L1248D/ | | | | | | |
| | | L1377D/V1439E | | | | | | |
| 2261/2262 | S543P | V63Q/L171P/H212A/S260T/E306G/ | ++ | + | + | + | + | + |
| | | L318G/M320R/S332P/F387I/I390A/ | | | | | | |
| | | V393G/V534I/S543P/M558W/ | | | | | | |
| | | M681G/K732W/Y738E/L749F/ | | | | | | |
| | | L750D/I775G/T1148N/L1248D/ | | | | | | |
| | | L1377D/V1439E | | | | | | |
| 2263/2264 | S543P/E738Y/E739G/ | V63Q/L171P/H212A/S260T/E306G/ | ++ | ++ | + | ++ | + | |
| | E809G | L318G/M320R/S332P/F387I/I390A/ | | | | | | |
| | | V393G/V534I/S543P/M558W/ | | | | | | |
| | | M681G/K732W/E739G/L749F/ | | | | | | |
| | | L750D/I775G/E809G/T1148N/L1248D/ | | | | | | |
| | | L1377D/V1439E | | | | | | |
| 2265/2266 | S543P/E738Y/E809G/ | V63Q/L171P/H212A/S260T/E306G/ | ++ | + | + | + | + | ++ |
| | K1093G | L318G/M320R/S332P/F387I/I390A/ | | | | | | |
| | | V393G/V534I/S543P/M558W/ | | | | | | |
| | | M681G/K732W/L749F/L750D/ | | | | | | |
| | | I775G/E809G/K1093G/T1148N/ | | | | | | |
| | | L1248D/L1377D/V1439E | | | | | | |
| 2267/2268 | S543P/E739G/ | V63Q/L171P/H212A/S260T/E306G/ | ++ | + | + | + | ++ | + |
| | K1093A | L318G/M320R/S332P/F387I/I390A/ | | | | | | |
| | | V393G/V534I/S543P/M558W/ | | | | | | |
| | | M681G/K732W/Y738E/E739G/ | | | | | | |
| | | L749F/L750D/I775G/K1093A/ | | | | | | |
| | | T1148N/L1248D/L1377D/V1439E | | | | | | |
| 2269/2270 | S543P/E800V/ | V63Q/L171P/H212A/S260T/E306G/ | ++ | ++ | + | + | + | |
| | K1093G/S1116I | L318G/M320R/S332P/F387I/I390A/ | | | | | | |
| | | V393G/V534I/S543P/M558W/ | | | | | | |
| | | M681G/K732W/Y738E/L749F/ | | | | | | |
| | | L750D/I775G/E800V/K1093G/S1116I/ | | | | | | |
| | | T1148N/L1248D/L1377D/ | | | | | | |
| | | V1439E | | | | | | |
| 2271/2272 | S543P/E809G/ | V63Q/L171P/H212A/S260T/E306G/ | + | + | + | ++ | ++ | ++ |
| | K1093G | L318G/M320R/S332P/F387I/I390A/ | | | | | | |
| | | V393G/V534I/S543P/M558W/ | | | | | | |
| | | M681G/K732W/Y738E/L749F/ | | | | | | |
| | | L750D/I775G/E809G/K1093G/T1148N/ | | | | | | |
| | | L1248D/L1377D/V1439E | | | | | | |
| 2273/2274 | S543P/E809G/ | V63Q/L171P/H212A/S260T/E306G/ | + | ++ | + | ++ | + | |
| | K1093G/S1116I | L318G/M320R/S332P/F387I/I390A/ | | | | | | |
| | | V393G/V534I/S543P/M558W/ | | | | | | |
| | | M681G/K732W/Y738E/L749F/ | | | | | | |
| | | L750D/I775G/E809G/K1093G/S1116I/ | | | | | | |
| | | T1148N/L1248D/L1377D/ | | | | | | |
| | | V1439E | | | | | | |
| 2275/2276 | S543P/G681N/E738Y/ | V63Q/L171P/H212A/S260T/E306G/ | + | ++ | + | ++ | + | ++ |
| | E739G/K752E/ | L318G/M320R/S332P/F387I/I390A/ | | | | | | |
| | E809G/K1093G | V393G/V534I/S543P/M558W/ | | | | | | |
| | | M681N/K732W/E739G/L749F/ | | | | | | |
| | | L750D/K752E/I775G/E809G/K1093G/ | | | | | | |
| | | T1148N/L1248D/L1377D/ | | | | | | |
| | | V1439E | | | | | | |
| 2277/2278 | S543P/G681N/E738Y/ | V63Q/L171P/H212A/S260T/E306G/ | ++ | ++ | + | ++ | ++ | |
| | E739G/K752E/ | L318G/M320R/S332P/F387I/I390A/ | | | | | | |
| | K1093G | V393G/V534I/S543P/M558W/ | | | | | | |
| | | M681N/K732W/E739G/L749F/ | | | | | | |
| | | L750D/K752E/I775G/K1093G/T1148N/ | | | | | | |
| | | L1248D/L1377D/V1439E | | | | | | |
| 2279/2280 | S543P/G681N/E739G/ | V63Q/L171P/H212A/S260T/E306G/ | +++ | ++ | + | ++ | ++ | |
| | K752E/E800V/ | L318G/M320R/S332P/F387I/I390A/ | | | | | | |
| | Y805Q/E809G/ | V393G/V534I/S543P/M558W/ | | | | | | |
| | K1093G | M681N/K732W/Y738E/E739G/ | | | | | | |
| | | L749F/L750D/K752E/I775G/E800V/ | | | | | | |
| | | Y805Q/E809G/K1093G/T1148N/ | | | | | | |
| | | L1248D/L1377D/V1439E | | | | | | |
| 2281/2282 | S543P/G681N/S700E/ | V63Q/L171P/H212A/S260T/E306G/ | + | ++ | + | + | + | + |
| | E738Y/E739G/ | L318G/M320R/S332P/F387I/I390A/ | | | | | | |
| | E800V/K1093G/ | V393G/V534I/S543P/M558W/ | | | | | | |
| | S1116I | M681N/S700E/K732W/E739G/ | | | | | | |
| | | L749F/L750D/I775G/E800V/K1093G/ | | | | | | |
| | | S1116I/T1148N/L1248D/L1377D/ | | | | | | |
| | | V1439E | | | | | | |
| 2283/2284 | S543P/G681N/S700E/ | V63Q/L171P/H212A/S260T/E306G/ | +++ | ++ | + | + | + | + |
| | E738Y/E739G/ | L318G/M320R/S332P/F387I/I390A/ | | | | | | |
| | Y805Q/D808S/ | V393G/V534I/S543P/M558W/ | | | | | | |
| | E809G | M681N/S700E/K732W/E739G/ | | | | | | |
| | | L749F/L750D/I775G/Y805Q/D808S/ | | | | | | |
| | | E809G/T1148N/L1248D/L1377D/ | | | | | | |
| | | V1439E | | | | | | |
| 2285/2286 | S543P/G681N/S700E/ | V63Q/L171P/H212A/S260T/E306G/ | + | ++ | + | + | + | ++ |
| | K752E | L318G/M320R/S332P/F387I/I390A/ | | | | | | |
| | | V393G/V534I/S543P/M558W/ | | | | | | |
| | | M681N/S700E/K732W/Y738E/ | | | | | | |
| | | L749F/L750D/K752E/I775G/T1148N/ | | | | | | |
| | | L1248D/L1377D/V1439E | | | | | | |
| 2287/2288 | S543P/G681N/S700E/ | V63Q/L171P/H212A/S260T/E306G/ | + | + | + | + | + | ++ |
| | K752E/E809G/ | L318G/M320R/S332P/F387I/I390A/ | | | | | | |
| | K1093G | V393G/V534I/S543P/M558W/ | | | | | | |
| | | M681N/S700E/K732W/Y738E/ | | | | | | |
| | | L749F/L750D/K752E/I775G/E809G/ | | | | | | |
| | | K1093G/T1148N/L1248D/L1377D/ | | | | | | |
| | | V1439E | | | | | | |
| 2289/2290 | S543P/K1093G | V63Q/L171P/H212A/S260T/E306G/ | ++ | + | + | ++ | ++ | ++ |
| | | L318G/M320R/S332P/F387I/I390A/ | | | | | | |
| | | V393G/V534I/S543P/M558W/ | | | | | | |
| | | M681G/K732W/Y738E/L749F/ | | | | | | |
| | | L750D/I775G/K1093G/T1148N/ | | | | | | |
| | | L1248D/L1377D/V1439E | | | | | | |
| 2291/2292 | S543P/S700E | V63Q/L171P/H212A/S260T/E306G/ | +++ | ++ | + | ++ | + | |
| | | L318G/M320R/S332P/F387I/I390A/ | | | | | | |
| | | V393G/V534I/S543P/M558W/ | | | | | | |
| | | M681G/S700E/K732W/Y738E/ | | | | | | |
| | | L749F/L750D/I775G/T1148N/L1248D/ | | | | | | |
| | | L1377D/V1439E | | | | | | |
| 2293/2294 | S543P/S700E/E738Y | V63Q/L171P/H212A/S260T/E306G/ | ++ | ++ | + | + | + | ++ |
| | E739G/K752E/ | L318G/M320R/S332P/F387I/I390A/ | | | | | | |
| | E800V/K1093G/ | V393G/V534I/S543P/M558W/ | | | | | | |
| | S1116I | M681G/S700E/K732W/E739G/ | | | | | | |
| | | L749F/L750D/K752E/I775G/E800V/ | | | | | | |
| | | K1093G/S1116I/T1148N/L1248D/ | | | | | | |
| | | L1377D/V1439E | | | | | | |
| 2295/2296 | S543P/S700E/ | V63Q/L171P/H212A/S260T/E306G/ | + | ++ | + | ++ | ++ | |
| | E809G | L318G/M320R/S332P/F387I/I390A/ | | | | | | |
| | | V393G/V534I/S543P/M558W/ | | | | | | |
| | | M681G/S700E/K732W/Y738E/ | | | | | | |
| | | L749F/L750D/I775G/E809G/T1148N/ | | | | | | |
| | | L1248D/L1377D/V1439E | | | | | | |
| 2297/2298 | S543P/S700E/ | V63Q/L171P/H212A/S260T/E306G/ | + | ++ | + | ++ | + | ++ |
| | K1093G | L318G/M320R/S332P/F387I/I390A/ | | | | | | |
| | | V393G/V534I/S543P/M558W/ | | | | | | |
| | | M681G/S700E/K732W/Y738E/ | | | | | | |
| | | L749F/L750D/I775G/K1093G/T1148N/ | | | | | | |
| | | L1248D/L1377D/V1439E | | | | | | |
| 2299/2300 | S543P/S700E/ | V63Q/L171P/H212A/S260T/E306G/ | + | ++ | + | + | + | ++ |
| | K752E | L318G/M320R/S332P/F387I/I390A/ | | | | | | |
| | | V393G/V534I/S543P/M558W/ | | | | | | |
| | | M681G/S700E/K732W/Y738E/ | | | | | | |
| | | L749F/L750D/K752E/I775G/T1148N/ | | | | | | |
| | | L1248D/L1377D/V1439E | | | | | | |
| 2301/2302 | S543P/S700E/K752E/ | V63Q/L171P/H212A/S260T/E306G/ | + | ++ | + | + | + | ++ |
| | E800V/K1093G | L318G/M320R/S332P/F387I/I390A/ | | | | | | |
| | | V393G/V534I/S543P/M558W/ | | | | | | |
| | | M681G/S700E/K732W/Y738E/ | | | | | | |
| | | L749F/L750D/K752E/I775G/E800V/ | | | | | | |
| | | K1093G/T1148N/L1248D/L1377D/ | | | | | | |
| | | V1439E | | | | | | |
| 2303/2304 | S543P/S700E/K752E/ | V63Q/L171P/H212A/S260T/E306G/ | ++ | ++ | + | + | + | ++ |
| | E809G/S1116I | L318G/M320R/S332P/F387I/I390A/ | | | | | | |
| | | V393G/V534I/S543P/M558W/ | | | | | | |
| | | M681G/S700E/K732W/Y738E/ | | | | | | |
| | | L749F/L750D/K752E/I775G/E809G/ | | | | | | |
| | | S1116I/T1148N/L1248D/L1377D/ | | | | | | |
| | | V1439E | | | | | | |
| 2305/2306 | S543P/S700E/ | V63Q/L171P/H212A/S260T/E306G/ | + | ++ | + | ++ | + | +++ |
| | K752E/K1093G | L318G/M320R/S332P/F387I/I390A/ | | | | | | |
| | | V393G/V534I/S543P/M558W/ | | | | | | |
| | | M681G/S700E/K732W/Y738E/ | | | | | | |
| | | L749F/L750D/K752E/I775G/K1093G/ | | | | | | |
| | | T1148N/L1248D/L1377D/ | | | | | | |
| | | V1439E | | | | | | |
| 2307/2308 | S700E | V63Q/L171P/H212A/S260T/E306G/ | +++ | + | + | + | + | |
| | | L318G/M320R/S332P/F387I/I390A/ | | | | | | |
| | | V393G/V534I/M558W/M681G/ | | | | | | |
| | | S700E/K732W/Y738E/L749F/ | | | | | | |
| | | L750D/I775G/T1148N/L1248D/ | | | | | | |
| | | L1377D/V1439E | | | | | | |
| 2309/2310 | S700E/E738Y/E739G/ | V63Q/L171P/H212A/S260T/E306G/ | +++ | ++ | + | ++ | ++ | |
| | E800V/K1093G | L318G/M320R/S332P/F387I/I390A/ | | | | | | |
| | | V393G/V534I/M558W/M681G/ | | | | | | |
| | | S700E/K732W/E739G/L749F/ | | | | | | |
| | | L750D/I775G/E800V/K1093G/ | | | | | | |
| | | T1148N/L1248D/L1377D/V1439E | | | | | | |
| 2311/2312 | S700E/E738Y/E739G/ | V63Q/L171P/H212A/S260T/E306G/ | +++ | + | + | + | + | |
| | K799S/K1093G | L318G/M320R/S332P/F387I/I390A/ | | | | | | |
| | | V393G/V534I/M558W/M681G/ | | | | | | |
| | | S700E/K732W/E739G/L749F/ | | | | | | |
| | | L750D/I775G/K799S/K1093G/ | | | | | | |
| | | T1148N/L1248D/L1377D/V1439E | | | | | | |
| 2313/2314 | S700E/E738Y/E800V/ | V63Q/L171P/H212A/S260T/E306G/ | +++ | ++ | + | ++ | ++ | +++ |
| | K1093G | L318G/M320R/S332P/F387I/I390A/ | | | | | | |
| | | V393G/V534I/M558W/M681G/ | | | | | | |
| | | S700E/K732W/L749F/L750D/ | | | | | | |
| | | I775G/E800V/K1093G/T1148N/ | | | | | | |
| | | L1248D/L1377D/V1439E | | | | | | |
| 2315/2316 | S700E/E738Y/ | V63Q/L171P/H212A/S260T/E306G/ | + | + | + | + | + | ++ |
| | S1116I | L318G/M320R/S332P/F387I/I390A/ | | | | | | |
| | | V393G/V534I/M558W/M681G/ | | | | | | |
| | | S700E/K732W/L749F/L750D/ | | | | | | |
| | | I775G/S1116I/T1148N/L1248D/ | | | | | | |
| | | L1377D/V1439E | | | | | | |
| 2317/2318 | S700E/E809G | V63Q/L171P/H212A/S260T/E306G/ | ++ | ++ | + | ++ | ++ | ++ |
| | | L318G/M320R/S332P/F387I/I390A/ | | | | | | |
| | | V393G/V534I/M558W/M681G/ | | | | | | |
| | | S700E/K732W/Y738E/L749F/ | | | | | | |
| | | L750D/I775G/E809G/T1148N/ | | | | | | |
| | | L1248D/L1377D/V1439E | | | | | | |
| 2319/2320 | S700E/E809G/ | V63Q/L171P/H212A/S260T/E306G/ | ++ | ++ | + | ++ | ++ | ++ |
| | K1093G | L318G/M320R/S332P/F387I/I390A/ | | | | | | |
| | | V393G/V534I/M558W/M681G/ | | | | | | |
| | | S700E/K732W/Y738E/L749F/ | | | | | | |
| | | L750D/I775G/E809G/K1093G/ | | | | | | |
| | | T1148N/L1248D/L1377D/V1439E | | | | | | |
| 2321/2322 | S700E/K1093G | V63Q/L171P/H212A/S260T/E306G/ | ++ | ++ | + | ++ | ++ | ++ |
| | | L318G/M320R/S332P/F387I/I390A/ | | | | | | |
| | | V393G/V534I/M558W/M681G/ | | | | | | |
| | | S700E/K732W/Y738E/L749F/ | | | | | | |
| | | L750D/I775G/K1093G/T1148N/ | | | | | | |
| | | L1248D/L1377D/V1439E | | | | | | |
| 2323/2324 | S700E/K1093G/ | V63Q/L171P/H212A/S260T/E306G/ | ++ | + | + | ++ | ++ | ++ |
| | S1116I | L318G/M320R/S332P/F387I/I390A/ | | | | | | |
| | | V393G/V534I/M558W/M681G/ | | | | | | |
| | | S700E/K732W/Y738E/L749F/ | | | | | | |
| | | L750D/I775G/K1093G/S1116I/ | | | | | | |
| | | T1148N/L1248D/L1377D/V1439E | | | | | | |
| 2325/2326 | S700E/K752E | V63Q/L171P/H212A/S260T/E306G/ | ++ | ++ | + | + | + | |
| | | L318G/M320R/S332P/F387I/I390A/ | | | | | | |
| | | V393G/V534I/M558W/M681G/ | | | | | | |
| | | S700E/K732W/Y738E/L749F/ | | | | | | |
| | | L750D/K752E/I775G/T1148N/ | | | | | | |
| | | L1248D/L1377D/V1439E | | | | | | |
| 2327/2328 | S700E/K752E/D808S/ | V63Q/L171P/H212A/S260T/E306G/ | ++ | ++ | + | ++ | + | ++ |
| | E809G/K1093G/ | L318G/M320R/S332P/F387I/I390A/ | | | | | | |
| | S1116I | V393G/V534I/M558W/M681G/ | | | | | | |
| | | S700E/K732W/Y738E/L749F/ | | | | | | |
| | | L750D/K752E/I775G/D808S/E809G/ | | | | | | |
| | | K1093G/S1116I/T1148N/L1248D/ | | | | | | |
| | | L1377D/V1439E | | | | | | |
| 2329/2330 | S700E/K752E/ | V63Q/L171P/H212A/S260T/E306G/ | ++ | ++ | ++ | + | + | |
| | E809G/K1093G | L318G/M320R/S332P/F387I/I390A/ | | | | | | |
| | | V393G/V534I/M558W/M681G/ | | | | | | |
| | | S700E/K732W/Y738E/L749F/ | | | | | | |
| | | L750D/K752E/I775G/E809G/K1093G/ | | | | | | |
| | | T1148N/L1248D/L1377D/ | | | | | | |
| | | V1439E | | | | | | |
| 2331/2332 | S700E/K752E/ | V63Q/L171P/H212A/S260T/E306G/ | + | ++ | + | + | + | ++ |
| | K799S/S1116I | L318G/M320R/S332P/F387I/I390A/ | | | | | | |
| | | V393G/V534I/M558W/M681G/ | | | | | | |
| | | S700E/K732W/Y738E/L749F/ | | | | | | |
| | | L750D/K752E/I775G/K799S/S1116I/ | | | | | | |
| | | T1148N/L1248D/L1377D/ | | | | | | |
| | | V1439E | | | | | | |
| 2333/2334 | S700E/K752E/ | V63Q/L171P/H212A/S260T/E306G/ | + | ++ | ++ | + | + | ++ |
| | Y805Q/E809G/ | L318G/M320R/S332P/F387I/I390A/ | | | | | | |
| | K1093A | V393G/V534I/M558W/M681G/ | | | | | | |
| | | S700E/K732W/Y738E/L749F/ | | | | | | |
| | | L750D/K752E/I775G/Y805Q/E809G/ | | | | | | |
| | | K1093A/T1148N/L1248D/ | | | | | | |
| | | L1377D/V1439E | | | | | | |
| 2335/2336 | S700E/K799S/ | V63Q/L171P/H212A/S260T/E306G/ | + | ++ | + | ++ | + | ++ |
| | E800V | L318G/M320R/S332P/F387I/I390A/ | | | | | | |
| | | V393G/V534I/M558W/M681G/ | | | | | | |
| | | S700E/K732W/Y738E/L749F/ | | | | | | |
| | | L750D/I775G/K799S/E800V/T1148N/ | | | | | | |
| | | L1248D/L1377D/V1439E | | | | | | |
| 2337/2338 | S700E/S1116I | V63Q/L171P/H212A/S260T/E306G/ | ++ | + | + | + | + | |
| | | L318G/M320R/S332P/F387I/I390A/ | | | | | | |
| | | V393G/V534I/M558W/M681G/ | | | | | | |
| | | S700E/K732W/Y738E/L749F/ | | | | | | |
| | | L750D/I775G/S1116I/T1148N/ | | | | | | |
| | | L1248D/L1377D/V1439E | | | | | | |
| 2339/2340 | S700E/Y805Q/D808S/ | V63Q/L171P/H212A/S260T/E306G/ | ++ | ++ | ++ | ++ | + | ++ |
| | E809G/E1076S | L318G/M320R/S332P/F387I/I390A/ | | | | | | |
| | | V393G/V534I/M558W/M681G/ | | | | | | |
| | | S700E/K732W/Y738E/L749F/ | | | | | | |
| | | L750D/I775G/Y805Q/D808S/E809G/ | | | | | | |
| | | E1076S/T1148N/L1248D/L1377D/ | | | | | | |
| | | V1439E | | | | | | |
| 2341/2342 | V514L/S543P/G681N/ | V63Q/L171P/H212A/S260T/E306G/ | + | + | + | ++ | + | ++ |
| | Y805Q/D808S/ | L318G/M320R/S332P/F387I/I390A/ | | | | | | |
| | E809G | V393G/V514L/V534I/S543P/ | | | | | | |
| | | M558W/M681N/K732W/Y738E/ | | | | | | |
| | | L749F/L750D/I775G/Y805Q/D808S/ | | | | | | |
| | | E809G/T1148N/L1248D/L1377D/ | | | | | | |
| | | V1439E | | | | | | |
| 2343/2344 | Y805Q/D808S/ | V63Q/L171P/H212A/S260T/E306G/ | ++ | + | + | + | + | + |
| | E809G | L318G/M320R/S332P/F387I/I390A/ | | | | | | |
| | | V393G/V534I/M558W/M681G/ | | | | | | |
| | | K732W/Y738E/L749F/L750D/ | | | | | | |
| | | I775G/Y805Q/D808S/E809G/T1148N/ | | | | | | |
| | | L1248D/L1377D/V1439E | | | | | | |
| 2345/2346 | Y805Q/E809G/ | V63Q/L171P/H212A/S260T/E306G/ | + | ++ | + | ++ | + | |
| | S1116I | L318G/M320R/S332P/F387I/I390A/ | | | | | | |
| | | V393G/V534I/M558W/M681G/ | | | | | | |
| | | K732W/Y738E/L749F/L750D/ | | | | | | |
| | | I775G/Y805Q/E809G/S1116I/ | | | | | | |
| | | T1148N/L1248D/L1377D/V1439E | | | | | | |

All activities were determined relative to the reference polypeptide of SEQ ID NO: 2072. Levels of increased activity are defined as follows:
“+” 0.9 to 1.1,
“++” >1.1,
“+++” >2,
“++++” >2.5

### Example 12

### Identification of Active FVIII Variants with Reduced Immunogenicity

[0362] Putative T-cell epitopes in a B-domain deleted version of wild type human FVIII were identified using the Immune Epitope Database (IEDB; Immune Epitope Database and Analysis Resource website) tools, as known in the art and proprietary statistical analysis tools (See e.g., iedb.org and Vita et al., Nucl. Acids Res., 2010, 38 (Database issue): D854-62, Epub 2009 Nov. 11). The B-domain deleted version of wild type human FVIII (SEQ ID NO: 2) was parsed into all possible 15-mer analysis frames, with each frame overlapping the last by 14 amino acids. The 15-mer analysis frames were evaluated for immunogenic potential by scoring their predicted binding to eight common class II HLA-DR alleles (DRB1*0101, DRB1*0301, DRB1*0401, DRB1*0701, DRB1*0801, DRB1*1101, DRB1*1301, and DRB1*1501), using methods recommended on the IEDB website. Potential T-cell epitope clusters contained within the polypeptide (i.e., sub-regions contained within human FVIII which have an unusually high potential for immunogenicity) were identified using statistical analysis tools, as known in the art. The identified T-cell epitope clusters were screened against the IEDB database of known epitopes.

[0363] Active FVIII variants identified in screens from Example 3 for their levels of predicted immunogenicity by evaluating their binding to the eight common Class II HLA-DR alleles. The total immunogenicity score and immunogenic hit count were calculated for each variant. The total immunogenicity score (TIS) reflects the overall predicted immunogenicity of the variant (i.e., a higher score indicates a higher level of predicted immunogenicity). The immunogenic “hit count” (IHC) indicates the number of 15-mer analysis frames with an unusually high potential for immunogenicity (i.e., a higher score indicates a higher potential for immunogenicity). Mutations resulting in a reduced total immunogenicity score and/or an immunogenic hit count compared to the reference sequence were considered to be potential “deimmunizing mutations” and are shown in Tables 12.1, 12.2, 12.3, 12.4, 12.5, 12.6, 12.7, 12.8, and 15.2. A collection of the most deimmunizing mutations were recombined to generate a number of variants that were active and predicted to be significantly less immunogenic than B-domain deleted version of WT human FVIII (SEQ ID NO: 2).

TABLE 12.1
Reduction of Total Immunogenicity Score (TIS) and Immunogenic
Hit Count (IHC) for FVIII Variants Relative to SEQ ID NO: 2

| SEQ ID | | TIS reduction | IHC reduction |
|---|---|---|---|
| NO: | Amino Acid Differences | Relative to | Relative to |
| (nt/aa) | (Relative to SEQ ID NO: 2) | SEQ ID NO: 2 | SEQ ID NO: 2 |
| 1/2 | | | |
| 191/192 | Q37H/Q96R/L171P/Q429L/I708T/K799R/T1148N | ++ | + |
| 193/194 | L171P | + | + |
| 195/196 | L171P/Q429L/K732R/T1148N | + | + |
| 197/198 | Q96R/L171P | ++ | + |
| 199/200 | L171P/E919G/G1151S | + | |
| 201/202 | L171P/T792Y/M797Q/K799R/T1148N | +++ | + |
| 203/204 | L171P/P569T/T1148N | +++ | + |
| 205/206 | Q96R/L171P/Q429L/T792Y/M797T/K799R | | + |
| 207/208 | L171P/Q429L/I708T/L1422I | ++ | + |
| 209/210 | L171P/Q429L | | + |
| 3/4 | T1148N | + | + |
| 211/212 | D321Y/A362P/K732E/M797T/K799R | + | |
| 213/214 | L171P/L1100I | ++ | + |
| 215/216 | I708T/T1148N/A1186E | +++ | + |
| 217/218 | Q429L/L724I/K732E/T1148N | | + |
| 219/220 | L171P/A362E/V795T/M797Q/K799M | ++ | + |
| 221/222 | L171P/Q429L/K732E | | + |
| 223/224 | Q96R/L171P/S643N/M797T/K799R | ++ | + |
| 225/226 | L171P/T792Y/M797T/K799M | + | + |
| 227/228 | R503S | ++ | + |
| 229/230 | L171P/K732E | + | + |
| 231/232 | T1148N/F1193L | + | + |
| 5/6 | P85Q/1708T/T1148N | ++ | + |
| 233/234 | Q96R/L171P/A362E/Q429L/K732R/V795T/M797Q | + | + |
| 7/8 | K798T | + | |
| 9/10 | L706G | ++ | ++ |
| 11/12 | L706A | + | + |
| 13/14 | L171Q | + | |
| 15/16 | Q335E | + | |
| 17/18 | V63R | ++ | |
| 235/236 | K726A | + | |
| 19/20 | K344A | + | |
| 237/238 | F59M | + | |
| 241/242 | A362N | + | |
| 243/244 | H334G | + | |
| 25/26 | F59L | + | |
| 247/248 | V63Q | +++ | ++ |
| 251/252 | L1377D | +++ | + |
| 27/28 | Q429S | + | |
| 31/32 | I1264W | + | |
| 259/260 | V1250T | ++ | + |
| 261/262 | E306G | + | |
| 265/266 | L1377G | ++ | + |
| 269/270 | L1377E | +++ | + |
| 273/274 | L646I | + | |
| 33/34 | M797P | + | |
| 35/36 | L1248S | + | + |
| 37/38 | I1264R | + | |
| 39/40 | Y873T | + | |
| 41/42 | T792Y | + | |
| 43/44 | I708K | + | + |
| 45/46 | K344L | + | |
| 47/48 | F57V | + | |
| 49/50 | Q96L | + | |
| 277/278 | P435Q | + | |
| 51/52 | A362W | ++ | |
| 53/54 | V63G | +++ | ++ |
| 55/56 | Y873L | + | |
| 59/60 | T1148Q | + | |
| 63/64 | M797G | + | |
| 65/66 | L706Y | ++ | ++ |
| 67/68 | L1248R | ++ | + |
| 71/72 | Y65A | + | + |
| 73/74 | F59W | + | |
| 75/76 | Y873Q | + | |
| 77/78 | V795C | + | |
| 279/280 | Q96V | + | |
| 81/82 | F57L | + | |
| 83/84 | Q353S | + | |
| 85/86 | S332Q | + | + |
| 87/88 | I708A | + | |
| 89/90 | G1259T | + | + |
| 91/92 | V63M | + | |
| 93/94 | M356L | ++ | |
| 95/96 | L1248G | + | + |
| 97/98 | L1248P | ++ | + |
| 99/100 | Q436G | + | |
| 101/102 | F57A | + | |
| 103/104 | F59S | + | + |
| 105/106 | T1245R | + | |
| 107/108 | F59R | + | |
| 109/110 | Q96W | + | |
| 111/112 | M797Y | + | |
| 113/114 | K1145R | + | |
| 281/282 | L1377R | + | |
| 115/116 | Q436D | + | |
| 117/118 | F716L | + | |
| 119/120 | S56E | + | |
| 283/284 | L1377S | + | + |
| 285/286 | F59G | + | |
| 287/288 | L171M | + | |
| 121/122 | R773H | + | |
| 289/290 | T792H | + | |
| 129/130 | F59Q | + | + |
| 131/132 | S729T | + | |
| 133/134 | F716K | + | |
| 135/136 | T665G | + | + |
| 137/138 | A362T | ++ | |
| 139/140 | F57T | + | |
| 141/142 | N359G | + | |
| 291/292 | L1248D | + | + |
| 145/146 | V1250A | ++ | + |
| 147/148 | A362V | + | |
| 149/150 | N359E | ++ | |
| 151/152 | F716W | + | |
| 153/154 | S332W | + | ++ |
| 155/156 | I708V | + | |
| 157/158 | V63H | ++ | ++ |
| 159/160 | M797C | + | |
| 295/296 | L706M | + | ++ |
| 161/162 | T61Q | + | + |
| 163/164 | M356N | ++ | |
| 297/298 | L171H | + | |
| 165/166 | V1250S | + | + |
| 167/168 | K798C | + | |
| 169/170 | N433G | + | |
| 299/300 | L1377A | ++ | |
| 301/302 | L1377V | + | |
| 171/172 | V795N | + | |
| 173/174 | Q96I | + | |
| 175/176 | S56P | + | |
| 177/178 | V63N | ++ | ++ |
| 179/180 | T792W | ++ | |
| 181/182 | I1264L | + | |
| 183/184 | V1250P | + | + |
| 185/186 | S332P | + | + |
| 187/188 | F59V | + | |
| 309/310 | F59D | + | + |
| 189/190 | K726L | + | |
| 311/312 | K344E | + | |

TIS reduction was measured as a reduction in the number of counts compared to the reference polypeptide of SEQ ID NO: 2 and are defined as follows: “+” 1-10, “++” >10, “+++” >20.
IHC reduction was measured as a reduction in the number of counts compared to the reference polypeptide of SEQ ID NO: 2 and are defined as follows: “+” 1-3, “++” >3, “+++” >5

TABLE 12.2
Reduction of Total Immunogenicity Score (TIS) and Immunogenic
Hit Count (IHC) for FVIII Variants Relative to SEQ ID NO: 252

| SEQ ID | | TIS reduction | IHC reduction |
|---|---|---|---|
| NO: | Amino Acid Differences | Relative to | Relative to |
| (nt/aa) | (Relative to SEQ ID NO: 252) | SEQ ID NO: 252 | SEQ ID NO: 252 |
| 251/252 | | | |
| 411/412 | I265S | ++ | + |
| 413/414 | L1221T | + | ++ |
| 415/416 | M1380G | + | |
| 417/418 | K752G | ++ | + |
| 419/420 | Y748K | +++ | +++ |
| 423/424 | F1218A | ++ | ++ |
| 425/426 | Y748N | +++ | +++ |
| 427/428 | T1378E | + | |
| 429/430 | L614I | + | + |
| 431/432 | L749F | + | + |
| 433/434 | F387V | ++ | + |
| 435/436 | L750T | + | + |
| 437/438 | F1193G | ++ | + |
| 441/442 | T1378A | + | |
| 443/444 | L750V | | + |
| 445/446 | F387T | +++ | +++ |
| 447/448 | F387Q | +++ | +++ |
| 451/452 | F1037N | ++ | + |
| 453/454 | H1440A | + | |
| 455/456 | M1051S | + | + |
| 457/458 | L1221G | ++ | ++ |
| 459/460 | T1378D | + | |
| 461/462 | H1440S | + | + |
| 463/464 | F387R | ++ | +++ |
| 465/466 | F1193A | + | + |
| 467/468 | F387I | + | + |
| 469/470 | F1218M | ++ | ++ |
| 319/320 | I388A | ++ | ++ |
| 471/472 | I265W | +++ | + |
| 473/474 | H1440E | +++ | +++ |
| 475/476 | V1439L | + | + |
| 477/478 | H1440T | ++ | +++ |
| 479/480 | R612S | | + |
| 481/482 | Y1049W | + | ++ |
| 321/322 | F1043E | +++ | +++ |
| 323/324 | F1043R | ++ | ++ |
| 483/484 | L1221S | + | ++ |
| 325/326 | I610R | ++ | + |
| 327/328 | I1274N | +++ | +++ |
| 329/330 | S1220T | + | + |
| 331/332 | I1442T | + | + |
| 485/486 | S1220D | ++ | ++ |
| 333/334 | F1193L | | + |
| 335/336 | Q621T | + | + |
| 337/338 | L1054C | + | + |
| 339/340 | A755Q | + | + |
| 487/488 | L749G | +++ | +++ |
| 341/342 | Y1041G | ++ | ++ |
| 343/344 | Y748S | +++ | +++ |
| 345/346 | Y1049G | +++ | +++ |
| 347/348 | L1221V | + | ++ |
| 489/490 | L749S | ++ | ++ |
| 491/492 | F1218G | ++ | ++ |
| 497/498 | F1193E | ++ | + |
| 499/500 | I1050S | ++ | ++ |
| 501/502 | S1389W | + | |
| 349/350 | M1051E | +++ | +++ |
| 503/504 | V1439E | +++ | +++ |
| 505/506 | S260T | + | + |
| 507/508 | F1037P | ++ | + |
| 351/352 | R612G | + | + |
| 353/354 | F1037H | ++ | + |
| 355/356 | N616E | ++ | + |
| 509/510 | M1051K | ++ | ++ |
| 511/512 | I1269F | + | + |
| 513/514 | I265R | + | + |
| 357/358 | Y1041H | ++ | +++ |
| 515/516 | M1051R | ++ | ++ |
| 517/518 | F1218L | + | ++ |
| 359/360 | F387S | +++ | +++ |
| 361/362 | S489R | ++ | + |
| 363/364 | Q621M | + | + |
| 365/366 | S489Q | ++ | + |
| 367/368 | L750G | + | + |
| 519/520 | M897R | + | + |
| 521/522 | I388P | +++ | +++ |
| 369/370 | S1224P | + | + |
| 523/524 | Y748G | +++ | +++ |
| 371/372 | A618C | + | + |
| 525/526 | I756P | ++ | +++ |
| 373/374 | N616G | ++ | + |
| 375/376 | R612T | | + |
| 529/530 | I390A | ++ | + |
| 377/378 | I1050Q | ++ | ++ |
| 531/532 | I610L | | + |
| 533/534 | A755G | + | + |
| 535/536 | L749R | + | + |
| 379/380 | T1053A | + | + |
| 381/382 | N616W | + | + |
| 537/538 | Y748V | + | + |
| 383/384 | I896V | + | + |
| 539/540 | M1380A | + | |
| 541/542 | H1440C | ++ | +++ |
| 385/386 | S489F | + | + |
| 543/544 | H397N/F1218M | ++ | ++ |
| 387/388 | I1050P | ++ | ++ |
| 389/390 | M897G | ++ | + |
| 545/546 | F1037M | + | + |
| 547/548 | F1218P | ++ | ++ |
| 549/550 | E757K | + | + |
| 391/392 | L749T | ++ | + |
| 551/552 | V1373S | + | |
| 553/554 | H1440G | ++ | +++ |
| 555/556 | F1193I | + | + |
| 557/558 | V1439T | ++ | +++ |
| 393/394 | I1274V | + | + |
| 395/396 | S1220L | + | + |
| 559/560 | L750D | +++ | +++ |
| 397/398 | S260E | ++ | + |
| 561/562 | I390G | +++ | + |
| 563/564 | I756G | ++ | ++ |
| 399/400 | L481V | + | |
| 565/566 | S1220E | ++ | ++ |
| 401/402 | F613S | + | + |
| 403/404 | F387G | +++ | +++ |
| 405/406 | Q621R | + | + |
| 567/568 | T1378C | + | |
| 407/408 | I756R | ++ | + |
| 569/570 | A618G | ++ | + |
| 573/574 | V63Q/L1248D | +++ | +++ |
| 577/578 | E306G/R355C/L1422I | +++ | |
| 579/580 | L1422I | + | |
| 581/582 | E306G/D346R/I708T | ++ | |
| 583/584 | T1148N | + | + |
| 585/586 | L171P/D346R/L1248D | ++ | + |
| 587/588 | V63Q/M797T/K799R/L1248D/L1422I | +++ | +++ |
| 589/590 | L171P/K799R | + | + |
| 591/592 | A362P | + | |
| 593/594 | L1248D | + | + |
| 595/596 | V63Q | +++ | ++ |
| 597/598 | L171P/E306G/D346R/Q999R/L1248D | ++ | + |
| 599/600 | L171P/T1148N | ++ | + |
| 601/602 | T734S/K799R/L1248D/L1422I | ++ | + |
| 603/604 | V63Q/K732E | +++ | ++ |
| 605/606 | V63Q/L171P/E306G/D346R/K732G | +++ | +++ |
| 607/608 | L171P | + | + |
| 609/610 | L171P/L1422I | ++ | + |
| 611/612 | V63Q/A362P/K732G/K799R/L1248D | +++ | +++ |
| 613/614 | Q999R/T1148N/L1422I | ++ | + |
| 617/618 | E306G/P349G | + | |
| 619/620 | V63Q/L171P/T1148N/G1151S | +++ | +++ |
| 621/622 | E306G | + | |
| 623/624 | K344E/P349G/L354R/V1250T | +++ | + |
| 625/626 | V63G | +++ | ++ |
| 627/628 | V1250T | ++ | + |
| 629/630 | V63R/E306G/K344E/P349G/L354R/R503S/L1248R | ++++ | ++++ |
| 631/632 | F59D/V63S/S332P/P349G/R503S/L706M/I708K | ++++ | ++++ |
| 633/634 | V63S/E306G/K344A/P349G/L354R/L706M/L1248R | ++++ | ++++ |
| 635/636 | L1248R | ++ | + |
| 637/638 | F59D/V63G | +++ | ++ |
| 639/640 | S332P/L706M/I708K/L1248R/V1250T | +++ | ++++ |
| 641/642 | R503S | ++ | + |
| 643/644 | F59D/V63R/P349G/L354R | +++ | ++ |
| 645/646 | F59D/P349G/I708K | ++ | + |
| 647/648 | F59D/E306G/K344E/L1248R | +++ | + |
| 409/410 | V63R | ++ | ++ |
| 649/650 | K344E/L1248R/V1250T | +++ | + |
| 651/652 | I708K | + | + |
| 653/654 | V63R/K344E/P349G | +++ | ++ |
| 655/656 | F59D | + | + |
| 657/658 | V63S/K344A/P349G/L354R | +++ | ++ |
| 659/660 | L706M | + | ++ |
| 661/662 | F59D/E306G/R770W | ++ | + |
| 663/664 | V63G/S347N/L354R/L1248R | ++++ | +++ |
| 665/666 | L354R/R503S | +++ | + |

TIS reduction was measured as a reduction in the number of counts compared to the reference polypeptide of SEQ ID NO: 252 and are defined as follows: “+” 1-10, “++” >10, “+++” >20, “++++” >50, “+++++”.
IHC reduction was measured as a reduction in the number of counts compared to the reference polypeptide of SEQ ID NO: 252 and are defined as follows: “+” 1-3, “++” >3, “+++” >5, “++++” >8

TABLE 12.3
Reduction of Total Immunogenicity Score (TIS) and Immunogenic
Hit Count (IHC) for FVIII Variants Relative to SEQ ID NO: 504

| SEQ ID | | TIS reduction | IHC reduction |
|---|---|---|---|
| NO: | Amino Acid Differences | Relative to | Relative to |
| (nt/aa) | (Relative to SEQ ID NO: 504) | SEQ ID NO: 504 | SEQ ID NO: 504 |
| 503/504 | | | |
| 701/702 | L171P/L1248D/H1440T | ++ | + |
| 703/704 | S260T/T1148N/T1378D | ++ | ++ |
| 705/706 | L171P/S260T/F387I/L750D/L1248D | ++++ | ++++ |
| 707/708 | L171P/S260T | + | ++ |
| 709/710 | L171P/S260T/F387I/L750D/M1051S/T1148N | ++++ | +++++ |
| 711/712 | L171P | + | + |
| 667/668 | L750D | +++ | +++ |
| 713/714 | L750D/M1051S/T1148N | +++ | ++++ |
| 715/716 | L171P/S260T/I756P | +++ | ++++ |
| 669/670 | M1051K | ++ | ++ |
| 717/718 | L171P/L1248D | ++ | + |
| 671/672 | M1051S | + | + |
| 719/720 | L171P/T1148N | ++ | + |
| 721/722 | F387I | + | + |
| 723/724 | F59D | + | + |
| 727/728 | S332P/L750D/L1248D | +++ | ++++ |
| 729/730 | I756P/L1248D | +++ | +++ |
| 673/674 | S260T | + | + |
| 731/732 | L1248D | + | + |
| 675/676 | I756P | ++ | +++ |
| 733/734 | L171P/F387I/L1248D/H1440S | +++ | + |
| 677/678 | F1193A | + | + |
| 735/736 | L750D/H1440S | +++ | +++ |
| 737/738 | F59D/L171P/L750D | +++ | ++++ |
| 739/740 | L171P/F1193A/L1248D | ++ | ++ |
| 679/680 | S332P | + | + |
| 741/742 | L750D/T1148N/F1193A/H1440S | +++ | ++++ |
| 743/744 | T1148N | + | + |
| 745/746 | L171P/F387I/M1051K | +++ | +++ |
| 747/748 | Y748G | +++ | +++ |
| 681/682 | M897R | + | + |
| 683/684 | F387Q | +++ | +++ |
| 749/750 | E306G | + | |
| 751/752 | E306G/F387R/I390A/L749F/S1220D | ++++ | ++++ |
| 685/686 | F1037N | ++ | + |
| 753/754 | I390A | ++ | + |
| 755/756 | E306G/I390A/F1037N | +++ | + |
| 757/758 | E306G/R612S/L749F | + | + |
| 759/760 | F387V/1390A/L749F | +++ | +++ |
| 761/762 | V63S/I390A/R503S/L749F | ++++ | ++++ |
| 763/764 | F387R/I390A/L749R | +++ | +++ |
| 765/766 | S1220D | ++ | ++ |
| 687/688 | F387R | ++ | +++ |
| 767/768 | V63S/E306G | +++ | ++ |
| 689/690 | E306G/L749F | + | + |
| 769/770 | L749F | + | + |
| 771/772 | E306G/I390A/L749F/F1037N | +++ | + |
| 773/774 | F387V | ++ | + |
| 775/776 | E306G/L749F/S1220D | +++ | ++ |
| 777/778 | E306G/F387V/I390A/R612S/L749F/F1037N | ++++ | ++++ |
| 691/692 | I1270V | + | + |
| 693/694 | S489E | +++ | + |
| 779/780 | F328S | ++ | +++ |
| 695/696 | Q487N | ++ | + |
| 697/698 | A488G | ++ | + |
| 699/700 | Q903E | ++ | +++ |

TIS reduction was measured as a reduction in the number of counts compared to the reference polypeptide of SEQ ID NO: 504 and are defined as follows: “+” 1-10, “++” >10, “+++” >20, “++++” >50, “+++++” >75.
IHC reduction was measured as a reduction in the number of counts compared to the reference polypeptide of SEQ ID NO: 504 and are defined as follows: “+” 1-3, “++” >3, “+++” >5, “++++” >8, “+++++” >15

TABLE 12.4
Reduction of Total Immunogenicity Score (TIS) and Immunogenic
Hit Count (IHC) for FVIII Variants Relative to SEQ ID NO: 706

| SEQ ID | | TIS reduction | IHC reduction |
|---|---|---|---|
| NO: | Amino Acid Differences | Relative to | Relative to |
| (nt/aa) | (Relative to SEQ ID NO: 706) | SEQ ID NO: 706 | SEQ ID NO: 706 |
| 705/706 | | | |
| 819/820 | S332P/I387R/I390A/T1148N | +++ | +++ |
| 821/822 | F328S/I387R/L749F | +++ | ++++ |
| 781/782 | M1051K | ++ | ++ |
| 823/824 | L749F | + | |
| 783/784 | L1221G | ++ | ++ |
| 825/826 | E306G/F328S/S332P/I390A/M1051R/F1193A/F1218G | ++++ | ++++ |
| 827/828 | V63Q/E306G/S332P/M1051R/T1148N | ++++ | ++++ |
| 829/830 | V63Q/E306G/S332P/I387T/M1051K | ++++ | +++++ |
| 831/832 | I387T/I390A/M1051R | +++ | ++++ |
| 833/834 | D186A/E306G/F328S/S332P/I390A/L749F/M1051K/T1148N/ | ++++ | ++++ |
| | F1193A | | |
| 835/836 | I387T/I390A/I756P/M1051R | ++++ | ++++ |
| 837/838 | E306G/I390A/M1051R | +++ | +++ |
| 839/840 | E306G/S332P/I390A/L749F | +++ | ++ |
| 785/786 | F1218G | ++ | ++ |
| 841/842 | E306G/I387R/I390A/T1148N | +++ | +++ |
| 843/844 | E306G/F328S/S332P/I387T/I390A/L749F/M1051R/T1148N/ | +++++ | ++++ |
| | F1193A | | |
| 845/846 | S332P/I387R/I390A/L749F/T1148N | +++ | +++ |
| 847/848 | I387R/I390A/L749F | +++ | ++ |
| 787/788 | I387R | ++ | ++ |
| 849/850 | E306G/I387T/L749F/M1051K/T1148N | +++ | ++++ |
| 789/790 | M1051R | ++ | ++ |
| 851/852 | I387R/L749F | ++ | ++ |
| 853/854 | E306G/Q945K/M1051R/F1193A/L1221G | +++ | ++ |
| 855/856 | E306G/I390A/L749F/M1051K | +++ | +++ |
| 857/858 | V63Q/E306G/S332P/I390A | +++ | ++++ |
| 791/792 | L749F/F1218G | ++ | ++ |
| 859/860 | E306G/I387T/I390A/L749F/T1148N/F1193A/L1221G | ++++ | ++++ |
| 861/862 | E306G/S332P/I387R/I390A/L749F/F1218M | ++++ | ++++ |
| 793/794 | I387T | ++ | ++ |
| 863/864 | V63Q/E306G/S332P/I390A/M1051R/T1148N/F1193A/ | +++++ | +++++ |
| | F1218G | | |
| 795/796 | S332P | + | + |
| 867/868 | A755S | + | |
| 875/876 | M797Y | + | |
| 797/798 | M897K | + | + |
| 877/878 | N754W | + | |
| 879/880 | I793G | + | |
| 881/882 | N753D | + | |
| 883/884 | R922W | + | |
| 885/886 | I896L | + | |
| 799/800 | T696E | + | + |
| 889/890 | I775G | + | |
| 801/802 | F816W | + | + |
| 803/804 | F824W | ++ | +++ |
| 805/806 | A826G | ++ | +++ |
| 891/892 | S751E | + | |
| 807/808 | V393W | ++ | + |
| 809/810 | I825L | + | + |
| 811/812 | M897R | + | + |
| 895/896 | K752G | + | |
| 899/900 | K938V | + | |
| 903/904 | A755G | + | |
| 905/906 | V393G/A407V | +++ | ++ |
| 813/814 | F816V | + | + |
| 907/908 | M797W | + | |
| 909/910 | K819V | + | + |
| 911/912 | V393G | +++ | ++ |
| 913/914 | I787W | + | |
| 921/922 | G924P | + | |
| 815/816 | F698W | + | ++ |
| 931/932 | S392A | + | + |
| 933/934 | H397G | + | |
| 817/818 | V393Q | + | + |

TIS reduction was measured as a reduction in the number of counts compared to the reference polypeptide of SEQ ID NO: 706 and are defined as follows: “+” 1-10, “++” >10, “+++” >20, “++++” >50, “+++++” >75.
IHC reduction was measured as a reduction in the number of counts compared to the reference polypeptide of SEQ ID NO: 706 and are defined as follows: “+” 1-3, “++” >3, “+++” >5, “++++” >8, “+++++” >15

TABLE 12.5
Reduction of Total Immunogenicity Score (TIS) and Immunogenic
Hit Count (IHC) for FVIII Variants Relative to SEQ ID NO: 840

| | Amino Acid | | |
|---|---|---|---|
| | Differences | TIS reduction | IHC reduction |
| SEQ ID | (Relative to | Relative to | Relative to |
| NO: (nt/aa) | SEQ ID NO: 840) | SEQ ID NO: 840 | SEQ ID NO: 840 |
| 839/840 | | | |
| 1029/1030 | L622D | + | + |
| 1031/1032 | P617E | + | + |
| 1033/1034 | P617N | + | + |
| 935/936 | V620N | + | + |
| 1035/1036 | P907D | + | + |
| 1037/1038 | N1040E | + | + |
| 1039/1040 | P617D | + | + |
| 1041/1042 | Q611E | + | + |
| 937/938 | P491E | + | + |
| 1043/1044 | V620P | + | + |
| 1045/1046 | P617G | + | + |
| 1047/1048 | A488G | ++ | + |
| 1049/1050 | P1192D | + | + |
| 1051/1052 | S1194P | + | + |
| 1053/1054 | G619E | + | + |
| 939/940 | M1229D | +++ | ++ |
| 1055/1056 | P615D | ++ | + |
| 941/942 | P615N | + | + |
| 1057/1058 | F16A | + | + |
| 943/944 | I1283S | +++ | ++ |
| 945/946 | H822S | + | |
| 1063/1064 | L211K | ++ | + |
| 1065/1066 | M836W | + | + |
| 947/948 | F328G | +++ | ++ |
| 1067/1068 | F555R | + | + |
| 951/952 | K818W | + | + |
| 1069/1070 | V536A | + | + |
| 955/956 | F555G/E684G | ++ | + |
| 1071/1072 | I527A | + | + |
| 1073/1074 | F555E | ++ | + |
| 957/958 | V828K | | + |
| 1075/1076 | H841W | | + |
| 959/960 | R550G | + | + |
| 1077/1078 | M320Q | + | + |
| 1079/1080 | S837G | ++ | + |
| 1081/1082 | M558R | ++ | ++ |
| 1083/1084 | F555G | ++ | ++ |
| 1085/1086 | L211R | ++ | + |
| 961/962 | R830M | | + |
| 963/964 | S839A | + | + |
| 965/966 | H822T | + | + |
| 1087/1088 | V64G | + | ++ |
| 1089/1090 | M320R | | + |
| 1091/1092 | T533Y | ++ | ++ |
| 1095/1096 | F16V | + | |
| 1097/1098 | I1283E | +++ | +++ |
| 1099/1100 | V536M | + | + |
| 969/970 | L14G | ++ | ++ |
| 1101/1102 | F312L | | + |
| 1103/1104 | M681N | +++ | ++ |
| 1107/1108 | V536R | + | + |
| 1109/1110 | R15G | + | + |
| 1111/1112 | V536P | ++ | ++ |
| 973/974 | M836V | + | + |
| 1113/1114 | M558W | ++ | ++ |
| 1115/1116 | M558E | +++ | ++ |
| 975/976 | S839P | + | + |
| 977/978 | K1210W | +++ | ++ |
| 979/980 | Y1281R | ++ | ++ |
| 981/982 | V64D | +++ | ++ |
| 985/986 | V682R | + | + |
| 987/988 | L14M | + | |
| 989/990 | L318C | +++ | +++ |
| 1119/1120 | S839G | ++ | + |
| 1123/1124 | L13G | ++ | + |
| 1125/1126 | K1210M | + | + |
| 1127/1128 | H1156G | + | + |
| 1129/1130 | M558L | + | + |
| 1131/1132 | S839K | ++ | + |
| 1133/1134 | L211P | ++ | + |
| 1135/1136 | L211G | ++ | + |
| 1137/1138 | L211Q | ++ | + |
| 1139/1140 | F16D | +++ | ++++ |
| 995/996 | K818G | + | + |
| 1141/1142 | M320G | ++ | + |
| 997/998 | M836G | ++ | + |
| 1143/1144 | Y683W | + | + |
| 1145/1146 | Y24V | + | |
| 1147/1148 | V534I | + | + |
| 1149/1150 | M681A | +++ | ++ |
| 1001/1002 | M836R | + | + |
| 1151/1152 | P840G | | + |
| 1153/1154 | F1160R | +++ | + |
| 1155/1156 | M681C | +++ | ++ |
| 1157/1158 | F328Q | ++ | ++ |
| 1159/1160 | R15S | ++ | + |
| 1005/1006 | T533V | + | + |
| 1007/1008 | S19G | ++ | +++ |
| 1161/1162 | V536K | + | + |
| 1163/1164 | V536G | + | ++ |
| 1165/1166 | T533R | + | ++ |
| 1167/1168 | M681E | +++ | ++ |
| 1011/1012 | Q817D | ++ | + |
| 1013/1014 | L831W | + | +++ |
| 1169/1170 | V536W | ++ | ++ |
| 1171/1172 | H1156N | + | + |
| 1173/1174 | F16P | ++ | +++ |
| 1175/1176 | Q817A | + | + |
| 1177/1178 | F18R | + | + |
| 1179/1180 | Y551W | + | |
| 1181/1182 | F555T | ++ | ++ |
| 1017/1018 | H1156R | | + |
| 1183/1184 | M681G | +++ | ++ |
| 1185/1186 | H212A | + | + |
| 1187/1188 | F16G | ++ | ++ |
| 1189/1190 | S838G | + | + |
| 1019/1020 | R830V | | ++ |
| 1191/1192 | M681R | + | + |
| 1021/1022 | V393G/A747D | ++ | + |
| 1193/1194 | V393G | ++ | + |
| 1195/1196 | V393G/A747D/K752G/Q811F/K819V/Q923M/ | +++ | +++ |
| | T1148N | ++ | + |
| 1197/1198 | V393G/S751Y/I775G | | |
| 1023/1024 | N753D | ++ | |
| 1199/1200 | V63Q/V393G/K732W/I775G/T1148N | +++ | ++++ |
| 1201/1202 | V393G/K732W/T1148N | +++ | ++ |
| 1203/1204 | I775G/T1148N | + | + |
| 1205/1206 | V393G/K752L/N753D/I775G/I793G/M797W | +++ | + |
| 1207/1208 | V393G/Q923M | ++ | + |
| 1209/1210 | V393G/Q923M/T1148N | +++ | ++ |
| 1211/1212 | V393G/A747D/S751Y | ++ | + |
| 1025/1026 | V393G/K732W/S751Y | ++ | + |
| 1213/1214 | V393G/A747D/N753D/I775G/T1148N | +++ | ++ |
| 1215/1216 | K752L/Q923M/M1051R | ++ | ++ |
| 1217/1218 | V63Q/I775G | +++ | ++ |
| 1219/1220 | V63Q/V393G/K752L/I775G/I793G/M1051R/T1053R | ++++ | ++++ |
| 1221/1222 | K752G/N753D/I775G/I793G/K819V | +++ | + |
| 1027/1028 | V63Q/M797W | +++ | ++ |
| 1223/1224 | V63Q/M1051R | +++ | ++++ |
| 1225/1226 | V63Q/A747D/K752G/N753D/I775G/Q811F/K819V/ | ++++ | ++++ |
| | Q923M/M1051R | | |
| 1227/1228 | V393G/K752G/I787W | +++ | + |
| 1231/1232 | V63Q/T1148N | +++ | +++ |
| 1233/1234 | V63H/A747D/K752G/N753D/K819V/Q923M/ | +++ | ++++ |
| | T1148N | | |
| 1235/1236 | T1148N | + | + |
| 1237/1238 | A747D/K752L/N753D/I793G/Q811F | ++ | |
| 1239/1240 | V63Q | +++ | ++ |
| 1241/1242 | M797W/T1148N | ++ | + |
| 1243/1244 | S751Y/K752L/N753D/M1051R | +++ | ++ |
| 1245/1246 | V63Q/K732W/M1051R | +++ | ++++ |
| 1247/1248 | K752G/M797W/S815I/Q923M/M1051R/T1148N | +++ | ++ |
| 1249/1250 | A747D/N753D | ++ | |

TIS reduction was measured as a reduction in the number of counts compared to the reference polypeptide of SEQ ID NO: 840 and are defined as follows: “+” 1-10, “++” >10, “+++” >20, “++++” >50.
IHC reduction was measured as a reduction in the number of counts compared to the reference polypeptide of SEQ ID NO: 840 and are defined as follows: “+” 1-3, “++” >3, “+++” >5, “++++” >8

TABLE 12.6
Reduction of Total Immunogenicity Score (TIS) and Immunogenic
Hit Count (IHC) for FVIII Variants Relative to SEQ ID NO: 1200

| SEQ ID | | TIS reduction | IHC reduction |
|---|---|---|---|
| NO: | Amino Acid Differences | Relative to | Relative to |
| (nt/aa) | (Relative to SEQ ID NO: 1200) | SEQ ID NO: 1200 | SEQ ID NO: 1200 |
| 1199/1200 | | | |
| 1409/1410 | V536P | ++ | ++ |
| 1411/1412 | L211R/V536K/L622D/M681A | +++ | ++++ |
| 1413/1414 | V536K/M558L | ++ | ++ |
| 1415/1416 | L211R/V536R/F555G/P617G/W732K | +++ | ++++ |
| 1417/1418 | L211R/M681R/W732K | +++ | ++ |
| 1419/1420 | L211R/V536K/F555E | +++ | +++ |
| 1421/1422 | V536R | + | + |
| 1423/1424 | F555E | ++ | ++ |
| 1425/1426 | L211R/V536P | +++ | ++ |
| 1427/1428 | L211R/H212P | ++ | + |
| 1251/1252 | M681A | +++ | ++ |
| 1429/1430 | L211R/V536K | +++ | ++ |
| 1431/1432 | L211R/V536K/P617G/M681A/W732K | +++ | ++++ |
| 1433/1434 | L211R | ++ | + |
| 1435/1436 | L211R/V536P/M558L/P617G/M681A | ++++ | ++++ |
| 1437/1438 | F555G/W732K | ++ | ++ |
| 1439/1440 | V536P/F555E/M558L/P617G/W732K | +++ | ++++ |
| 1253/1254 | L622D | + | + |
| 1255/1256 | P617G | + | + |
| 1441/1442 | V536K/P617G/M681A/W732K | +++ | +++ |
| 1443/1444 | V536K/F555G | +++ | +++ |
| 1257/1258 | M558L | + | + |
| 1445/1446 | V536P/L622D/M681A | +++ | ++++ |
| 1447/1448 | W732K | + | |
| 1259/1260 | V536K | + | + |
| 1449/1450 | H212A/M320Q/T533R/P617E/M681G | +++ | ++++ |
| 1451/1452 | L211K/F312L/T533R/V534I/P617D/G619E/ | ++++ | +++++ |
| | M681N/S839K | | |
| 1453/1454 | H212A | + | + |
| 1455/1456 | L211K/H212A/M320Q/G619E/M681G/S839K | +++ | ++++ |
| 1457/1458 | M797W/S839K | ++ | + |
| 1459/1460 | H212A/F312L/M320Q/T533R/V534I/P617E/ | +++ | +++++ |
| | M681G | | |
| 1461/1462 | M558W/G619E/M681G | +++ | ++++ |
| 1261/1262 | M681G | +++ | ++ |
| 1463/1464 | M320Q/M558W/M681G | +++ | ++++ |
| 1465/1466 | H212A/M320Q/V534I/G619E/M681G/M797W/ | ++++ | ++++ |
| | S839K | | |
| 1467/1468 | M320R/M558W/G619E/W732K/S839K | +++ | ++++ |
| 1469/1470 | L211K/H212A/F312L/V534I/M558W/G619E/ | ++++ | ++++ |
| | M681N/W732K/S839K | | |
| 1471/1472 | M320R/V534I/M558R/G619E/W732K/M797W | +++ | +++ |
| 1473/1474 | M558W/P617D/G619E/M681N | +++ | ++++ |
| 1475/1476 | L211Q/V534I/M558W/Q611E/M681N | ++++ | ++++ |
| 1477/1478 | L211K/M320R/P617E/G619E/M681G | +++ | ++++ |
| 1479/1480 | M558W/P617D/M681G/M797W | +++ | ++++ |
| 1481/1482 | M320R/V534I/G619E/W732K | ++ | ++ |
| 1483/1484 | L211K/G619E/M681N | +++ | +++ |
| 1263/1264 | L211Q | ++ | + |
| 1485/1486 | L211K/H212A/V534I/M558W/G619E/W732K/ | ++++ | ++++ |
| | S839K | | |
| 1487/1488 | H212A/M320R/G619E/M681N/M797W/S839K | +++ | ++++ |
| 1489/1490 | H212A/M320R/Q611E/S839K | ++ | ++++ |
| 1265/1266 | M320R | | + |
| 1491/1492 | M320Q/M558W/G619E/M681N | +++ | ++++ |
| 1493/1494 | F312L/T533R/P617D/M681N/M797W/S839K | +++ | ++++ |
| 1495/1496 | M558W/Q611E/M681N | +++ | ++++ |
| 1497/1498 | F312L | | + |
| 1499/1500 | L211Q/M320R/M558W/G619E/M681G/W732K/ | ++++ | ++++ |
| | M797W/S839K | | |
| 1501/1502 | M320Q/M558W/W732K/M797W | +++ | ++ |
| 1503/1504 | T533R/M558W/Q611E/G619E/F716L/W732K/ | +++ | ++++ |
| | S839K | | |
| 1505/1506 | F312L/M681G | ++ | ++ |
| 1267/1268 | M558W | ++ | ++ |
| 1507/1508 | M320Q/V534I/G619E/M681N | +++ | +++ |
| 1509/1510 | L211K/M320Q/T533R/V536L/G619E | +++ | +++ |
| 1269/1270 | S839K | ++ | + |
| 1511/1512 | M558W/P617E/M681N/S839K | ++++ | ++++ |
| 1271/1272 | L211K | ++ | + |
| 1513/1514 | H212A/M320R/V534I/M558W/M681G | +++ | ++++ |
| 1515/1516 | T533R/V534I/M681N/S839K | +++ | ++++ |
| 1517/1518 | H212A/V534I/G619E/M681G | +++ | +++ |
| 1519/1520 | P617E/G619E/M681G | +++ | +++ |
| 1521/1522 | L211Q/H212A/M320R/M558W/P617E/M681N | ++++ | ++++ |
| 1523/1524 | H212A/V534I/M558W/M681N/M797W | +++ | ++++ |
| 1525/1526 | H212A/M320R/V534I | + | ++ |
| 1527/1528 | L211K/F312L/G619E | ++ | + |
| 1529/1530 | H212A/F312L/G619E/S839K | ++ | +++ |
| 1531/1532 | T210P/H212A/M320R/M558W/M681G | ++++ | ++++ |
| 1273/1274 | M797W | + | |
| 1275/1276 | T533R | + | ++ |
| 1533/1534 | H212A/F312L/V534I/M681N/M797W/S839K | +++ | ++++ |
| 1535/1536 | L211K/M320R/M558W/S839K | +++ | ++++ |
| 1277/1278 | S751A | + | |
| 1279/1280 | A303T | + | + |
| 1539/1540 | S916L | + | |
| 1549/1550 | T294G | + | + |
| 1285/1286 | K818G | + | + |
| 1551/1552 | K799S | + | |
| 1553/1554 | K799E | + | |
| 1299/1300 | Q921W | + | |
| 1563/1564 | K799Q | + | |
| 1567/1568 | S916M | + | |
| 1305/1306 | L968A | + | |
| 1309/1310 | G924W | + | |
| 1569/1570 | R759S | + | |
| 1313/1314 | F698D | +++ | ++ |
| 1315/1316 | S168G | + | |
| 1319/1320 | K818A | + | + |
| 1321/1322 | K818S | + | + |
| 1323/1324 | R581K | + | |
| 1325/1326 | K818P | + | + |
| 1327/1328 | S916K | + | + |
| 1329/1330 | F698S | +++ | ++ |
| 1331/1332 | A303G | + | + |
| 1333/1334 | S916C | ++ | ++ |
| 1335/1336 | T1428G | + | + |
| 1343/1344 | T311G | + | |
| 1351/1352 | S751D | + | |
| 1355/1356 | K818E | ++ | + |
| 1367/1368 | A1099G | + | |
| 1369/1370 | K799G | + | |
| 1371/1372 | S916I | + | + |
| 1379/1380 | K799P | + | |
| 1383/1384 | S916E | +++ | ++ |
| 1583/1584 | S916T | + | |
| 1385/1386 | T676Q | + | + |
| 1387/1388 | R581V | + | |
| 1389/1390 | L968P | ++ | |
| 1391/1392 | A755Y | + | |
| 1393/1394 | S916Q | ++ | + |
| 1399/1400 | F698Y | + | ++ |
| 1405/1406 | L1114A | + | |

TIS reduction was measured as a reduction in the number of counts compared to the reference polypeptide of SEQ ID NO: 1200 and are defined as follows: “+” 1-10, “++” >10, “+++” >20, “++++” >50.
IHC reduction was measured as a reduction in the number of counts compared to the reference polypeptide of SEQ ID NO: 1200 and are defined as follows: “+” 1-3, “++” >3, “+++” >5, “++++” >8, “+++++” >15

TABLE 12.7
Reduction of Total Immunogenicity Score (TIS) and Immunogenic
Hit Count (IHC) for FVIII Variants Relative to SEQ ID NO: 1514

| | Amino Acid | | |
|---|---|---|---|
| SEQ ID | Differences | TIS reduction | IHC reduction |
| NO: | (Relative to | Relative to | Relative to |
| (nt/aa) | SEQ ID NO: 1514) | SEQ ID NO: 1514 | SEQ ID NO: 1514 |
| 1513/1514 | | | |
| 1609/1610 | I215E | ++++ | + |
| 2069/2070 | L318G | ++++ | + |
| 1611/1612 | I215P | ++++ | + |
| 2033/2034 | V536K/F555G/G619E/Y737K/K799Q/E809G/ | +++ | + |
| | S839K/S916T/Q921R | | |
| 2003/2004 | I1050E | +++ | + |
| 1593/1594 | M1051H | +++ | + |
| 1595/1596 | I1283H | +++ | + |
| 1597/1598 | I1283T | +++ | + |
| 1613/1614 | I215S | +++ | + |
| 1599/1600 | Y1281Q | +++ | + |
| 1601/1602 | Y1281P | +++ | + |
| 1603/1604 | S916E | +++ | + |
| 1857/1858 | E786D/R821Q | +++ | + |
| 1589/1590 | R1042E | +++ | + |
| 1615/1616 | L178C | +++ | + |
| 1869/1870 | L178W | +++ | + |
| 1955/1956 | V536P/F555E/G619E/W732K/K799S/Y805Q | +++ | + |
| 1963/1964 | V536P/F555E/G619E/W732K/K799S | +++ | + |
| 1617/1618 | I1050T | ++ | + |
| 1619/1620 | K1210T | ++ | + |
| 1999/2000 | N616D | ++ | + |
| 2005/2006 | I610H | ++ | + |
| 2025/2026 | Y1281S | ++ | + |
| 1591/1592 | Y1041N | ++ | + |
| 1657/1658 | Y175G | ++ | + |
| 1971/1972 | V536P/F555E/G619E | ++ | + |
| 2007/2008 | Q611D | ++ | + |
| 2027/2028 | A618E | ++ | + |
| 1605/1606 | M1051W | ++ | + |
| 1627/1628 | P615D | ++ | + |
| 1825/1826 | Y1104E | ++ | |
| 1989/1990 | V536P/G619E/K799S/Y805Q | ++ | + |
| 1621/1622 | Y1281K | ++ | + |
| 1853/1854 | L1138Q | ++ | |
| 1973/1974 | G619E/S839K | ++ | + |
| 1985/1986 | V536P/G619E/D801G | ++ | + |
| 1993/1994 | Y1281H | ++ | + |
| 1623/1624 | R1042A | ++ | + |
| 1749/1750 | L178Q | ++ | + |
| 1797/1798 | Y175A | ++ | + |
| 1939/1940 | K1093P | ++ | |
| 1629/1630 | I610S | ++ | + |
| 1659/1660 | K1093W | ++ | |
| 1661/1662 | F1088G | ++ | |
| 1663/1664 | K1093T | ++ | |
| 2009/2010 | R1042T | ++ | + |
| 1607/1608 | L187C | ++ | + |
| 1631/1632 | I610K | ++ | + |
| 1633/1634 | I610T | ++ | + |
| 1675/1676 | S700E | ++ | + |
| 1697/1698 | K1093V | ++ | |
| 1907/1908 | K1093N | ++ | |
| 2023/2024 | R1158N | ++ | + |
| 1625/1626 | V104S | ++ | + |
| 1739/1740 | D790P | ++ | |
| 1881/1882 | L187G | ++ | + |
| 1635/1636 | V536P | ++ | + |
| 1637/1638 | A618Y | ++ | + |
| 1645/1646 | M110H | ++ | + |
| 1733/1734 | F1088S | ++ | |
| 1871/1872 | Y1104C | ++ | |
| 1925/1926 | D790G | ++ | |
| 1977/1978 | V536P/D801G/Y805Q | ++ | + |
| 2015/2016 | T370A/L614A | ++ | + |
| 2019/2020 | K1210V | ++ | + |
| 2021/2022 | L614T | ++ | + |
| 2065/2066 | S839K | ++ | + |
| 1639/1640 | Q621W | + | + |
| 1819/1820 | Y175H | + | + |
| 1877/1878 | K1093S | + | |
| 1991/1992 | F555E/G619E/W732K/K799S/D801G/Y805Q | + | + |
| 2031/2032 | V536P/G619E/E809G/E1109G | + | + |
| 2037/2038 | V536R/G619E/G681N/K799Q/S916T/E1109G | + | + |
| 2049/2050 | G619E/G681N/S916T | + | + |
| 1693/1694 | I756G | + | |
| 1777/1778 | M1098G | + | |
| 2001/2002 | Q621K | + | + |
| 1669/1670 | T535N | + | + |
| 1723/1724 | D790W | + | |
| 1771/1772 | K1093G | + | |
| 1781/1782 | I756T | + | |
| 1959/1960 | F555E/G619E/K799S | + | + |
| 1969/1970 | A246D/G619E/K799S/D801G | + | + |
| 1979/1980 | F555E/G619E/K799S/Y805Q | + | + |
| 2011/2012 | N616Q | + | + |
| 2041/2042 | F555E/G619E/G681N/Y737K/K799Q | + | + |
| 2051/2052 | F555G/G619E/G681N/K799S | + | + |
| 1653/1654 | E786C | + | |
| 1805/1806 | Q580S | + | |
| 1909/1910 | A119G | + | |
| 1919/1920 | H712Q | + | |
| 1923/1924 | H712G | + | |
| 1957/1958 | F555E/G619E/D801G | + | + |
| 1983/1984 | F555E/G619E | + | + |
| 2063/2064 | F555G/S916T | + | |
| 1705/1706 | L178V | + | + |
| 1713/1714 | K1093A | + | |
| 1719/1720 | E1452L | + | |
| 1745/1746 | S304G | + | + |
| 1761/1762 | Y917G | + | |
| 1793/1794 | S700A | + | + |
| 1961/1962 | G619E/K799S/D801G/Y805Q | + | + |
| 1975/1976 | G619E/K799S/Y805Q | + | + |
| 1997/1998 | L614H | + | + |
| 2017/2018 | H1156D | + | + |
| 2057/2058 | G619E/K799S | + | + |
| 1641/1642 | A618P | + | + |
| 1689/1690 | T535G | + | + |
| 1753/1754 | K752G | + | |
| 1755/1756 | F1108W | + | |
| 1783/1784 | M948S | + | |
| 1785/1786 | A119V | + | |
| 1791/1792 | M1113F | + | |
| 1795/1796 | E786D | + | |
| 1931/1932 | S1084N | + | |
| 1981/1982 | G619E/D801G/Y805Q | + | + |
| 2043/2044 | G619E/G681N/K799S/S916T/E1109G | + | + |
| 2045/2046 | G619E/G681N | + | + |
| 2059/2060 | G619E | + | + |
| 1643/1644 | L614F | + | + |
| 1727/1728 | G292D | + | + |
| 1747/1748 | S1116G | + | |
| 1787/1788 | S1116L | + | |
| 1813/1814 | L1100S | + | |
| 1905/1906 | K752E | + | |
| 2013/2014 | L614N | + | + |
| 1647/1648 | R301K | + | + |
| 1867/1868 | S304E | + | + |
| 1941/1942 | K1093Y | + | |
| 2029/2030 | F555E/G681N/Y737K/K799Q | + | |
| 1709/1710 | I310G | + | |
| 1711/1712 | S700Q | + | + |
| 1759/1760 | T281A | + | |
| 1809/1810 | D731I | + | |
| 1879/1880 | H712S | + | |
| 1929/1930 | D731L | + | |
| 1949/1950 | H712T | + | |
| 2053/2054 | F555E | + | |
| 2055/2056 | W732K | + | |
| 1649/1650 | I1078S | + | |
| 1665/1666 | L650M | + | |
| 1725/1726 | D790I | + | |
| 1731/1732 | F1108M | + | |
| 1751/1752 | S1116A | + | |
| 1845/1846 | T686W | + | |
| 1859/1860 | T535C | + | + |
| 1897/1898 | D790A | + | |
| 1953/1954 | K1093R | + | |
| 1965/1966 | K799S/Y805Q | + | |
| 2039/2040 | F555G/G619E/G681N/E807R/E1109G | + | + |
| 2067/2068 | K799Q | + | |

TIS reduction was measured as a reduction in the number of counts compared to the reference polypeptide of SEQ ID NO: 1514 and are defined as follows: “+” 1-10, “++” >10, “+++” >20, “++++” >30.
IHC reduction was measured as a reduction in the number of counts compared to the reference polypeptide of SEQ ID NO: 1514 and are defined as follows: “+” 1-3, “++” >3, “+++” >5

TABLE 12.8
Reduction of Total Immunogenicity Score (TIS) and Immungenic Hit
Count (IHC) for FVIII Variants Relative to SEQ ID NO: 2072

| | Amino Acid | | IHC |
|---|---|---|---|
| SEQ ID | Differences | TIS reduction (rel | reduction (Rel |
| NO: | (Relative to | to SEQ ID NO | to SEQ ID |
| (nt/aa) | SEQ ID NO: 2072) | 2072 = 1998) | NO 2072) |
| 2097/2098 | A167G/L178Q/S700E/K752E/K1093G | +++ | +++ |
| 2101/2102 | A167G/S700E/E738Y/E739G/K1093G | ++ | ++ |
| 2103/2104 | A167G/S700E/E738Y/K752E/K1093G | +++ | ++ |
| 2105/2106 | A167G/S700E/E738Y/K752E/Y805Q/D808S/E809G/ | +++ | ++ |
| | K1093A/S1116I | | |
| 2121/2122 | E738Y/E739G/E809G/K1093G/S1116I | ++ | |
| 2137/2138 | E738Y/K752E/K1093G | ++ | |
| 2141/2142 | E738Y/K799S/E809G/K1093G | ++ | |
| 2189/2190 | G681N/E738Y/E739G/K1093G | ++ | |
| 2203/2204 | G681N/K752E/K1093G | ++ | |
| 2205/2206 | G681N/S700E | ++ | ++ |
| 2209/2210 | G681N/S700E/E809G | ++ | ++ |
| 2211/2212 | G681N/S700E/K1093G | +++ | ++ |
| 2213/2214 | G681N/S700E/K752E/D808S/E809G/K1093G/S1116I | +++ | ++ |
| 2215/2216 | G681N/S700E/K752E/K1093G | +++ | ++ |
| 2219/2220 | G681N/S700E/Y805Q/E809G | ++ | ++ |
| 2225/2226 | K1093G/S1116I | ++ | |
| 2227/2228 | K752E | + | |
| 2233/2234 | K752E/E800V/K1093G | + | |
| 2235/2236 | K752E/E809G | + | |
| 2241/2242 | K752E/S1116I | + | |
| 2249/2250 | L178Q/G681N | ++ | + |
| 2251/2252 | L178Q/G681N/E738Y/S1116I | ++ | + |
| 2253/2254 | L178Q/K752E/E809G | ++ | + |
| 2265/2266 | S543P/E738Y/E809G/K1093G | ++ | |
| 2267/2268 | S543P/E739G/K1093A | ++ | |
| 2271/2272 | S543P/E809G/K1093G | ++ | |
| 2275/2276 | S543P/G681N/E738Y/E739G/K752E/E809G/K1093G | ++ | |
| 2277/2278 | S543P/G681N/E738Y/E739G/K752E/K1093G | ++ | |
| 2279/2280 | S543P/G681N/E739G/K752E/E800V/Y805Q/E809G/ | + | |
| | K1093G | | |
| 2281/2282 | S543P/G681N/S700E/E738Y/E739G/E800V/K1093G/ | ++ | ++ |
| | S1116I | | |
| 2283/2284 | S543P/G681N/S700E/E738Y/E739G/Y805Q/D808S/ | ++ | ++ |
| | E809G | | |
| 2287/2288 | S543P/G681N/S700E/K752E/E809G/K1093G | +++ | ++ |
| 2289/2290 | S543P/K1093G | ++ | |
| 2301/2302 | S543P/S700E/K752E/E800V/K1093G | ++ | ++ |
| 2305/2306 | S543P/S700E/K752E/K1093G | +++ | ++ |
| 2307/2308 | S700E | ++ | ++ |
| 2309/2310 | S700E/E738Y/E739G/E800V/K1093G | ++ | ++ |
| 2313/2314 | S700E/E738Y/E800V/K1093G | ++ | ++ |
| 2315/2316 | S700E/E738Y/S1116I | ++ | ++ |
| 2317/2318 | S700E/E809G | ++ | ++ |
| 2319/2320 | S700E/E809G/K1093G | +++ | ++ |
| 2321/2322 | S700E/K1093G | +++ | ++ |
| 2323/2324 | S700E/K1093G/S1116I | +++ | ++ |
| 2325/2326 | S700E/K752E | ++ | ++ |
| 2329/2330 | S700E/K752E/E809G/K1093G | +++ | ++ |
| 2333/2334 | S700E/K752E/Y805Q/E809G/K1093A | +++ | ++ |
| 2335/2336 | S700E/K799S/E800V | ++ | ++ |
| 2337/2338 | S700E/S1116I | ++ | ++ |
| 2339/2340 | S700E/Y805Q/D808S/E809G/E1076S | ++ | + |

TIS reduction was measured as a reduction in the number of counts compared to the reference polypeptide of SEQ ID NO: 2072 and are defined as follows: “+” 1-4, “++” 5-20, “+++” >20.
IHC reduction was measured as a reduction in the number of counts compared to the reference polypeptide of SEQ ID NO: 2072 and are defined as follows: “+” 4, “++” 5, “+++” >5

### Example 13

### Peptide T Cell Assay

[0364] In this Example, peptides were designed based on the wild-type B-domain deleted human factor VIII with or without mutations thought to alter the immunogenicity of the protein. Specifically, two polypeptides (SEQ ID NO: 2347 and SEQ ID NO: 2348) were prepared by Abzena Ltd. (Cambridge, United Kingdom). The sequence of the peptide of SEQ ID NO: 2347 has no amino acid changes compared to the sequence in SEQ ID NO: 2 while the sequence of the peptide of SEQ ID NO: 2348 contains a L→G substitution at amino acid position 12 of the peptide, which is equivalent to a L318G substitution relative to SEQ ID NO: 2. These peptides were analyzed for the presence of CD4⁺ T cell epitopes using EpiScreen™ T cell epitope matching technology, using peripheral blood mononuclear cells (PBMCs) from 50 healthy human donors. PBMCs were adjusted to a cell density of 2.5-3.0E6 cells/mL using AIM V© culture medium (Invitrogen, Paisley, UK). 5 μM of the peptides, or control medium, was added to the PBMCs in a flat bottomed 96-well plate. For each peptide-donor pair, 6 reactions were performed. Cultures were incubated for 6 days before adding 0.75 μCi of tritium-labeled thymidine (Perkin Elmer©, Beaconsfield, UK) to each well. Cultures were incubated another 18 hours before harvesting the cells onto filter mats using a TomTec Mach III cell harvester (Receptor Tech. Ltd., Warwick, UK). Counts per minute (CPM) for each well were determined Meltilex™ (Perkin Elmer®, Beaconsfield, UK) scintillation counting on a Microplate Beta Counter (Perkin Elmer®, Beaconsfield, UK) in paralux, low background counting mode. A Student's t-test comparing the response of the wells receiving peptide to the wells receiving medium was performed to determine the significance of the response (p<0.05). Positive responses were those whose mean CPM value of an individual peptide-donor pair divided by the average CPM value of the medium controls was above 1.90. The results for this experiment are shown in FIG. 1.

[0365] Similar to Example 1, directed evolution techniques were used to generate a gene variant containing the mutation tested using the Abzena, Ltd. Peptide T Cell Assay (SEQ ID NO: 2069 (nucleotide sequence); SEQ ID NO: 2070 (amino acid sequence)) derived from SEQ ID NO: 1514 within the same plasmid construct (See e.g., U.S. Pat. No. 8,383,346 and WO2010/144103). This variant (SEQ ID NO: 2070) was produced using the methods described in Example 2 and tested for FVIII activity after no incubation and after incubation in Hemophilia A patient plasma (George King Bio-Medical, Inc.), as described in Example 3. The variant was tested using the chromogenic assay, as described in Example 3. The results are shown in FIG. 2.

### Example 14

### Activity of Truncated FVIII Variants Derived from SEQ ID NO: 2

[0366] Similar to Example 1, directed evolution techniques generally known by those skilled in the art were used to generate gene variants derived from SEQ ID NO: 2 containing truncated versions of factor VIII within the same plasmid construct (See e.g., U.S. Pat. No. 8,383,346 and WO2010/144103). These variants were produced using the methods described in Example 2 and tested using the chromogenic assays, as described in Example 3. The results are shown in FIG. 3.

### Example 15

### Truncated FVIII Variants Derived from SEQ ID NO: 2

[0367] In this Example, experiments conducted to determine FVIII variant activity by assaying the protein activity are described. These variants were tested for FVIII activity using the chromogenic assay, as described in Example 3. Results are shown in Table 15.1 for variants expressed using Expi293F cells.

TABLE 15.1
Activity of FVIII Variants Relative to SEQ ID NO: 2

| | Amino Acid | |
|---|---|---|
| SEQ ID | Differences | Expi293F Biophen |
| NO: | (Relative to | FIOP (Primary) |
| (nt/aa) | SEQ ID NO: 2) | Relative to SEQ ID NO: 2 |
| 3/4 | T1148N | + |
| 13/14 | L171Q | +++ |
| 17/18 | V63R | ++ |
| 35/36 | L1248S | ++ |
| 67/68 | L1248R | ++ |
| 85/86 | S332Q | ++ |
| 95/96 | L1248G | +++ |
| 153/154 | S332W | + |
| 157/158 | V63H | ++ |
| 185/186 | S332P | ++ |
| 193/194 | L171P | +++ |
| 245/246 | K732G | ++ |
| 251/252 | L1377D | ++++ |
| 261/262 | E306G | +++ |
| 265/266 | L1377G | +++ |
| 267/268 | S332F | + |
| 269/270 | L1377E | ++++ |
| 281/282 | L1377R | +++ |
| 283/284 | L1377S | ++++ |
| 287/288 | L171M | +++ |
| 291/292 | L1248D | ++ |
| 293/294 | E306S | + |
| 297/298 | L171H | +++ |
| 299/300 | L1377A | +++ |
| 301/302 | L1377V | +++ |
| 305/306 | T1148R | ++ |
| 2359/2360 | E306T | + |
| 2361/2362 | E809L | + |
| 2363/2364 | E800L | + |
| 2365/2366 | F387A | + |
| 2367/2368 | Y738A | + |
| 2369/2370 | I499C | + |
| 2371/2372 | M681R | + |
| 2373/2374 | K1093E | + |
| 2375/2376 | T1148A | + |
| 2377/2378 | V63W | + |
| 2379/2380 | K752Q | + |
| 2381/2382 | I390E | + |
| 2383/2384 | V534M | + |
| 2385/2386 | L749P | + |
| 2387/2388 | K1093M | + |
| 2389/2390 | V1439S | + |
| 2391/2392 | S260K | + |
| 2393/2394 | M558V | + |
| 2395/2396 | S332N | + |
| 2397/2398 | I390T | + |
| 2399/2400 | Y738D | + |
| 2401/2402 | S700V | + |
| 2403/2404 | S1414P | + |
| 2405/2406 | K1093P | + |
| 2407/2408 | L749D | + |
| 2409/2410 | H212Y | + |
| 2411/2412 | M681C | + |
| 2413/2414 | Y805R | + |
| 2415/2416 | T1148S | + |
| 2417/2418 | E800R | + |
| 2419/2420 | S332V | + |
| 2421/2422 | L171K | + |
| 2423/2424 | E809Q | + |
| 2425/2426 | M681L | + |
| 2427/2428 | E800G | + |
| 2429/2430 | Y738T | + |
| 2431/2432 | M681E | + |
| 2433/2434 | K732C | + |
| 2435/2436 | L749C | + |
| 2437/2438 | S1414T | + |
| 2439/2440 | V63C | + |
| 2441/2442 | L171F | + |
| 2443/2444 | L318M | + |
| 2445/2446 | M681T | + |
| 2447/2448 | V534F | + |
| 2449/2450 | L750K | + |
| 2451/2452 | Y738N | + |
| 2453/2454 | K1093V | + |
| 2455/2456 | L749Q | + |
| 2457/2458 | H212F | + |
| 2459/2460 | H212M | + |
| 2461/2462 | I775S | + |
| 2463/2464 | F387W | + |
| 2465/2466 | I499L | + |
| 2467/2468 | F387R | + |
| 2469/2470 | T1148L | + |
| 2471/2472 | V1439T | + |
| 2473/2474 | E800M | + |
| 2475/2476 | L750R | + |
| 2477/2478 | V1439A | + |
| 2479/2480 | V63I | + |
| 2481/2482 | V393H | + |
| 2483/2484 | M558R | + |
| 2485/2486 | V63S | + |
| 2487/2488 | M558T | + |
| 2489/2490 | S332A | + |
| 2491/2492 | Y805C | + |
| 2493/2494 | L749F | + |
| 2495/2496 | H212A | + |
| 2497/2498 | L749A | + |
| 2499/2500 | K752L | + |
| 2501/2502 | L1248I | + |
| 2503/2504 | M681A | + |
| 2505/2506 | L171R | + |
| 2507/2508 | I775N | + |
| 2509/2510 | F387L | + |
| 2511/2512 | E809A | + |
| 2513/2514 | Y805G | + |
| 2515/2516 | K752R | + |
| 2517/2518 | M320I | + |
| 2519/2520 | V63E | + |
| 2521/2522 | Y805H | + |
| 2523/2524 | L749Y | + |
| 2525/2526 | S332G | + |
| 2527/2528 | Y805K | + |
| 2529/2530 | M558S | + |
| 2531/2532 | E800V | + |
| 2533/2534 | L1377M | + |
| 2535/2536 | E800W | + |
| 2537/2538 | E809C | + |
| 2539/2540 | Y738E | + |
| 2541/2542 | V1439H | + |
| 2543/2544 | L318V | + |
| 2545/2546 | E800Y | + |
| 2547/2548 | H212V | + |
| 2549/2550 | H212N | + |
| 2551/2552 | E800Q | + |
| 2553/2554 | H212K | + |
| 2555/2556 | L749M | + |
| 2557/2558 | S1414H | + |
| 2559/2560 | L1248C | ++ |
| 2561/2562 | L749K | ++ |
| 2563/2564 | M681Q | ++ |
| 2565/2566 | V393Y | ++ |
| 2567/2568 | Y738H | ++ |
| 2569/2570 | L750S | ++ |
| 2571/2572 | K732L | ++ |
| 2573/2574 | K752F | ++ |
| 2575/2576 | K1093S | ++ |
| 2577/2578 | L750T | ++ |
| 2579/2580 | E800I | ++ |
| 2581/2582 | E809R | ++ |
| 2583/2584 | S1414W | ++ |
| 2585/2586 | M558L | ++ |
| 2587/2588 | L318Q | ++ |
| 2589/2590 | V393Q | ++ |
| 2591/2592 | T1148E | ++ |
| 2593/2594 | L1248F | ++ |
| 2595/2596 | H212R | ++ |
| 2597/2598 | H212P | ++ |
| 2599/2600 | M681N | ++ |
| 2601/2602 | L749T | ++ |
| 2603/2604 | L171N | ++ |
| 2605/2606 | E800C | ++ |
| 2607/2608 | E809K | ++ |
| 2609/2610 | S260T | ++ |
| 2611/2612 | S332R | ++ |
| 2613/2614 | L750N | ++ |
| 2615/2616 | V534L | ++ |
| 2617/2618 | I390P | ++ |
| 2619/2620 | Y805S | ++ |
| 2621/2622 | M320Q | ++ |
| 2623/2624 | K732T | ++ |
| 2625/2626 | Y738S | ++ |
| 2627/2628 | V63K | ++ |
| 2629/2630 | E800N | ++ |
| 2631/2632 | L1248M | ++ |
| 2633/2634 | Y805L | ++ |
| 2635/2636 | E306A | ++ |
| 2637/2638 | S1414C | ++ |
| 2639/2640 | Y805P | ++ |
| 2641/2642 | H212L | ++ |
| 2643/2644 | L750G | ++ |
| 2645/2646 | K752M | ++ |
| 2647/2648 | S700E | ++ |
| 2649/2650 | S332Y | ++ |
| 2651/2652 | I390V | ++ |
| 2653/2654 | M681G | ++ |
| 2655/2656 | M558Q | ++ |
| 2657/2658 | V63F | ++ |
| 2659/2660 | E809W | ++ |
| 2661/2662 | M558E | ++ |
| 2663/2664 | M558G | ++ |
| 2665/2666 | L749I | ++ |
| 2667/2668 | K732Q | ++ |
| 2669/2670 | Y805M | ++ |
| 2671/2672 | I775K | ++ |
| 2673/2674 | F387T | ++ |
| 2675/2676 | L750Q | ++ |
| 2677/2678 | I390L | ++ |
| 2679/2680 | K732V | ++ |
| 2681/2682 | K752D | ++ |
| 2683/2684 | K752S | ++ |
| 2685/2686 | K732D | ++ |
| 2687/2688 | T1148C | ++ |
| 2689/2690 | M558P | ++ |
| 2691/2692 | E809I | ++ |
| 2693/2694 | L750W | ++ |
| 2695/2696 | S332H | ++ |
| 2697/2698 | E800P | ++ |
| 2699/2700 | K732R | ++ |
| 2701/2702 | L1248W | ++ |
| 2703/2704 | K752E | ++ |
| 2705/2706 | V63Y | ++ |
| 2707/2708 | V63T | ++ |
| 2709/2710 | L749G | ++ |
| 2711/2712 | I775G | ++ |
| 2713/2714 | K1093T | ++ |
| 2715/2716 | E306P | ++ |
| 2717/2718 | V393R | ++ |
| 2719/2720 | E809N | ++ |
| 2721/2722 | E809S | ++ |
| 2723/2724 | M681F | ++ |
| 2725/2726 | K732S | ++ |
| 2727/2728 | L750V | ++ |
| 2729/2730 | S1414A | ++ |
| 2731/2732 | E809T | ++ |
| 2733/2734 | K1093Q | ++ |
| 2735/2736 | L1248E | ++ |
| 2737/2738 | L171W | ++ |
| 2739/2740 | K732Y | ++ |
| 2741/2742 | L171T | ++ |
| 2743/2744 | Y805W | ++ |
| 2745/2746 | E809G | ++ |
| 2747/2748 | F387V | ++ |
| 2749/2750 | H212S | ++ |
| 2751/2752 | T1148M | ++ |
| 2753/2754 | I775P | ++ |
| 2755/2756 | K732M | ++ |
| 2757/2758 | V63L | ++ |
| 2759/2760 | L750P | ++ |
| 2761/2762 | V393F | ++ |
| 2763/2764 | M320P | ++ |
| 2765/2766 | V393G | ++ |
| 2767/2768 | S700T | ++ |
| 2769/2770 | K752V | ++ |
| 2771/2772 | E809V | ++ |
| 2773/2774 | K1093A | ++ |
| 2775/2776 | M320G | ++ |
| 2777/2778 | I390M | ++ |
| 2779/2780 | L1377I | ++ |
| 2781/2782 | M681W | ++ |
| 2783/2784 | S1414G | ++ |
| 2785/2786 | L750M | ++ |
| 2787/2788 | E800T | ++ |
| 2789/2790 | L318T | ++ |
| 2791/2792 | L171Y | ++ |
| 2793/2794 | M558W | ++ |
| 2795/2796 | Y805Q | ++ |
| 2797/2798 | M558A | ++ |
| 2799/2800 | M320S | ++ |
| 2801/2802 | L750D | ++ |
| 2803/2804 | I775V | ++ |
| 2805/2806 | S700A | ++ |
| 2807/2808 | L1377Y | ++ |
| 2809/2810 | M320L | +++ |
| 2811/2812 | L318R | +++ |
| 2813/2814 | V393A | +++ |
| 2815/2816 | L171V | +++ |
| 2817/2818 | V1439E | +++ |
| 2819/2820 | L1248Y | +++ |
| 2821/2822 | S332T | +++ |
| 2823/2824 | L1248Q | +++ |
| 2825/2826 | L1377C | +++ |
| 2827/2828 | L1248H | +++ |
| 2829/2830 | M681S | +++ |
| 2831/2832 | I390G | +++ |
| 2833/2834 | L171A | +++ |
| 2835/2836 | L1248T | +++ |
| 2837/2838 | V393M | +++ |
| 2839/2840 | L171S | +++ |
| 2841/2842 | E306D | +++ |
| 2843/2844 | L1248A | +++ |
| 2845/2846 | S1414E | +++ |
| 2847/2848 | S1414D | +++ |
| 2849/2850 | L1248K | +++ |
| 2851/2852 | I390S | +++ |
| 2853/2854 | L318K | +++ |
| 2855/2856 | M320T | +++ |
| 2857/2858 | L171D | +++ |
| 2859/2860 | L171E | +++ |
| 2861/2862 | M320V | +++ |
| 2863/2864 | L1377P | +++ |
| 2865/2866 | M320R | +++ |
| 2867/2868 | L1377T | +++ |
| 2869/2870 | L1377H | +++ |

All activities were determined relative to the reference polypeptide of SEQ ID NO: 2. Levels of increased activity are defined as follows: “+” 0.9 to 1.1, “++” >1.1, “+++” >1.5, “++++” >3.5

[0368] Active FVIII variants identified in screens from this Example were assessed for their levels of predicted immunogenicity by evaluating their binding to the eight common Class 11 HILA-DR alleles, as in Example 12. The total immunogenicity score and immunogenic hit count were calculated for each variant. The total immunogenicity score (TIS) reflects the overall predicted immunogenicity of the variant (i.e., a higher score indicates a higher level of predicted immunogenicity). The immunogenic “hit count” (IHC) indicates the number of 15-mer analysis frames with an unusually high potential for immunogenicity (i.e., a higher score indicates a higher potential for immunogenicity). Mutations resulting in a reduced total immunogenicity score and/or an immunogenic hit count compared to the reference sequence were considered to be potential “deimmunizing mutations” and are shown in Table 15.2.

TABLE 15.2
Reduction of Total Immunogenicity Score (TIS) and Immungenic
Hit Count (IHC) for FVIII Variants Relative to SEQ ID NO: 2

| | Amino Acid | | |
|---|---|---|---|
| | Differences | TIS reduction | IHC reduction |
| SEQ ID NO: | (Relative to | Relative to | Relative to |
| (nt/aa) | SEQ ID NO: 2) | SEQ ID NO: 2 | SEQ ID NO: 2 |
| 2365/2366 | F387A | +++ | + |
| 2369/2370 | I499C | ++ | |
| 2371/2372 | M681R | + | + |
| 2373/2374 | K1093E | ++ | |
| 2379/2380 | K752Q | ++ | + |
| 2381/2382 | I390E | +++ | + |
| 2385/2386 | L749P | ++ | + |
| 2389/2390 | V1439S | ++ | + |
| 2391/2392 | S260K | + | + |
| 2393/2394 | M558V | ++ | + |
| 2395/2396 | S332N | + | + |
| 2397/2398 | I390T | ++ | + |
| 2401/2402 | S700V | | + |
| 2405/2406 | K1093P | ++ | |
| 2407/2408 | L749D | +++ | + |
| 2411/2412 | M681C | +++ | + |
| 2419/2420 | S332V | | + |
| 2421/2422 | L171K | + | |
| 2431/2432 | M681E | +++ | + |
| 2435/2436 | L749C | +++ | + |
| 2439/2440 | V63C | +++ | + |
| 2445/2446 | M681T | +++ | + |
| 2447/2448 | V534F | + | + |
| 2449/2450 | L750K | + | + |
| 2453/2454 | K1093V | ++ | |
| 2455/2456 | L749Q | ++ | + |
| 2459/2460 | H212M | + | |
| 2463/2464 | F387W | + | + |
| 2465/2466 | 1499L | + | |
| 2467/2468 | F387R | ++ | + |
| 2471/2472 | V1439T | ++ | + |
| 2475/2476 | L750R | + | |
| 2477/2478 | V1439A | + | + |
| 2483/2484 | M558R | ++ | + |
| 2485/2486 | V63S | +++ | + |
| 2487/2488 | M558T | +++ | + |
| 2493/2494 | L749F | + | + |
| 2495/2496 | H212A | + | + |
| 2497/2498 | L749A | + | + |
| 2499/2500 | K752L | + | + |
| 2503/2504 | M681A | +++ | + |
| 2505/2506 | L171R | + | |
| 2509/2510 | F387L | + | + |
| 2517/2518 | M320I | + | + |
| 2519/2520 | V63E | +++ | + |
| 2525/2526 | S332G | + | + |
| 2529/2530 | M558S | ++ | + |
| 2533/2534 | L1377M | + | + |
| 2541/2542 | V1439H | + | + |
| 2543/2544 | L318V | ++ | + |
| 2553/2554 | H212K | + | |
| 2555/2556 | L749M | | + |
| 2559/2560 | L1248C | + | + |
| 2561/2562 | L749K | + | + |
| 2563/2564 | M681Q | +++ | + |
| 2569/2570 | L750S | ++ | + |
| 2573/2574 | K752F | + | + |
| 2575/2576 | K1093S | + | |
| 2577/2578 | L750T | + | + |
| 2585/2586 | M558L | + | + |
| 2587/2588 | L318Q | +++ | + |
| 2589/2590 | V393Q | + | |
| 2591/2592 | T1148E | + | + |
| 2593/2594 | L1248F | + | + |
| 2597/2598 | H212P | + | + |
| 2599/2600 | M681N | +++ | + |
| 2601/2602 | L749T | ++ | + |
| 2603/2604 | L171N | ++ | + |
| 2609/2610 | S260T | + | + |
| 2613/2614 | L750N | ++ | + |
| 2617/2618 | I390P | +++ | + |
| 2621/2622 | M320Q | + | + |
| 2627/2628 | V63K | ++ | + |
| 2631/2632 | L1248M | + | + |
| 2637/2638 | S1414C | + | |
| 2643/2644 | L750G | + | + |
| 2645/2646 | K752M | + | |
| 2647/2648 | S700E | ++ | + |
| 2649/2650 | S332Y | + | + |
| 2651/2652 | I390V | + | + |
| 2653/2654 | M681G | +++ | + |
| 2655/2656 | M558Q | +++ | + |
| 2661/2662 | M558E | +++ | + |
| 2663/2664 | M558G | +++ | + |
| 2671/2672 | I775K | + | |
| 2673/2674 | F387T | +++ | + |
| 2675/2676 | L750Q | + | + |
| 2681/2682 | K752D | ++ | + |
| 2683/2684 | K752S | + | + |
| 2687/2688 | T1148C | + | + |
| 2689/2690 | M558P | +++ | + |
| 2693/2694 | L750W | + | + |
| 2701/2702 | L1248W | | + |
| 2703/2704 | K752E | ++ | + |
| 2707/2708 | V63T | +++ | + |
| 2709/2710 | L749G | +++ | + |
| 2711/2712 | I775G | + | |
| 2713/2714 | K1093T | ++ | |
| 2727/2728 | L750V | | + |
| 2733/2734 | K1093Q | ++ | |
| 2735/2736 | L1248E | + | + |
| 2737/2738 | L171W | + | |
| 2741/2742 | L171T | + | |
| 2747/2748 | F387V | ++ | + |
| 2749/2750 | H212S | + | + |
| 2753/2754 | I775P | + | |
| 2759/2760 | L750P | ++ | + |
| 2761/2762 | V393F | + | |
| 2763/2764 | M320P | ++ | + |
| 2765/2766 | V393G | +++ | + |
| 2767/2768 | S700T | + | + |
| 2769/2770 | K752V | ++ | + |
| 2773/2774 | K1093A | + | |
| 2775/2776 | M320G | ++ | + |
| 2777/2778 | I390M | + | |
| 2779/2780 | L1377I | + | + |
| 2781/2782 | M681W | + | + |
| 2783/2784 | S1414G | + | |
| 2789/2790 | L318T | ++ | |
| 2793/2794 | M558W | ++ | + |
| 2797/2798 | M558A | +++ | + |
| 2799/2800 | M320S | + | |
| 2801/2802 | L750D | +++ | + |
| 2803/2804 | I775V | + | |
| 2805/2806 | S700A | + | + |
| 2807/2808 | L1377Y | ++ | + |
| 2809/2810 | M320L | + | + |
| 2817/2818 | V1439E | +++ | + |
| 2819/2820 | L1248Y | + | + |
| 2823/2824 | L1248Q | + | + |
| 2825/2826 | L1377C | ++ | + |
| 2827/2828 | L1248H | + | + |
| 2829/2830 | M681S | +++ | + |
| 2831/2832 | I390G | +++ | + |
| 2833/2834 | L171A | + | + |
| 2835/2836 | L1248T | + | + |
| 2839/2840 | L171S | + | + |
| 2841/2842 | E306D | + | |
| 2843/2844 | L1248A | + | + |
| 2847/2848 | S1414D | + | |
| 2849/2850 | L1248K | ++ | + |
| 2851/2852 | I390S | + | + |
| 2853/2854 | L318K | ++ | + |
| 2855/2856 | M320T | ++ | + |
| 2857/2858 | L171D | ++ | + |
| 2859/2860 | L171E | ++ | + |
| 2861/2862 | M320V | + | + |
| 2863/2864 | L1377P | ++ | + |
| 2865/2866 | M320R | | + |
| 2867/2868 | L1377T | ++ | + |
| 2869/2870 | L1377H | ++ | + |

TIS reduction was measured as a reduction in the number of counts compared to the reference polypeptide of SEQ ID NO: 2 and are defined as follows: “+” 1-10, “++” >10, “+++” >20.
IHC reduction was measured as a reduction in the number of counts compared to the reference polypeptide of SEQ ID NO: 2 and are defined as follows: “+” 1-3, “++” >3, “+++” >5

### Example 16

### In Vitro Characterization of FVIII Variants

[0369] In this Example, experiments conducted to characterize FVIII variants produced as indicated herein are described.

Production of Factor VIII in Expi293F™ Cells or HepG2 cells

[0370] Expi293F™ (ThermoFisher Scientific) cells or HepG2 cells were transfected with pcDNA 3.1(+) or a CMV promoter and BGH-pA containing vectors encoding wild type FVIII with B-domain deleted, or variants, using the lipofection method with ExpiFectamine™ 293 Transfection Kit (ThermoFisher Scientific) or LIPOFECTAMINE® 3000 Reagent (ThermoFisher Scientific). Expi293F™ (ThermoFisher Scientific) cells were cultured in growth medium (Expi293™ Expression Medium; ThermoFisher Scientific). HepG2 cells were cultured in growth medium (EMEM with 10% fetal bovine serum, both from Corning). Expi293F™ cells or HepG2 cells were transfected with plasmid DNA and grown in suspension for 3-7 days. Conditioned media was then harvested, clarified by centrifugation and filtration, and stored at −80° C. until characterization.

Analysis of FVIII Variant Expression from Expi293F™ Cells or HepG2 Cells (ELISA)

[0371] FVIII variant expression in conditioned media was analyzed using human factor VIII ELISA kit (Ab272771, Abcam) according to the company's standard operating protocol. The colorimetric assay measures total human FVIII in the 0.0002 IU/ml-0.84 IU/ml range. FVIII variants above 0.84 IU/ml were diluted in tris-BSA buffer (A221406-RUO, Aniara Diagnostica) in a 96-well microtiter plate. The absorbance of all wells was measured at 450 nm using the EnVision Multimode Plate Reader. The results from this analysis are presented in FIG. 4 & FIG. 5, plotting mean±standard deviation of triplicates.

### Analysis of FVIII Variant Activity (Chromogenic Assay)

[0372] FVIII variant activity was determined by measuring the release of paranitroaniline (pNa) from a synthetic peptide substrate. For an unchallenged assay, 25 μL of diluted or undiluted Expi293F or HepG2 conditioned media produced as described above were warmed to 37° C. and mixed with 25 μL of “Reagent 1” (BIOPHEN™ FVIII:C, Aniara) and 25 μL of “Reagent 2” (BIOPHEN™ FVIII:C, Aniara) in a 96-well, black, opaque bottom microtiter plate. The reactions were mixed briefly and incubated at 37° C. for 5 minutes. 25 μL of “Reagent 3” (BIOPHEN™ FVIII:C, Aniara) was then added, and the reactions were mixed briefly and incubated at 37° C. for 5 minutes prior to quenching with 25 μL pf 2% citric acid. Release of pNA was analyzed using an EnVision® 2105 Multimode Plate Reader (PerkinElmer) monitoring absorbance at 405 nm. “Reagent 1”, “Reagent 2”, and “Reagent 3” are components of a chromogenic assay (BIOPHEN™ FVIII:C) supplied by Aniara and used as recommended by the supplier. The results from this analysis are presented in FIG. 6 & FIG. 7 (before normalization) and FIG. 8 & FIG. 9 (after normalization using the protein concentration determined by ELISA above), plotting mean±standard deviation of triplicates.

### Analysis of FVIII Variant Activity (Clotting Assay)

[0373] FVIII variant activity was determined by measuring the clotting rate of Hemophilia A patient plasma (George King Bio-Medical, Inc.) using the activated partial thromboplastin time assay. For an unchallenged assay, 25 μL of diluted or undiluted Expi293F or HepG2 conditioned media produced as described above were warmed to 37° C. and mixed with 30 μL of Hemophilia A patient plasma (George King Bio-Medical, Inc.) and 50 μL of aPTT-XL reagent (Pacific Hemostasis) in a 96-well, black, opaque bottom microtiter plate. The reactions were mixed briefly and incubated at 37° C. for 3 minutes. 10 μL of 200 μM calcium chloride (Sigma Aldrich) was then added, and the reactions were mixed briefly. Clotting was analyzed using an EnVision® 2105 Multimode Plate Reader (PerkinElmer) monitoring absorbance at 405 nm over time for 5-10 minutes. Analyses were performed using an R script to extrapolate the clot initiation time from the collected data points. The results from this analysis are presented in FIG. 10, plotting mean±standard deviation of triplicates.

### Analysis of FVIII Variant Stability in Hemophilia A Patient Plasma

[0374] FVIII variants were challenged with Hemophilia A patient plasma (George King Bio-Medical, Inc.) to simulate the conditions that the variants may encounter within the bloodstream. First, 50 μL of Expi293F or HepG2 conditioned media produced as described above and 50 μL of Hemophilia A patient plasma (George King Bio-Medical, Inc.) were added to the wells of a 96-well round bottom microtiter plate. The plates were sealed with a PlateLoc® thermal microplate sealer (Agilent), and incubated at 37-55° C. for 1-96 h. The samples were then analyzed by the chromogenic assay described above. The results from this analysis are presented in FIG. 11, plotting mean±standard deviation of triplicates.

[0375] While the invention has been described with reference to the specific embodiments, various changes can be made and equivalents can be substituted to adapt to a particular situation, material, composition of matter, process, process step or steps, thereby achieving benefits of the invention without departing from the scope of what is claimed.

[0376] For all purposes, each and every publication and patent document cited in this disclosure is incorporated herein by reference as if each such publication or document was specifically and individually indicated to be incorporated herein by reference. Citation of publications and patent documents is not intended as an indication that any such document is pertinent prior art, nor does it constitute an admission as to its contents or date.

The application's sequence listing, which the Patent Office published only in electronic form, follows.

SEQUENCE LISTING (2870 sequences)

SEQ ID NO: 1 - DNA, 4371 bp, synthetic construct
  misc_feature 1..4371: note = B-domain deleted version of wild type human Factor VIII
  source 1..4371: mol_type = other DNA
atgcagattgaactgtctacctgcttcttcctctgtttgctgaggttctgctttagcgccactagacggtactaccttggcgctgtggagctgtcctgggactatatgcagagtgatttgggagagcttcccgtcgacgcacgatttcctcctcgcgttccaaagtcatttcccttcaacacaagcgtggtgtacaagaagacgctcttcgtcgaattcaccgatcacctgttcaatatcgccaaacccagaccaccatggatgggtcttttggggcctaccatacaagcggaggtgtatgacacagttgttatcactctcaagaacatggcttctcatccggtaagtcttcacgcagtgggcgtgtcctactggaaagcttcagaaggagccgagtatgatgatcagacatcccagagggagaaagaagacgacaaggtatttccaggtgggtctcatacctatgtgtggcaagtgctcaaagagaatggccctatggcaagcgatccgctctgtttgacttacagctacctttcacacgttgacctcgtcaaggacctcaactccgggttgattggagccttgttggtatgcagggaaggatctcttgccaaagagaagacacagaccctccacaagtttatccttctctttgctgtgttcgatgagggcaaaagttggcatagcgaaacgaagaattccctcatgcaggatcgcgacgcagccagcgccagagcttggcccaagatgcacactgtgaacggatatgtcaataggtcacttcctggcttgattgggtgtcatcggaaaagtgtctactggcacgtgatcggaatggggacaacaccagaggtccactccatatttctcgaaggccataccttccttgttcgaaaccacagacaggcatccttggagatctctcccattacctttctcactgcccaaacgctccttatggacttgggtcagttccttctcttctgccatatcagctcacaccagcatgatggtatggaagcttatgtgaaagtcgacagttgtcctgaggagccacagttgcgcatgaagaataatgaagaagccgaggattacgacgacgatctcaccgattctgagatggacgtggtgaggtttgatgacgacaactctccctccttcattcaaatccggagcgtggcgaagaaacaccccaagacttgggtccactatatagcggcggaagaggaggattgggattacgctcctcttgtattggcaccagatgaccgctcatacaaaagccagtacctcaacaacggaccgcagagaattggccggaagtataagaaagtgcgatttatggcctatacagacgaaacctttaagacaagggaggccatccagcatgagagtgggattttgggacctcttctttacggcgaagttggtgataccctcctcatcatcttcaagaatcaagcttctcgcccctataacatttacccacacgggatcactgacgttaggcctttgtatagcagaagacttcccaaaggcgtgaagcatctcaaagacttccccattttgccaggcgagatctttaagtacaaatggaccgtcacagtggaagatggaccgactaaatcagaccctcgatgccttacgcggtactattcctccttcgtgaatatggagagagatttggcaagcggactcataggaccactcctcatctgttacaaggaatctgtagaccagaggggtaaccagattatgagtgataaacgcaatgtgatcctttttagcgtcttcgacgagaaccggtcctggtacttgaccgagaatatacaaaggttccttcccaaccccgcaggcgttcagttggaagaccctgagtttcaggccagcaatattatgcactcaatcaacggctatgtgtttgatagtctccagctttctgtttgcctccatgaagtagcctattggtacatcttgtcaattggtgctcaaacagacttcctctccgtcttcttctccggctacacctttaagcacaagatggtgtatgaggacactctcacactctttccattttctggagaaaccgtgttcatgagcatggagaatccaggcctttggatcttgggttgccacaacagtgattttcgcaatcggggaatgactgctctcctcaaagtcagcagctgtgataagaacacaggcgactattacgaagattcttacgaggacataagtgcctacttgttgtccaagaataacgccattgagcccagatcattctcccagaatcctcccgtgcttaaaaggcatcagcgcgaaatcaccagaactactcttcagtctgatcaagaggagattgactatgacgacaccataagcgtggaaatgaagaaggaggatttcgatatctatgacgaagatgagaaccagtctccgcggagctttcagaagaagacgcgacactacttcattgcagcagtcgaaaggctttgggactacggtatgtcatcatcccctcatgtgttgcgcaatagagctcagagtggaagtgttccacagttcaagaaagtcgtctttcaagagtttacagatggcagcttcacacagcctctctatcggggcgagcttaacgaacatttgggactccttggtccctatatccgagccgaagtggaggacaacattatggttacctttaggaatcaagcctctcgcccctacagcttctactcctccctcatcagttatgaggaggatcagagacaaggcgctgaaccacggaagaactttgtgaaaccgaatgagacgaagacctacttctggaaagtacagcaccacatggcccccacaaaagacgaattcgattgcaaagcatgggcgtatttttcagacgttgacttggagaaagatgtacattcaggacttattggtcctttgttggtgtgtcacactaacactctcaatccagcccatggcaggcaggtgacagtccaggaattcgctcttttctttaccatctttgatgagaccaagtcctggtacttcacggaaaacatggagcgcaattgcagagccccctgtaacatacagatggaggaccctacctttaaggaaaattatcggttccacgcaatcaacggatacattatggatacactccctggccttgtgatggctcaggaccaacgaatcaggtggtacctcctcagcatgggttctaatgagaacatacactccattcacttttcaggacatgtgttcactgtccggaagaaagaagagtataagatggccctctacaatttgtatccaggcgtgtttgagaccgttgaaatgcttccctctaaagctggcatctggagagtagagtgcttgatcggagaacatcttcacgcaggtatgagcaccttgttcctcgtgtacagcaacaaatgtcagaccccacttggcatggccagtggacacattcgcgactttcagatcacagcatctggccagtatggacaatgggccccaaagttggctcgcctccattactccggtagcataaatgcgtggtccactaaagaacctttcagctggattaaggtcgatcttcttgcccccatgatcatccacggcattaagacacagggagcgaggcagaaattctcctccctctacatctcacagttcattattatgtatagtttggacggcaagaagtggcaaacttatagaggtaacagtactggaacactcatggtgttcttcggcaacgttgatagctctggcatcaaacacaacatctttaatcctcccataatagctcggtacatcagattgcatccgacccactacagcattaggagtacactccgaatggagcttatgggttgcgacttgaattcctgttcaatgccactcggaatggagtctaaagccatctctgatgcacagataaccgccagtagctactttacgaacatgtttgctacgtggtcaccctctaaggcaaggcttcatttgcaaggccggtctaatgcctggagacctcaggtgaacaacccgaaagaatggctccaggtggactttcagaagaccatgaaagtaacaggtgtcactactcagggagttaagtccttgctcaccagcatgtatgtgaaggagttccttatttcctcatcacaagatggccaccagtggaccctcttctttcagaatggtaaggtcaaagtgtttcagggcaatcaagacagcttcacacccgtggtgaacagtcttgatcctccactcttgacacgataccttcgaatccatccacagtcttgggttcaccagattgcattgcgcatggaagtacttggatgcgaggctcaggacctctac

SEQ ID NO: 2 - protein, 1457 aa, synthetic construct
  REGION 1..1457: note = B-domain deleted version of wild type human Factor VIII
MQIELSTCFFLCLLRFCFSATRRYYLGAVELSWDYMQSDLGELPVDARFPPRVPKSFPFNTSVVYKKTLFVEFTDHLFNIAKPRPPWMGLLGPTIQAEVYDTVVITLKNMASHPVSLHAVGVSYWKASEGAEYDDQTSQREKEDDKVFPGGSHTYVWQVLKENGPMASDPLCLTYSYLSHVDLVKDLNSGLIGALLVCREGSLAKEKTQTLHKFILLFAVFDEGKSWHSETKNSLMQDRDAASARAWPKMHTVNGYVNRSLPGLIGCHRKSVYWHVIGMGTTPEVHSIFLEGHTFLVRNHRQASLEISPITFLTAQTLLMDLGQFLLFCHISSHQHDGMEAYVKVDSCPEEPQLRMKNNEEAEDYDDDLTDSEMDVVRFDDDNSPSFIQIRSVAKKHPKTWVHYIAAEEEDWDYAPLVLAPDDRSYKSQYLNNGPQRIGRKYKKVRFMAYTDETFKTREAIQHESGILGPLLYGEVGDTLLIIFKNQASRPYNIYPHGITDVRPLYSRRLPKGVKHLKDFPILPGEIFKYKWTVTVEDGPTKSDPRCLTRYYSSFVNMERDLASGLIGPLLICYKESVDQRGNQIMSDKRNVILFSVFDENRSWYLTENIQRFLPNPAGVQLEDPEFQASNIMHSINGYVFDSLQLSVCLHEVAYWYILSIGAQTDFLSVFFSGYTFKHKMVYEDTLTLFPFSGETVFMSMENPGLWILGCHNSDFRNRGMTALLKVSSCDKNTGDYYEDSYEDISAYLLSKNNAIEPRSFSQNPPVLKRHQREITRTTLQSDQEEIDYDDTISVEMKKEDFDIYDEDENQSPRSFQKKTRHYFIAAVERLWDYGMSSSPHVLRNRAQSGSVPQFKKVVFQEFTDGSFTQPLYRGELNEHLGLLGPYIRAEVEDNIMVTFRNQASRPYSFYSSLISYEEDQRQGAEPRKNFVKPNETKTYFWKVQHHMAPTKDEFDCKAWAYFSDVDLEKDVHSGLIGPLLVCHTNTLNPAHGRQVTVQEFALFFTIFDETKSWYFTENMERNCRAPCNIQMEDPTFKENYRFHAINGYIMDTLPGLVMAQDQRIRWYLLSMGSNENIHSIHFSGHVFTVRKKEEYKMALYNLYPGVFETVEMLPSKAGIWRVECLIGEHLHAGMSTLFLVYSNKCQTPLGMASGHIRDFQITASGQYGQWAPKLARLHYSGSINAWSTKEPFSWIKVDLLAPMIIHGIKTQGARQKFSSLYISQFIIMYSLDGKKWQTYRGNSTGTLMVFFGNVDSSGIKHNIFNPPIIARYIRLHPTHYSIRSTLRMELMGCDLNSCSMPLGMESKAISDAQITASSYFTNMFATWSPSKARLHLQGRSNAWRPQVNNPKEWLQVDFQKTMKVTGVTTQGVKSLLTSMYVKEFLISSSQDGHQWTLFFQNGKVKVFQGNQDSFTPVVNSLDPPLLTRYLRIHPQSWVHQIALRMEVLGCEAQDLY

SEQ ID NO: 3 - DNA, 4371 bp, synthetic construct
  misc_feature 1..4371: note = Variant of human B-domain deleted Factor VIII
  source 1..4371: mol_type = other DNA
atgcagattgaactgtctacctgcttcttcctctgtttgctgaggttctgctttagcgccactagacggtactaccttggcgctgtggagctgtcctgggactatatgcagagtgatttgggagagcttcccgtcgacgcacgatttcctcctcgcgttccaaagtcatttcccttcaacacaagcgtggtgtacaagaagacgctcttcgtcgaattcaccgatcacctgttcaatatcgccaaacccagaccaccatggatgggtcttttggggcctaccatacaagcggaggtgtatgacacagttgttatcactctcaagaacatggcttctcatccggtaagtcttcacgcagtgggcgtgtcctactggaaagcttcagaaggagccgagtatgatgatcagacatcccagagggagaaagaagacgacaaggtatttccaggtgggtctcatacctatgtgtggcaagtgctcaaagagaatggccctatggcaagcgatccgctctgtttgacttacagctacctttcacacgttgacctcgtcaaggacctcaactccgggttgattggagccttgttggtatgcagggaaggatctcttgccaaagagaagacacagaccctccacaagtttatccttctctttgctgtgttcgatgagggcaaaagttggcatagcgaaacgaagaattccctcatgcaggatcgcgacgcagccagcgccagagcttggcccaagatgcacactgtgaacggatatgtcaataggtcacttcctggcttgattgggtgtcatcggaaaagtgtctactggcacgtgatcggaatggggacaacaccagaggtccactccatatttctcgaaggccataccttccttgttcgaaaccacagacaggcatccttggagatctctcccattacctttctcactgcccaaacgctccttatggacttgggtcagttccttctcttctgccatatcagctcacaccagcatgatggtatggaagcttatgtgaaagtcgacagttgtcctgaggagccacagttgcgcatgaagaataatgaagaagcggaggattacgacgacgatctcaccgattctgagatggacgtggtgaggtttgatgacgacaactctccctccttcattcaaatccggagcgtggcgaagaaacaccccaagacttgggtccactatatagcggcggaagaggaggattgggattacgctcctcttgtattggcaccagatgaccgctcatacaaaagccagtacctcaacaacggaccgcagagaattggccggaagtataagaaagtgcgatttatggcctatacagacgaaacctttaagacaagggaggccatccagcatgagagtgggattttgggacctcttctttacggcgaagttggtgataccctcctcatcatcttcaagaatcaagcttctcgcccctataacatttacccacacgggatcactgacgttaggcctttgtatagcagaagacttcccaaaggcgtgaagcatctcaaagacttccccattttgccaggcgagatctttaagtacaaatggaccgtcacagtggaagatggaccgactaaatcagaccctcgatgccttacgcggtactattcctccttcgtgaatatggagagagatttggcaagcggactcataggaccactcctcatctgttacaaggaatctgtagaccagaggggtaaccagattatgagtgataaacgcaatgtgatcctttttagcgtcttcgacgagaaccggtcctggtacttgaccgagaatatacaaaggttccttcccaaccccgcaggcgttcagttggaagaccctgagtttcaggccagcaatattatgcactcaatcaacggctatgtgtttgatagtctccagctttctgtttgcctccatgaagtagcctattggtacatcttgtcaattggtgctcaaacagacttcctctccgtcttcttctccggctacacctttaagcacaagatggtgtatgaggacactctcacactctttccattttctggagaaaccgtgttcatgagcatggagaatccaggcctttggatcttgggttgccacaacagtgattttcgcaatcggggaatgactgctctcctcaaagtcagcagctgtgataagaacacaggcgactattacgaagattcttacgaggacataagtgcctacttgttgtccaagaataacgccattgagcccagatcattctcccagaatcctcccgtgcttaaaaggcatcagcgcgaaatcaccagaactactcttcagtctgatcaagaggagattgactatgacgacaccataagcgtggaaatgaagaaggaggatttcgatatctatgacgaagatgagaaccagtctccgcggagctttcagaagaagacgcgacactacttcattgcagcagtcgaaaggctttgggactacggtatgtcatcatcccctcatgtgttgcgcaatagagctcagagtggaagtgttccacagttcaagaaagtcgtctttcaagagtttacagatggcagcttcacacagcctctctatcggggcgagcttaacgaacatttgggactccttggtccctatatccgagccgaagtggaggacaacattatggttacctttaggaatcaagcctctcgcccctacagcttctactcctccctcatcagttatgaggaggatcagagacaaggcgctgaaccacggaagaactttgtgaaaccgaatgagacgaagacctacttctggaaagtacagcaccacatggcccccacaaaagacgaattcgattgcaaagcatgggcgtatttttcagacgttgacttggagaaagatgtacattcaggacttattggtcctttgttggtgtgtcacactaacactctcaatccagcccatggcaggcaggtgacagtccaggaattcgctcttttctttaccatctttgatgagaccaagtcctggtacttcacggaaaacatggagcgcaattgcagagccccctgtaacatacagatggaggaccctacctttaaggaaaattatcggttccacgcaatcaacggatacattatggatacactccctggccttgtgatggctcaggaccaacgaatcaggtggtacctcctcagcatgggttctaatgagaacatacactccattcacttttcaggacatgtgttcactgtccggaagaaagaagagtataagatggccctctacaatttgtatccaggcgtgtttgagaccgttgaaatgcttccctctaaagctggcatctggagagtagagtgcttgatcggagaacatcttcacgcaggtatgagcaccttgttcctcgtgtacagcaacaaatgtcagaacccacttggcatggccagtggacacattcgcgactttcagatcacagcatctggccagtatggacaatgggccccaaagttggctcgcctccattactccggtagcataaatgcgtggtccactaaagaacctttcagctggattaaggtcgatcttcttgcccccatgatcatccacggcattaagacacagggagcgaggcagaaattctcctccctctacatctcacagttcattattatgtatagtttggacggcaagaagtggcaaacttatagaggtaacagtactggaacactcatggtgttcttcggcaacgttgatagctctggcatcaaacacaacatctttaatcctcccataatagctcggtacatcagattgcatccgacccactacagcattaggagtacactccgaatggagcttatgggttgcgacttgaattcctgttcaatgccactcggaatggagtctaaagccatctctgatgcacagataaccgccagtagctactttacgaacatgtttgctacgtggtcaccctctaaggcaaggcttcatttgcaaggccggtctaatgcctggagacctcaggtgaacaacccgaaagaatggctccaggtggactttcagaagaccatgaaagtaacaggtgtcactactcagggagttaagtccttgctcaccagcatgtatgtgaaggagttccttatttcctcatcacaagatggccaccagtggaccctcttctttcagaatggtaaggtcaaagtgtttcagggcaatcaagacagcttcacacccgtggtgaacagtcttgatcctccactcttgacacgataccttcgaatccatccacagtcttgggttcaccagattgcattgcgcatggaagtacttggatgcgaggctcaggacctctac

SEQ ID NO: 4 - protein, 1457 aa, synthetic construct
  REGION 1..1457: note = Variant of human B-domain deleted Factor VIII
MQIELSTCFFLCLLRFCFSATRRYYLGAVELSWDYMQSDLGELPVDARFPPRVPKSFPFNTSVVYKKTLFVEFTDHLFNIAKPRPPWMGLLGPTIQAEVYDTVVITLKNMASHPVSLHAVGVSYWKASEGAEYDDQTSQREKEDDKVFPGGSHTYVWQVLKENGPMASDPLCLTYSYLSHVDLVKDLNSGLIGALLVCREGSLAKEKTQTLHKFILLFAVFDEGKSWHSETKNSLMQDRDAASARAWPKMHTVNGYVNRSLPGLIGCHRKSVYWHVIGMGTTPEVHSIFLEGHTFLVRNHRQASLEISPITFLTAQTLLMDLGQFLLFCHISSHQHDGMEAYVKVDSCPEEPQLRMKNNEEAEDYDDDLTDSEMDVVRFDDDNSPSFIQIRSVAKKHPKTWVHYIAAEEEDWDYAPLVLAPDDRSYKSQYLNNGPQRIGRKYKKVRFMAYTDETFKTREAIQHESGILGPLLYGEVGDTLLIIFKNQASRPYNIYPHGITDVRPLYSRRLPKGVKHLKDFPILPGEIFKYKWTVTVEDGPTKSDPRCLTRYYSSFVNMERDLASGLIGPLLICYKESVDQRGNQIMSDKRNVILFSVFDENRSWYLTENIQRFLPNPAGVQLEDPEFQASNIMHSINGYVFDSLQLSVCLHEVAYWYILSIGAQTDFLSVFFSGYTFKHKMVYEDTLTLFPFSGETVFMSMENPGLWILGCHNSDFRNRGMTALLKVSSCDKNTGDYYEDSYEDISAYLLSKNNAIEPRSFSQNPPVLKRHQREITRTTLQSDQEEIDYDDTISVEMKKEDFDIYDEDENQSPRSFQKKTRHYFIAAVERLWDYGMSSSPHVLRNRAQSGSVPQFKKVVFQEFTDGSFTQPLYRGELNEHLGLLGPYIRAEVEDNIMVTFRNQASRPYSFYSSLISYEEDQRQGAEPRKNFVKPNETKTYFWKVQHHMAPTKDEFDCKAWAYFSDVDLEKDVHSGLIGPLLVCHTNTLNPAHGRQVTVQEFALFFTIFDETKSWYFTENMERNCRAPCNIQMEDPTFKENYRFHAINGYIMDTLPGLVMAQDQRIRWYLLSMGSNENIHSIHFSGHVFTVRKKEEYKMALYNLYPGVFETVEMLPSKAGIWRVECLIGEHLHAGMSTLFLVYSNKCQNPLGMASGHIRDFQITASGQYGQWAPKLARLHYSGSINAWSTKEPFSWIKVDLLAPMIIHGIKTQGARQKFSSLYISQFIIMYSLDGKKWQTYRGNSTGTLMVFFGNVDSSGIKHNIFNPPIIARYIRLHPTHYSIRSTLRMELMGCDLNSCSMPLGMESKAISDAQITASSYFTNMFATWSPSKARLHLQGRSNAWRPQVNNPKEWLQVDFQKTMKVTGVTTQGVKSLLTSMYVKEFLISSSQDGHQWTLFFQNGKVKVFQGNQDSFTPVVNSLDPPLLTRYLRIHPQSWVHQIALRMEVLGCEAQDLY

SEQ ID NO: 5 - DNA, 4371 bp, synthetic construct
  misc_feature 1..4371: note = Variant of human B-domain deleted Factor VIII
  source 1..4371: mol_type = other DNA
atgcagattgaactgtctacctgcttcttcctctgtttgctgaggttctgctttagcgccactagacggtactaccttggcgctgtggagctgtcctgggactatatgcagagtgatttgggagagcttcccgtcgacgcacgatttcctcctcgcgttccaaagtcatttcccttcaacacaagcgtggtgtacaagaagacgctcttcgtcgaattcaccgatcacctgttcaatatcgccaaacccagacaaccatggatgggtcttttggggcctaccatacaagcggaggtgtatgacacagttgttatcactctcaagaacatggcttctcatccggtaagtcttcacgcagtgggcgtgtcctactggaaagcttcagaaggagccgagtatgatgatcagacatcccagagggagaaagaagacgacaaggtatttccaggtgggtctcatacctatgtgtggcaagtgctcaaagagaatggccctatggcaagcgatccgctctgtttgacttacagctacctttcacacgttgacctcgtcaaggacctcaactccgggttgattggagccttgttggtatgcagggaaggatctcttgccaaagagaagacacagaccctccacaagtttatccttctctttgctgtgttcgatgagggcaaaagttggcatagcgaaacgaagaattccctcatgcaggatcgcgacgcagccagcgccagagcttggcccaagatgcacactgtgaacggatatgtcaataggtcacttcctggcttgattgggtgtcatcggaaaagtgtctactggcacgtgatcggaatggggacaacaccagaggtccactccatatttctcgaaggccataccttccttgttcgaaaccacagacaggcatccttggagatctctcccattacctttctcactgcccaaacgctccttatggacttgggtcagttccttctcttctgccatatcagctcacaccagcatgatggtatggaagcttatgtgaaagtcgacagttgtcctgaggagccacagttgcgcatgaagaataatgaagaagcggaggattacgacgacgatctcaccgattctgagatggacgtggtgaggtttgatgacgacaactctccctccttcattcaaatccggagcgtggcgaagaaacaccccaagacttgggtccactatatagcggcggaagaggaggattgggattacgctcctcttgtattggcaccagatgaccgctcatacaaaagccagtacctcaacaacggaccgcagagaattggccggaagtataagaaagtgcgatttatggcctatacagacgaaacctttaagacaagggaggccatccagcatgagagtgggattttgggacctcttctttacggcgaagttggtgataccctcctcataatcttcaagaatcaagcttctcgcccctataacatttacccacacgggatcactgacgttaggcctttgtatagcagaagacttcccaaaggcgtgaagcatctcaaagacttccccattttgccaggcgagatctttaagtacaaatggaccgtcacagtggaagatggaccgactaaatcagaccctcgatgccttacgcggtactattcctccttcgtgaatatggagagagatttggcaagcggactcataggaccactcctcatctgttacaaggaatctgtagaccagaggggtaaccagattatgagtgataaacgcaatgtgatcctttttagcgtcttcgacgagaaccggtcctggtacttgaccgagaatatacaaaggttccttcccaaccccgcaggcgttcagttggaagaccctgagtttcaggccagcaatattatgcactcaatcaacggctatgtgtttgatagcctccagctttctgtttgcctccatgaagtagcctattggtacatcttgtcaattggtgctcaaacagacttcctctccgtcttcttctccggctacacctttaagcacaagatggtgtatgaggacactctcacactctttccattttctggagaaaccgtgttcatgagcatggagaatccaggcctttggaccttgggttgccacaacagtgattttcgcaatcggggaatgactgctctcctcaaagtcagcagctgtgataagaacacaggcgactattacgaagattcttacgaggacataagtgcctacttgttgtccaagaataacgccattgagcccagatcattctcccagaatcctcccgtgcttaaaaggcatcagcgcgaaatcaccagaactactcttcagtctgatcaagaggagattgactatgacgacaccataagcgtggaaatgaagaaggaggatttcgatatctatgacgaagatgagaaccagtctccgcggagctttcagaagaagacgcgacactacttcattgcagcagtcgaaaggctttgggactacggtatgtcatcatcccctcatgtgttgcgcaatagagctcagagtggaagtgttccacagttcaagaaagtcgtctttcaagagtttacagatggcagcttcacacagcctctctatcggggcgagcttaacgaacatttgggactccttggtccctatatccgagccgaagtggaggacaacattatggttacctttaggaatcaagcctctcgcccctacagcttctactcctccctcatcagttatgaggaggatcagagacaaggcgctgaaccacggaagaactttgtgaaaccgaatgagacgaagacctacttctggaaagtacagcaccacatggcccccacaaaagacgaattcgattgcaaagcatgggcgtatttttcagacgttgacttggagaaagatgtacattcaggacttattggtcctttgttggtgtgtcacactaacactctcaatccagcccatggcaggcaggtgacagtccaggaattcgctcttttctttaccatctttgatgagaccaagtcctggtacttcacggaaaacatggagcgcaattgcagagccccctgtaacatacagatggaggaccctacctttaaggaaaattatcggttccacgcaatcaacggatacattatggatacactccctggccttgtgatggctcaggaccaacgaatcaggtggtacctcctcagcatgggttctaatgagaacatacactccattcacttttcaggacatgtgttcactgtccggaagaaagaagagtataagatggccctctacaatttgtatccaggcgtgtttgagaccgttgaaatgcttccctctaaagctggcatctggagagtagagtgcttgatcggagaacatcttcacgcaggtatgagcaccttgttcctcgtgtacagcaacaaatgtcagaacccacttggcatggccagtggacacattcgcgactttcagatcacagcatctggacagtatggacaatgggccccaaagttggctcgcctccattactccggtagcataaatgcgtggtccactaaagaacctttcagctggattaaggtcgatcttcttgcccccatgatcatccacggcattaagacacagggagcgaggcagaaattctcctccctctacatctcacagttcattattatgtatagtttggacggcaagaagtggcaaacttatagaggtaacagtactggaacactcatggtgttcttcggcaacgttgatagctctggcatcaaacacaacatctttaatcctcccataatagctcggtacatcagattgcatccgacccactacagcattaggagtacactccgaatggagcttatgggttgcgacttgaattcctgttcaatgccactcggaatggagtctaaagccatctctgatgcacagataaccgccagtagctactttacgaacatgtttgctacgtggtcaccctctaaggcaaggcttcatttgcaaggccggtctaatgcctggagacctcaggtgaacaacccgaaagaatggctccaggtggactttcagaagaccatgaaagtaacaggtgtcactactcagggagttaagtccttgctcaccagcatgtatgtgaaggagttccttatttcctcatcacaagatggccaccagtggaccctcttctttcagaatggtaaggtcaaagtgtttcagggcaatcaagacagcttcacacccgtggtgaacagtcttgatcctccactcttgacacgataccttcgaatccatccacagtcttgggttcaccagattgcattgcgcatggaagtacttggatgcgaggctcaggacctctac

SEQ ID NO: 6 - protein, 1457 aa, synthetic construct
  REGION 1..1457: note = Variant of human B-domain deleted Factor VIII
MQIELSTCFFLCLLRFCFSATRRYYLGAVELSWDYMQSDLGELPVDARFPPRVPKSFPFNTSVVYKKTLFVEFTDHLFNIAKPRQPWMGLLGPTIQAEVYDTVVITLKNMASHPVSLHAVGVSYWKASEGAEYDDQTSQREKEDDKVFPGGSHTYVWQVLKENGPMASDPLCLTYSYLSHVDLVKDLNSGLIGALLVCREGSLAKEKTQTLHKFILLFAVFDEGKSWHSETKNSLMQDRDAASARAWPKMHTVNGYVNRSLPGLIGCHRKSVYWHVIGMGTTPEVHSIFLEGHTFLVRNHRQASLEISPITFLTAQTLLMDLGQFLLFCHISSHQHDGMEAYVKVDSCPEEPQLRMKNNEEAEDYDDDLTDSEMDVVRFDDDNSPSFIQIRSVAKKHPKTWVHYIAAEEEDWDYAPLVLAPDDRSYKSQYLNNGPQRIGRKYKKVRFMAYTDETFKTREAIQHESGILGPLLYGEVGDTLLIIFKNQASRPYNIYPHGITDVRPLYSRRLPKGVKHLKDFPILPGEIFKYKWTVTVEDGPTKSDPRCLTRYYSSFVNMERDLASGLIGPLLICYKESVDQRGNQIMSDKRNVILFSVFDENRSWYLTENIQRFLPNPAGVQLEDPEFQASNIMHSINGYVFDSLQLSVCLHEVAYWYILSIGAQTDFLSVFFSGYTFKHKMVYEDTLTLFPFSGETVFMSMENPGLWTLGCHNSDFRNRGMTALLKVSSCDKNTGDYYEDSYEDISAYLLSKNNAIEPRSFSQNPPVLKRHQREITRTTLQSDQEEIDYDDTISVEMKKEDFDIYDEDENQSPRSFQKKTRHYFIAAVERLWDYGMSSSPHVLRNRAQSGSVPQFKKVVFQEFTDGSFTQPLYRGELNEHLGLLGPYIRAEVEDNIMVTFRNQASRPYSFYSSLISYEEDQRQGAEPRKNFVKPNETKTYFWKVQHHMAPTKDEFDCKAWAYFSDVDLEKDVHSGLIGPLLVCHTNTLNPAHGRQVTVQEFALFFTIFDETKSWYFTENMERNCRAPCNIQMEDPTFKENYRFHAINGYIMDTLPGLVMAQDQRIRWYLLSMGSNENIHSIHFSGHVFTVRKKEEYKMALYNLYPGVFETVEMLPSKAGIWRVECLIGEHLHAGMSTLFLVYSNKCQNPLGMASGHIRDFQITASGQYGQWAPKLARLHYSGSINAWSTKEPFSWIKVDLLAPMIIHGIKTQGARQKFSSLYISQFIIMYSLDGKKWQTYRGNSTGTLMVFFGNVDSSGIKHNIFNPPIIARYIRLHPTHYSIRSTLRMELMGCDLNSCSMPLGMESKAISDAQITASSYFTNMFATWSPSKARLHLQGRSNAWRPQVNNPKEWLQVDFQKTMKVTGVTTQGVKSLLTSMYVKEFLISSSQDGHQWTLFFQNGKVKVFQGNQDSFTPVVNSLDPPLLTRYLRIHPQSWVHQIALRMEVLGCEAQDLY

SEQ ID NO: 7 - DNA, 4371 bp, synthetic construct
  misc_feature 1..4371: note = Variant of human B-domain deleted Factor VIII
  source 1..4371: mol_type = other DNA
atgcagattgaactgtctacctgcttcttcctctgtttgctgaggttctgctttagcgccactagacggtactaccttggcgctgtggagctgtcctgggactatatgcagagtgatttgggagagcttcccgtcgacgcacgatttcctcctcgcgttccaaagtcatttcccttcaacacaagcgtggtgtacaagaagacgctcttcgtcgaattcaccgatcacctgttcaatatcgccaaacccagaccaccatggatgggtcttttggggcctaccatacaagcggaggtgtatgacacagttgttatcactctcaagaacatggcttctcatccggtaagtcttcacgcagtgggcgtgtcctactggaaagcttcagaaggagccgagtatgatgatcagacatcccagagggagaaagaagacgacaaggtatttccaggtgggtctcatacctatgtgtggcaagtgctcaaagagaatggccctatggcaagcgatccgctctgtttgacttacagctacctttcacacgttgacctcgtcaaggacctcaactccgggttgattggagccttgttggtatgcagggaaggatctcttgccaaagagaagacacagaccctccacaagtttatccttctctttgctgtgttcgatgagggcaaaagttggcatagcgaaacgaagaattccctcatgcaggatcgcgacgcagccagcgccagagcttggcccaagatgcacactgtgaacggatatgtcaataggtcacttcctggcttgattgggtgtcatcggaaaagtgtctactggcacgtgatcggaatggggacaacaccagaggtccactccatatttctcgaaggccataccttccttgttcgaaaccacagacaggcatccttggagatctctcccattacctttctcactgcccaaacgctccttatggacttgggtcagttccttctcttctgccatatcagctcacaccagcatgatggtatggaagcttatgtgaaagtcgacagttgtcctgaggagccacagttgcgcatgaagaataatgaagaagccgaggattacgacgacgatctcaccgattctgagatggacgtggtgaggtttgatgacgacaactctccctccttcattcaaatccggagcgtggcgaagaaacaccccaagacttgggtccactatatagcggcggaagaggaggattgggattacgctcctcttgtattggcaccagatgaccgctcatacaaaagccagtacctcaacaacggaccgcagagaattggccggaagtataagaaagtgcgatttatggcctatacagacgaaacctttaagacaagggaggccatccagcatgagagtgggattttgggacctcttctttacggcgaagttggtgataccctcctcatcatcttcaagaatcaagcttctcgcccctataacatttacccacacgggatcactgacgttaggcctttgtatagcagaagacttcccaaaggcgtgaagcatctcaaagacttccccattttgccaggcgagatctttaagtacaaatggaccgtcacagtggaagatggaccgactaaatcagaccctcgatgccttacgcggtactattcctccttcgtgaatatggagagagatttggcaagcggactcataggaccactcctcatctgttacaaggaatctgtagaccagaggggtaaccagattatgagtgataaacgcaatgtgatcctttttagcgtcttcgacgagaaccggtcctggtacttgaccgagaatatacaaaggttccttcccaaccccgcaggcgttcagttggaagaccctgagtttcaggccagcaatattatgcactcaatcaacggctatgtgtttgatagtctccagctttctgtttgcctccatgaagtagcctattggtacatcttgtcaattggtgctcaaacagacttcctctccgtcttcttctccggctacacctttaagcacaagatggtgtatgaggacactctcacactctttccattttctggagaaaccgtgttcatgagcatggagaatccaggcctttggatcttgggttgccacaacagtgattttcgcaatcggggaatgactgctctcctcaaagtcagcagctgtgataagaacacaggcgactattacgaagattcttacgaggacataagtgcctacttgttgtccaagaataacgccattgagcccagatcattctcccagaatcctcccgtgcttaaaaggcatcagcgcgaaatcaccagaactactcttcagtctgatcaagaggagattgactatgacgacaccataagcgtggaaatgactaaggaggatttcgatatctatgacgaagatgagaaccagtctccgcggagctttcagaagaagacgcgacactacttcattgcagcagtcgaaaggctttgggactacggtatgtcatcatcccctcatgtgttgcgcaatagagctcagagtggaagtgttccacagttcaagaaagtcgtctttcaagagtttacagatggcagcttcacacagcctctctatcggggcgagcttaacgaacatttgggactccttggtccctatatccgagccgaagtggaggacaacattatggttacctttaggaatcaagcctctcgcccctacagcttctactcctccctcatcagttatgaggaggatcagagacaaggcgctgaaccacggaagaactttgtgaaaccgaatgagacgaagacctacttctggaaagtacagcaccacatggcccccacaaaagacgaattcgattgcaaagcatgggcgtatttttcagacgttgacttggagaaagatgtacattcaggacttattggtcctttgttggtgtgtcacactaacactctcaatccagcccatggcaggcaggtgacagtccaggaattcgctcttttctttaccatctttgatgagaccaagtcctggtacttcacggaaaacatggagcgcaattgcagagccccctgtaacatacagatggaggaccctacctttaaggaaaattatcggttccacgcaatcaacggatacattatggatacactccctggccttgtgatggctcaggaccaacgaatcaggtggtacctcctcagcatgggttctaatgagaacatacactccattcacttttcaggacatgtgttcactgtccggaagaaagaagagtataagatggccctctacaatttgtatccaggcgtgtttgagaccgttgaaatgcttccctctaaagctggcatctggagagtagagtgcttgatcggagaacatcttcacgcaggtatgagcaccttgttcctcgtgtacagcaacaaatgtcagaccccacttggcatggccagtggacacattcgcgactttcagatcacagcatctggccagtatggacaatgggccccaaagttggctcgcctccattactccggtagcataaatgcgtggtccactaaagaacctttcagctggattaaggtcgatcttcttgcccccatgatcatccacggcattaagacacagggagcgaggcagaaattctcctccctctacatctcacagttcattattatgtatagtttggacggcaagaagtggcaaacttatagaggtaacagtactggaacactcatggtgttcttcggcaacgttgatagctctggcatcaaacacaacatctttaatcctcccataatagctcggtacatcagattgcatccgacccactacagcattaggagtacactccgaatggagcttatgggttgcgacttgaattcctgttcaatgccactcggaatggagtctaaagccatctctgatgcacagataaccgccagtagctactttacgaacatgtttgctacgtggtcaccctctaaggcaaggcttcatttgcaaggccggtctaatgcctggagacctcaggtgaacaacccgaaagaatggctccaggtggactttcagaagaccatgaaagtaacaggtgtcactactcagggagttaagtccttgctcaccagcatgtatgtgaaggagttccttatttcctcatcacaagatggccaccagtggaccctcttctttcagaatggtaaggtcaaagtgtttcagggcaatcaagacagcttcacacccgtggtgaacagtcttgatcctccactcttgacacgataccttcgaatccatccacagtcttgggttcaccagattgcattgcgcatggaagtacttggatgcgaggctcaggacctctac

SEQ ID NO: 8 - protein, 1457 aa, synthetic construct
  REGION 1..1457: note = Variant of human B-domain deleted Factor VIII
MQIELSTCFFLCLLRFCFSATRRYYLGAVELSWDYMQSDLGELPVDARFPPRVPKSFPFNTSVVYKKTLFVEFTDHLFNIAKPRPPWMGLLGPTIQAEVYDTVVITLKNMASHPVSLHAVGVSYWKASEGAEYDDQTSQREKEDDKVFPGGSHTYVWQVLKENGPMASDPLCLTYSYLSHVDLVKDLNSGLIGALLVCREGSLAKEKTQTLHKFILLFAVFDEGKSWHSETKNSLMQDRDAASARAWPKMHTVNGYVNRSLPGLIGCHRKSVYWHVIGMGTTPEVHSIFLEGHTFLVRNHRQASLEISPITFLTAQTLLMDLGQFLLFCHISSHQHDGMEAYVKVDSCPEEPQLRMKNNEEAEDYDDDLTDSEMDVVRFDDDNSPSFIQIRSVAKKHPKTWVHYIAAEEEDWDYAPLVLAPDDRSYKSQYLNNGPQRIGRKYKKVRFMAYTDETFKTREAIQHESGILGPLLYGEVGDTLLIIFKNQASRPYNIYPHGITDVRPLYSRRLPKGVKHLKDFPILPGEIFKYKWTVTVEDGPTKSDPRCLTRYYSSFVNMERDLASGLIGPLLICYKESVDQRGNQIMSDKRNVILFSVFDENRSWYLTENIQRFLPNPAGVQLEDPEFQASNIMHSINGYVFDSLQLSVCLHEVAYWYILSIGAQTDFLSVFFSGYTFKHKMVYEDTLTLFPFSGETVFMSMENPGLWILGCHNSDFRNRGMTALLKVSSCDKNTGDYYEDSYEDISAYLLSKNNAIEPRSFSQNPPVLKRHQREITRTTLQSDQEEIDYDDTISVEMTKEDFDIYDEDENQSPRSFQKKTRHYFIAAVERLWDYGMSSSPHVLRNRAQSGSVPQFKKVVFQEFTDGSFTQPLYRGELNEHLGLLGPYIRAEVEDNIMVTFRNQASRPYSFYSSLISYEEDQRQGAEPRKNFVKPNETKTYFWKVQHHMAPTKDEFDCKAWAYFSDVDLEKDVHSGLIGPLLVCHTNTLNPAHGRQVTVQEFALFFTIFDETKSWYFTENMERNCRAPCNIQMEDPTFKENYRFHAINGYIMDTLPGLVMAQDQRIRWYLLSMGSNENIHSIHFSGHVFTVRKKEEYKMALYNLYPGVFETVEMLPSKAGIWRVECLIGEHLHAGMSTLFLVYSNKCQTPLGMASGHIRDFQITASGQYGQWAPKLARLHYSGSINAWSTKEPFSWIKVDLLAPMIIHGIKTQGARQKFSSLYISQFIIMYSLDGKKWQTYRGNSTGTLMVFFGNVDSSGIKHNIFNPPIIARYIRLHPTHYSIRSTLRMELMGCDLNSCSMPLGMESKAISDAQITASSYFTNMFATWSPSKARLHLQGRSNAWRPQVNNPKEWLQVDFQKTMKVTGVTTQGVKSLLTSMYVKEFLISSSQDGHQWTLFFQNGKVKVFQGNQDSFTPVVNSLDPPLLTRYLRIHPQSWVHQIALRMEVLGCEAQDLY

SEQ ID NO: 9 - DNA, 4371 bp, synthetic construct
  misc_feature 1..4371: note = Variant of human B-domain deleted Factor VIII
  source 1..4371: mol_type = other DNA
atgcagattgaactgtctacctgcttcttcctctgtttgctgaggttctgctttagcgccactagacggtactaccttggcgctgtggagctgtcctgggactatatgcagagtgatttgggagagcttcccgtcgacgcacgatttcctcctcgcgttccaaagtcatttcccttcaacacaagcgtggtgtacaagaagacgctcttcgtcgaattcaccgatcacctgttcaatatcgccaaacccagaccaccatggatgggtcttttggggcctaccatacaagcggaggtgtatgacacagttgttatcactctcaagaacatggcttctcatccggtaagtcttcacgcagtgggcgtgtcctactggaaagcttcagaaggagccgagtatgatgatcagacatcccagagggagaaagaagacgacaaggtatttccaggtgggtctcatacctatgtgtggcaagtgctcaaagagaatggccctatggcaagcgatccgctctgtttgacttacagctacctttcacacgttgacctcgtcaaggacctcaactccgggttgattggagccttgttggtatgcagggaaggatctcttgccaaagagaagacacagaccctccacaagtttatccttctctttgctgtgttcgatgagggcaaaagttggcatagcgaaacgaagaattccctcatgcaggatcgcgacgcagccagcgccagagcttggcccaagatgcacactgtgaacggatatgtcaataggtcacttcctggcttgattgggtgtcatcggaaaagtgtctactggcacgtgatcggaatggggacaacaccagaggtccactccatatttctcgaaggccataccttccttgttcgaaaccacagacaggcatccttggagatctctcccattacctttctcactgcccaaacgctccttatggacttgggtcagttccttctcttctgccatatcagctcacaccagcatgatggtatggaagcttatgtgaaagtcgacagttgtcctgaggagccacagttgcgcatgaagaataatgaagaagccgaggattacgacgacgatctcaccgattctgagatggacgtggtgaggtttgatgacgacaactctccctccttcattcaaatccggagcgtggcgaagaaacaccccaagacttgggtccactatatagcggcggaagaggaggattgggattacgctcctcttgtattggcaccagatgaccgctcatacaaaagccagtacctcaacaacggaccgcagagaattggccggaagtataagaaagtgcgatttatggcctatacagacgaaacctttaagacaagggaggccatccagcatgagagtgggattttgggacctcttctttacggcgaagttggtgataccctcctcatcatcttcaagaatcaagcttctcgcccctataacatttacccacacgggatcactgacgttaggcctttgtatagcagaagacttcccaaaggcgtgaagcatctcaaagacttccccattttgccaggcgagatctttaagtacaaatggaccgtcacagtggaagatggaccgactaaatcagaccctcgatgccttacgcggtactattcctccttcgtgaatatggagagagatttggcaagcggactcataggaccactcctcatctgttacaaggaatctgtagaccagaggggtaaccagattatgagtgataaacgcaatgtgatcctttttagcgtcttcgacgagaaccggtcctggtacttgaccgagaatatacaaaggttccttcccaaccccgcaggcgttcagttggaagaccctgagtttcaggccagcaatattatgcactcaatcaacggctatgtgtttgatagtctccagctttctgtttgcctccatgaagtagcctattggtacatcttgtcaattggtgctcaaacagacttcctctccgtcttcttctccggctacacctttaagcacaagatggtgtatgaggacactctcacactctttccattttctggagaaaccgtgttcatgagcatggagaatccaggcgggtggatcttgggttgccacaacagtgattttcgcaatcggggaatgactgctctcctcaaagtcagcagctgtgataagaacacaggcgactattacgaagattcttacgaggacataagtgcctacttgttgtccaagaataacgccattgagcccagatcattctcccagaatcctcccgtgcttaaaaggcatcagcgcgaaatcaccagaactactcttcagtctgatcaagaggagattgactatgacgacaccataagcgtggaaatgaagaaggaggatttcgatatctatgacgaagatgagaaccagtctccgcggagctttcagaagaagacgcgacactacttcattgcagcagtcgaaaggctttgggactacggtatgtcatcatcccctcatgtgttgcgcaatagagctcagagtggaagtgttccacagttcaagaaagtcgtctttcaagagtttacagatggcagcttcacacagcctctctatcggggcgagcttaacgaacatttgggactccttggtccctatatccgagccgaagtggaggacaacattatggttacctttaggaatcaagcctctcgcccctacagcttctactcctccctcatcagttatgaggaggatcagagacaaggcgctgaaccacggaagaactttgtgaaaccgaatgagacgaagacctacttctggaaagtacagcaccacatggcccccacaaaagacgaattcgattgcaaagcatgggcgtatttttcagacgttgacttggagaaagatgtacattcaggacttattggtcctttgttggtgtgtcacactaacactctcaatccagcccatggcaggcaggtgacagtccaggaattcgctcttttctttaccatctttgatgagaccaagtcctggtacttcacggaaaacatggagcgcaattgcagagccccctgtaacatacagatggaggaccctacctttaaggaaaattatcggttccacgcaatcaacggatacattatggatacactccctggccttgtgatggctcaggaccaacgaatcaggtggtacctcctcagcatgggttctaatgagaacatacactccattcacttttcaggacatgtgttcactgtccggaagaaagaagagtataagatggccctctacaatttgtatccaggcgtgtttgagaccgttgaaatgcttccctctaaagctggcatctggagagtagagtgcttgatcggagaacatcttcacgcaggtatgagcaccttgttcctcgtgtacagcaacaaatgtcagaccccacttggcatggccagtggacacattcgcgactttcagatcacagcatctggccagtatggacaatgggccccaaagttggctcgcctccattactccggtagcataaatgcgtggtccactaaagaacctttcagctggattaaggtcgatcttcttgcccccatgatcatccacggcattaagacacagggagcgaggcagaaattctcctccctctacatctcacagttcattattatgtatagtttggacggcaagaagtggcaaacttatagaggtaacagtactggaacactcatggtgttcttcggcaacgttgatagctctggcatcaaacacaacatctttaatcctcccataatagctcggtacatcagattgcatccgacccactacagcattaggagtacactccgaatggagcttatgggttgcgacttgaattcctgttcaatgccactcggaatggagtctaaagccatctctgatgcacagataaccgccagtagctactttacgaacatgtttgctacgtggtcaccctctaaggcaaggcttcatttgcaaggccggtctaatgcctggagacctcaggtgaacaacccgaaagaatggctccaggtggactttcagaagaccatgaaagtaacaggtgtcactactcagggagttaagtccttgctcaccagcatgtatgtgaaggagttccttatttcctcatcacaagatggccaccagtggaccctcttctttcagaatggtaaggtcaaagtgtttcagggcaatcaagacagcttcacacccgtggtgaacagtcttgatcctccactcttgacacgataccttcgaatccatccacagtcttgggttcaccagattgcattgcgcatggaagtacttggatgcgaggctcaggacctctac

SEQ ID NO: 10 - protein, 1457 aa, synthetic construct
  REGION 1..1457: note = Variant of human B-domain deleted Factor VIII
MQIELSTCFFLCLLRFCFSATRRYYLGAVELSWDYMQSDLGELPVDARFPPRVPKSFPFNTSVVYKKTLFVEFTDHLFNIAKPRPPWMGLLGPTIQAEVYDTVVITLKNMASHPVSLHAVGVSYWKASEGAEYDDQTSQREKEDDKVFPGGSHTYVWQVLKENGPMASDPLCLTYSYLSHVDLVKDLNSGLIGALLVCREGSLAKEKTQTLHKFILLFAVFDEGKSWHSETKNSLMQDRDAASARAWPKMHTVNGYVNRSLPGLIGCHRKSVYWHVIGMGTTPEVHSIFLEGHTFLVRNHRQASLEISPITFLTAQTLLMDLGQFLLFCHISSHQHDGMEAYVKVDSCPEEPQLRMKNNEEAEDYDDDLTDSEMDVVRFDDDNSPSFIQIRSVAKKHPKTWVHYIAAEEEDWDYAPLVLAPDDRSYKSQYLNNGPQRIGRKYKKVRFMAYTDETFKTREAIQHESGILGPLLYGEVGDTLLIIFKNQASRPYNIYPHGITDVRPLYSRRLPKGVKHLKDFPILPGEIFKYKWTVTVEDGPTKSDPRCLTRYYSSFVNMERDLASGLIGPLLICYKESVDQRGNQIMSDKRNVILFSVFDENRSWYLTENIQRFLPNPAGVQLEDPEFQASNIMHSINGYVFDSLQLSVCLHEVAYWYILSIGAQTDFLSVFFSGYTFKHKMVYEDTLTLFPFSGETVFMSMENPGGWILGCHNSDFRNRGMTALLKVSSCDKNTGDYYEDSYEDISAYLLSKNNAIEPRSFSQNPPVLKRHQREITRTTLQSDQEEIDYDDTISVEMKKEDFDIYDEDENQSPRSFQKKTRHYFIAAVERLWDYGMSSSPHVLRNRAQSGSVPQFKKVVFQEFTDGSFTQPLYRGELNEHLGLLGPYIRAEVEDNIMVTFRNQASRPYSFYSSLISYEEDQRQGAEPRKNFVKPNETKTYFWKVQHHMAPTKDEFDCKAWAYFSDVDLEKDVHSGLIGPLLVCHTNTLNPAHGRQVTVQEFALFFTIFDETKSWYFTENMERNCRAPCNIQMEDPTFKENYRFHAINGYIMDTLPGLVMAQDQRIRWYLLSMGSNENIHSIHFSGHVFTVRKKEEYKMALYNLYPGVFETVEMLPSKAGIWRVECLIGEHLHAGMSTLFLVYSNKCQTPLGMASGHIRDFQITASGQYGQWAPKLARLHYSGSINAWSTKEPFSWIKVDLLAPMIIHGIKTQGARQKFSSLYISQFIIMYSLDGKKWQTYRGNSTGTLMVFFGNVDSSGIKHNIFNPPIIARYIRLHPTHYSIRSTLRMELMGCDLNSCSMPLGMESKAISDAQITASSYFTNMFATWSPSKARLHLQGRSNAWRPQVNNPKEWLQVDFQKTMKVTGVTTQGVKSLLTSMYVKEFLISSSQDGHQWTLFFQNGKVKVFQGNQDSFTPVVNSLDPPLLTRYLRIHPQSWVHQIALRMEVLGCEAQDLY

SEQ ID NO: 11 - DNA, 4371 bp, synthetic construct
  misc_feature 1..4371: note = Variant of human B-domain deleted Factor VIII
  source 1..4371: mol_type = other DNA
atgcagattgaactgtctacctgcttcttcctctgtttgctgaggttctgctttagcgccactagacggtactaccttggcgctgtggagctgtcctgggactatatgcagagtgatttgggagagcttcccgtcgacgcacgatttcctcctcgcgttccaaagtcatttcccttcaacacaagcgtggtgtacaagaagacgctcttcgtcgaattcaccgatcacctgttcaatatcgccaaacccagaccaccatggatgggtcttttggggcctaccatacaagcggaggtgtatgacacagttgttatcactctcaagaacatggcttctcatccggtaagtcttcacgcagtgggcgtgtcctactggaaagcttcagaaggagccgagtatgatgatcagacatcccagagggagaaagaagacgacaaggtatttccaggtgggtctcatacctatgtgtggcaagtgctcaaagagaatggccctatggcaagcgatccgctctgtttgacttacagctacctttcacacgttgacctcgtcaaggacctcaactccgggttgattggagccttgttggtatgcagggaaggatctcttgccaaagagaagacacagaccctccacaagtttatccttctctttgctgtgttcgatgagggcaaaagttggcatagcgaaacgaagaattccctcatgcaggatcgcgacgcagccagcgccagagcttggcccaagatgcacactgtgaacggatatgtcaataggtcacttcctggcttgattgggtgtcatcggaaaagtgtctactggcacgtgatcggaatggggacaacaccagaggtccactccatatttctcgaaggccataccttccttgttcgaaaccacagacaggcatccttggagatctctcccattacctttctcactgcccaaacgctccttatggacttgggtcagttccttctcttctgccatatcagctcacaccagcatgatggtatggaagcttatgtgaaagtcgacagttgtcctgaggagccacagttgcgcatgaagaataatgaagaagccgaggattacgacgacgatctcaccgattctgagatggacgtggtgaggtttgatgacgacaactctccctccttcattcaaatccggagcgtggcgaagaaacaccccaagacttgggtccactatatagcggcggaagaggaggattgggattacgctcctcttgtattggcaccagatgaccgctcatacaaaagccagtacctcaacaacggaccgcagagaattggccggaagtataagaaagtgcgatttatggcctatacagacgaaacctttaagacaagggaggccatccagcatgagagtgggattttgggacctcttctttacggcgaagttggtgataccctcctcatcatcttcaagaatcaagcttctcgcccctataacatttacccacacgggatcactgacgttaggcctttgtatagcagaagacttcccaaaggcgtgaagcatctcaaagacttccccattttgccaggcgagatctttaagtacaaatggaccgtcacagtggaagatggaccgactaaatcagaccctcgatgccttacgcggtactattcctccttcgtgaatatggagagagatttggcaagcggactcataggaccactcctcatctgttacaaggaatctgtagaccagaggggtaaccagattatgagtgataaacgcaatgtgatcctttttagcgtcttcgacgagaaccggtcctggtacttgaccgagaatatacaaaggttccttcccaaccccgcaggcgttcagttggaagaccctgagtttcaggccagcaatattatgcactcaatcaacggctatgtgtttgatagtctccagctttctgtttgcctccatgaagtagcctattggtacatcttgtcaattggtgctcaaacagacttcctctccgtcttcttctccggctacacctttaagcacaagatggtgtatgaggacactctcacactctttccattttctggagaaaccgtgttcatgagcatggagaatccaggcgcgtggatcttgggttgccacaacagtgattttcgcaatcggggaatgactgctctcctcaaagtcagcagctgtgataagaacacaggcgactattacgaagattcttacgaggacataagtgcctacttgttgtccaagaataacgccattgagcccagatcattctcccagaatcctcccgtgcttaaaaggcatcagcgcgaaatcaccagaactactcttcagtctgatcaagaggagattgactatgacgacaccataagcgtggaaatgaagaaggaggatttcgatatctatgacgaagatgagaaccagtctccgcggagctttcagaagaagacgcgacactacttcattgcagcagtcgaaaggctttgggactacggtatgtcatcatcccctcatgtgttgcgcaatagagctcagagtggaagtgttccacagttcaagaaagtcgtctttcaagagtttacagatggcagcttcacacagcctctctatcggggcgagcttaacgaacatttgggactccttggtccctatatccgagccgaagtggaggacaacattatggttacctttaggaatcaagcctctcgcccctacagcttctactcctccctcatcagttatgaggaggatcagagacaaggcgctgaaccacggaagaactttgtgaaaccgaatgagacgaagacctacttctggaaagtacagcaccacatggcccccacaaaagacgaattcgattgcaaagcatgggcgtatttttcagacgttgacttggagaaagatgtacattcaggacttattggtcctttgttggtgtgtcacactaacactctcaatccagcccatggcaggcaggtgacagtccaggaattcgctcttttctttaccatctttgatgagaccaagtcctggtacttcacggaaaacatggagcgcaattgcagagccccctgtaacatacagatggaggaccctacctttaaggaaaattatcggttccacgcaatcaacggatacattatggatacactccctggccttgtgatggctcaggaccaacgaatcaggtggtacctcctcagcatgggttctaatgagaacatacactccattcacttttcaggacatgtgttcactgtccggaagaaagaagagtataagatggccctctacaatttgtatccaggcgtgtttgagaccgttgaaatgcttccctctaaagctggcatctggagagtagagtgcttgatcggagaacatcttcacgcaggtatgagcaccttgttcctcgtgtacagcaacaaatgtcagaccccacttggcatggccagtggacacattcgcgactttcagatcacagcatctggccagtatggacaatgggccccaaagttggctcgcctccattactccggtagcataaatgcgtggtccactaaagaacctttcagctggattaaggtcgatcttcttgcccccatgatcatccacggcattaagacacagggagcgaggcagaaattctcctccctctacatctcacagttcattattatgtatagtttggacggcaagaagtggcaaacttatagaggtaacagtactggaacactcatggtgttcttcggcaacgttgatagctctggcatcaaacacaacatctttaatcctcccataatagctcggtacatcagattgcatccgacccactacagcattaggagtacactccgaatggagcttatgggttgcgacttgaattcctgttcaatgccactcggaatggagtctaaagccatctctgatgcacagataaccgccagtagctactttacgaacatgtttgctacgtggtcaccctctaaggcaaggcttcatttgcaaggccggtctaatgcctggagacctcaggtgaacaacccgaaagaatggctccaggtggactttcagaagaccatgaaagtaacaggtgtcactactcagggagttaagtccttgctcaccagcatgtatgtgaaggagttccttatttcctcatcacaagatggccaccagtggaccctcttctttcagaatggtaaggtcaaagtgtttcagggcaatcaagacagcttcacacccgtggtgaacagtcttgatcctccactcttgacacgataccttcgaatccatccacagtcttgggttcaccagattgcattgcgcatggaagtacttggatgcgaggctcaggacctctac

SEQ ID NO: 12 - protein, 1457 aa, synthetic construct
  REGION 1..1457: note = Variant of human B-domain deleted Factor VIII
MQIELSTCFFLCLLRFCFSATRRYYLGAVELSWDYMQSDLGELPVDARFPPRVPKSFPFNTSVVYKKTLFVEFTDHLFNIAKPRPPWMGLLGPTIQAEVYDTVVITLKNMASHPVSLHAVGVSYWKASEGAEYDDQTSQREKEDDKVFPGGSHTYVWQVLKENGPMASDPLCLTYSYLSHVDLVKDLNSGLIGALLVCREGSLAKEKTQTLHKFILLFAVFDEGKSWHSETKNSLMQDRDAASARAWPKMHTVNGYVNRSLPGLIGCHRKSVYWHVIGMGTTPEVHSIFLEGHTFLVRNHRQASLEISPITFLTAQTLLMDLGQFLLFCHISSHQHDGMEAYVKVDSCPEEPQLRMKNNEEAEDYDDDLTDSEMDVVRFDDDNSPSFIQIRSVAKKHPKTWVHYIAAEEEDWDYAPLVLAPDDRSYKSQYLNNGPQRIGRKYKKVRFMAYTDETFKTREAIQHESGILGPLLYGEVGDTLLIIFKNQASRPYNIYPHGITDVRPLYSRRLPKGVKHLKDFPILPGEIFKYKWTVTVEDGPTKSDPRCLTRYYSSFVNMERDLASGLIGPLLICYKESVDQRGNQIMSDKRNVILFSVFDENRSWYLTENIQRFLPNPAGVQLEDPEFQASNIMHSINGYVFDSLQLSVCLHEVAYWYILSIGAQTDFLSVFFSGYTFKHKMVYEDTLTLFPFSGETVFMSMENPGAWILGCHNSDFRNRGMTALLKVSSCDKNTGDYYEDSYEDISAYLLSKNNAIEPRSFSQNPPVLKRHQREITRTTLQSDQEEIDYDDTISVEMKKEDFDIYDEDENQSPRSFQKKTRHYFIAAVERLWDYGMSSSPHVLRNRAQSGSVPQFKKVVFQEFTDGSFTQPLYRGELNEHLGLLGPYIRAEVEDNIMVTFRNQASRPYSFYSSLISYEEDQRQGAEPRKNFVKPNETKTYFWKVQHHMAPTKDEFDCKAWAYFSDVDLEKDVHSGLIGPLLVCHTNTLNPAHGRQVTVQEFALFFTIFDETKSWYFTENMERNCRAPCNIQMEDPTFKENYRFHAINGYIMDTLPGLVMAQDQRIRWYLLSMGSNENIHSIHFSGHVFTVRKKEEYKMALYNLYPGVFETVEMLPSKAGIWRVECLIGEHLHAGMSTLFLVYSNKCQTPLGMASGHIRDFQITASGQYGQWAPKLARLHYSGSINAWSTKEPFSWIKVDLLAPMIIHGIKTQGARQKFSSLYISQFIIMYSLDGKKWQTYRGNSTGTLMVFFGNVDSSGIKHNIFNPPIIARYIRLHPTHYSIRSTLRMELMGCDLNSCSMPLGMESKAISDAQITASSYFTNMFATWSPSKARLHLQGRSNAWRPQVNNPKEWLQVDFQKTMKVTGVTTQGVKSLLTSMYVKEFLISSSQDGHQWTLFFQNGKVKVFQGNQDSFTPVVNSLDPPLLTRYLRIHPQSWVHQIALRMEVLGCEAQDLY

SEQ ID NO: 13 - DNA, 4371 bp, synthetic construct
  misc_feature 1..4371: note = Variant of human B-domain deleted Factor VIII
  source 1..4371: mol_type = other DNA
atgcagattgaactgtctacctgcttcttcctctgtttgctgaggttctgctttagcgccactagacggtactaccttggcgctgtggagctgtcctgggactatatgcagagtgatttgggagagcttcccgtcgacgcacgatttcctcctcgcgttccaaagtcatttcccttcaacacaagcgtggtgtacaagaagacgctcttcgtcgaattcaccgatcacctgttcaatatcgccaaacccagaccaccatggatgggtcttttggggcctaccatacaagcggaggtgtatgacacagttgttatcactctcaagaacatggcttctcatccggtaagtcttcacgcagtgggcgtgtcctactggaaagcttcagaaggagccgagtatgatgatcagacatcccagagggagaaagaagacgacaaggtatttccaggtgggtctcatacctatgtgtggcaagtgctcaaagagaatggccctatggcaagcgatccgcagtgtttgacttacagctacctttcacacgttgacctcgtcaaggacctcaactccgggttgattggagccttgttggtatgcagggaaggatctcttgccaaagagaagacacagaccctccacaagtttatccttctctttgctgtgttcgatgagggcaaaagttggcatagcgaaacgaagaattccctcatgcaggatcgcgacgcagccagcgccagagcttggcccaagatgcacactgtgaacggatatgtcaataggtcacttcctggcttgattgggtgtcatcggaaaagtgtctactggcacgtgatcggaatggggacaacaccagaggtccactccatatttctcgaaggccataccttccttgttcgaaaccacagacaggcatccttggagatctctcccattacctttctcactgcccaaacgctccttatggacttgggtcagttccttctcttctgccatatcagctcacaccagcatgatggtatggaagcttatgtgaaagtcgacagttgtcctgaggagccacagttgcgcatgaagaataatgaagaagccgaggattacgacgacgatctcaccgattctgagatggacgtggtgaggtttgatgacgacaactctccctccttcattcaaatccggagcgtggcgaagaaacaccccaagacttgggtccactatatagcggcggaagaggaggattgggattacgctcctcttgtattggcaccagatgaccgctcatacaaaagccagtacctcaacaacggaccgcagagaattggccggaagtataagaaagtgcgatttatggcctatacagacgaaacctttaagacaagggaggccatccagcatgagagtgggattttgggacctcttctttacggcgaagttggtgataccctcctcatcatcttcaagaatcaagcttctcgcccctataacatttacccacacgggatcactgacgttaggcctttgtatagcagaagacttcccaaaggcgtgaagcatctcaaagacttccccattttgccaggcgagatctttaagtacaaatggaccgtcacagtggaagatggaccgactaaatcagaccctcgatgccttacgcggtactattcctccttcgtgaatatggagagagatttggcaagcggactcataggaccactcctcatctgttacaaggaatctgtagaccagaggggtaaccagattatgagtgataaacgcaatgtgatcctttttagcgtcttcgacgagaaccggtcctggtacttgaccgagaatatacaaaggttccttcccaaccccgcaggcgttcagttggaagaccctgagtttcaggccagcaatattatgcactcaatcaacggctatgtgtttgatagtctccagctttctgtttgcctccatgaagtagcctattggtacatcttgtcaattggtgctcaaacagacttcctctccgtcttcttctccggctacacctttaagcacaagatggtgtatgaggacactctcacactctttccattttctggagaaaccgtgttcatgagcatggagaatccaggcctttggatcttgggttgccacaacagtgattttcgcaatcggggaatgactgctctcctcaaagtcagcagctgtgataagaacacaggcgactattacgaagattcttacgaggacataagtgcctacttgttgtccaagaataacgccattgagcccagatcattctcccagaatcctcccgtgcttaaaaggcatcagcgcgaaatcaccagaactactcttcagtctgatcaagaggagattgactatgacgacaccataagcgtggaaatgaagaaggaggatttcgatatctatgacgaagatgagaaccagtctccgcggagctttcagaagaagacgcgacactacttcattgcagcagtcgaaaggctttgggactacggtatgtcatcatcccctcatgtgttgcgcaatagagctcagagtggaagtgttccacagttcaagaaagtcgtctttcaagagtttacagatggcagcttcacacagcctctctatcggggcgagcttaacgaacatttgggactccttggtccctatatccgagccgaagtggaggacaacattatggttacctttaggaatcaagcctctcgcccctacagcttctactcctccctcatcagttatgaggaggatcagagacaaggcgctgaaccacggaagaactttgtgaaaccgaatgagacgaagacctacttctggaaagtacagcaccacatggcccccacaaaagacgaattcgattgcaaagcatgggcgtatttttcagacgttgacttggagaaagatgtacattcaggacttattggtcctttgttggtgtgtcacactaacactctcaatccagcccatggcaggcaggtgacagtccaggaattcgctcttttctttaccatctttgatgagaccaagtcctggtacttcacggaaaacatggagcgcaattgcagagccccctgtaacatacagatggaggaccctacctttaaggaaaattatcggttccacgcaatcaacggatacattatggatacactccctggccttgtgatggctcaggaccaacgaatcaggtggtacctcctcagcatgggttctaatgagaacatacactccattcacttttcaggacatgtgttcactgtccggaagaaagaagagtataagatggccctctacaatttgtatccaggcgtgtttgagaccgttgaaatgcttccctctaaagctggcatctggagagtagagtgcttgatcggagaacatcttcacgcaggtatgagcaccttgttcctcgtgtacagcaacaaatgtcagaccccacttggcatggccagtggacacattcgcgactttcagatcacagcatctggccagtatggacaatgggccccaaagttggctcgcctccattactccggtagcataaatgcgtggtccactaaagaacctttcagctggattaaggtcgatcttcttgcccccatgatcatccacggcattaagacacagggagcgaggcagaaattctcctccctctacatctcacagttcattattatgtatagtttggacggcaagaagtggcaaacttatagaggtaacagtactggaacactcatggtgttcttcggcaacgttgatagctctggcatcaaacacaacatctttaatcctcccataatagctcggtacatcagattgcatccgacccactacagcattaggagtacactccgaatggagcttatgggttgcgacttgaattcctgttcaatgccactcggaatggagtctaaagccatctctgatgcacagataaccgccagtagctactttacgaacatgtttgctacgtggtcaccctctaaggcaaggcttcatttgcaaggccggtctaatgcctggagacctcaggtgaacaacccgaaagaatggctccaggtggactttcagaagaccatgaaagtaacaggtgtcactactcagggagttaagtccttgctcaccagcatgtatgtgaaggagttccttatttcctcatcacaagatggccaccagtggaccctcttctttcagaatggtaaggtcaaagtgtttcagggcaatcaagacagcttcacacccgtggtgaacagtcttgatcctccactcttgacacgataccttcgaatccatccacagtcttgggttcaccagattgcattgcgcatggaagtacttggatgcgaggctcaggacctctac

SEQ ID NO: 14 - protein, 1457 aa, synthetic construct
  REGION 1..1457: note = Variant of human B-domain deleted Factor VIII
MQIELSTCFFLCLLRFCFSATRRYYLGAVELSWDYMQSDLGELPVDARFPPRVPKSFPFNTSVVYKKTLFVEFTDHLFNIAKPRPPWMGLLGPTIQAEVYDTVVITLKNMASHPVSLHAVGVSYWKASEGAEYDDQTSQREKEDDKVFPGGSHTYVWQVLKENGPMASDPQCLTYSYLSHVDLVKDLNSGLIGALLVCREGSLAKEKTQTLHKFILLFAVFDEGKSWHSETKNSLMQDRDAASARAWPKMHTVNGYVNRSLPGLIGCHRKSVYWHVIGMGTTPEVHSIFLEGHTFLVRNHRQASLEISPITFLTAQTLLMDLGQFLLFCHISSHQHDGMEAYVKVDSCPEEPQLRMKNNEEAEDYDDDLTDSEMDVVRFDDDNSPSFIQIRSVAKKHPKTWVHYIAAEEEDWDYAPLVLAPDDRSYKSQYLNNGPQRIGRKYKKVRFMAYTDETFKTREAIQHESGILGPLLYGEVGDTLLIIFKNQASRPYNIYPHGITDVRPLYSRRLPKGVKHLKDFPILPGEIFKYKWTVTVEDGPTKSDPRCLTRYYSSFVNMERDLASGLIGPLLICYKESVDQRGNQIMSDKRNVILFSVFDENRSWYLTENIQRFLPNPAGVQLEDPEFQASNIMHSINGYVFDSLQLSVCLHEVAYWYILSIGAQTDFLSVFFSGYTFKHKMVYEDTLTLFPFSGETVFMSMENPGLWILGCHNSDFRNRGMTALLKVSSCDKNTGDYYEDSYEDISAYLLSKNNAIEPRSFSQNPPVLKRHQREITRTTLQSDQEEIDYDDTISVEMKKEDFDIYDEDENQSPRSFQKKTRHYFIAAVERLWDYGMSSSPHVLRNRAQSGSVPQFKKVVFQEFTDGSFTQPLYRGELNEHLGLLGPYIRAEVEDNIMVTFRNQASRPYSFYSSLISYEEDQRQGAEPRKNFVKPNETKTYFWKVQHHMAPTKDEFDCKAWAYFSDVDLEKDVHSGLIGPLLVCHTNTLNPAHGRQVTVQEFALFFTIFDETKSWYFTENMERNCRAPCNIQMEDPTFKENYRFHAINGYIMDTLPGLVMAQDQRIRWYLLSMGSNENIHSIHFSGHVFTVRKKEEYKMALYNLYPGVFETVEMLPSKAGIWRVECLIGEHLHAGMSTLFLVYSNKCQTPLGMASGHIRDFQITASGQYGQWAPKLARLHYSGSINAWSTKEPFSWIKVDLLAPMIIHGIKTQGARQKFSSLYISQFIIMYSLDGKKWQTYRGNSTGTLMVFFGNVDSSGIKHNIFNPPIIARYIRLHPTHYSIRSTLRMELMGCDLNSCSMPLGMESKAISDAQITASSYFTNMFATWSPSKARLHLQGRSNAWRPQVNNPKEWLQVDFQKTMKVTGVTTQGVKSLLTSMYVKEFLISSSQDGHQWTLFFQNGKVKVFQGNQDSFTPVVNSLDPPLLTRYLRIHPQSWVHQIALRMEVLGCEAQDLY

SEQ ID NO: 15 - DNA, 4371 bp, synthetic construct
  misc_feature 1..4371: note = Variant of human B-domain deleted Factor VIII
  source 1..4371: mol_type = other DNA
atgcagattgaactgtctacctgcttcttcctctgtttgctgaggttctgctttagcgccactagacggtactaccttggcgctgtggagctgtcctgggactatatgcagagtgatttgggagagcttcccgtcgacgcacgatttcctcctcgcgttccaaagtcatttcccttcaacacaagcgtggtgtacaagaagacgctcttcgtcgaattcaccgatcacctgttcaatatcgccaaacccagaccaccatggatgggtcttttggggcctaccatacaagcggaggtgtatgacacagttgttatcactctcaagaacatggcttctcatccggtaagtcttcacgcagtgggcgtgtcctactggaaagcttcagaaggagccgagtatgatgatcagacatcccagagggagaaagaagacgacaaggtatttccaggtgggtctcatacctatgtgtggcaagtgctcaaagagaatggccctatggcaagcgatccgctctgtttgacttacagctacctttcacacgttgacctcgtcaaggacctcaactccgggttgattggagccttgttggtatgcagggaaggatctcttgccaaagagaagacacagaccctccacaagtttatccttctctttgctgtgttcgatgagggcaaaagttggcatagcgaaacgaagaattccctcatgcaggatcgcgacgcagccagcgccagagcttggcccaagatgcacactgtgaacggatatgtcaataggtcacttcctggcttgattgggtgtcatcggaaaagtgtctactggcacgtgatcggaatggggacaacaccagaggtccactccatatttctcgaaggccataccttccttgttcgaaaccacagacaggcatccttggagatctctcccattacctttctcactgcccaaacgctccttatggacttgggtcagttccttctcttctgccatatcagctcacacgagcatgatggtatggaagcttatgtgaaagtcgacagttgtcctgaggagccacagttgcgcatgaagaataatgaagaagccgaggattacgacgacgatctcaccgattctgagatggacgtggtgaggtttgatgacgacaactctccctccttcattcaaatccggagcgtggcgaagaaacaccccaagacttgggtccactatatagcggcggaagaggaggattgggattacgctcctcttgtattggcaccagatgaccgctcatacaaaagccagtacctcaacaacggaccgcagagaattggccggaagtataagaaagtgcgatttatggcctatacagacgaaacctttaagacaagggaggccatccagcatgagagtgggattttgggacctcttctttacggcgaagttggtgataccctcctcatcatcttcaagaatcaagcttctcgcccctataacatttacccacacgggatcactgacgttaggcctttgtatagcagaagacttcccaaaggcgtgaagcatctcaaagacttccccattttgccaggcgagatctttaagtacaaatggaccgtcacagtggaagatggaccgactaaatcagaccctcgatgccttacgcggtactattcctccttcgtgaatatggagagagatttggcaagcggactcataggaccactcctcatctgttacaaggaatctgtagaccagaggggtaaccagattatgagtgataaacgcaatgtgatcctttttagcgtcttcgacgagaaccggtcctggtacttgaccgagaatatacaaaggttccttcccaaccccgcaggcgttcagttggaagaccctgagtttcaggccagcaatattatgcactcaatcaacggctatgtgtttgatagtctccagctttctgtttgcctccatgaagtagcctattggtacatcttgtcaattggtgctcaaacagacttcctctccgtcttcttctccggctacacctttaagcacaagatggtgtatgaggacactctcacactctttccattttctggagaaaccgtgttcatgagcatggagaatccaggcctttggatcttgggttgccacaacagtgattttcgcaatcggggaatgactgctctcctcaaagtcagcagctgtgataagaacacaggcgactattacgaagattcttacgaggacataagtgcctacttgttgtccaagaataacgccattgagcccagatcattctcccagaatcctcccgtgcttaaaaggcatcagcgcgaaatcaccagaactactcttcagtctgatcaagaggagattgactatgacgacaccataagcgtggaaatgaagaaggaggatttcgatatctatgacgaagatgagaaccagtctccgcggagctttcagaagaagacgcgacactacttcattgcagcagtcgaaaggctttgggactacggtatgtcatcatcccctcatgtgttgcgcaatagagctcagagtggaagtgttccacagttcaagaaagtcgtctttcaagagtttacagatggcagcttcacacagcctctctatcggggcgagcttaacgaacatttgggactccttggtccctatatccgagccgaagtggaggacaacattatggttacctttaggaatcaagcctctcgcccctacagcttctactcctccctcatcagttatgaggaggatcagagacaaggcgctgaaccacggaagaactttgtgaaaccgaatgagacgaagacctacttctggaaagtacagcaccacatggcccccacaaaagacgaattcgattgcaaagcatgggcgtatttttcagacgttgacttggagaaagatgtacattcaggacttattggtcctttgttggtgtgtcacactaacactctcaatccagcccatggcaggcaggtgacagtccaggaattcgctcttttctttaccatctttgatgagaccaagtcctggtacttcacggaaaacatggagcgcaattgcagagccccctgtaacatacagatggaggaccctacctttaaggaaaattatcggttccacgcaatcaacggatacattatggatacactccctggccttgtgatggctcaggaccaacgaatcaggtggtacctcctcagcatgggttctaatgagaacatacactccattcacttttcaggacatgtgttcactgtccggaagaaagaagagtataagatggccctctacaatttgtatccaggcgtgtttgagaccgttgaaatgcttccctctaaagctggcatctggagagtagagtgcttgatcggagaacatcttcacgcaggtatgagcaccttgttcctcgtgtacagcaacaaatgtcagaccccacttggcatggccagtggacacattcgcgactttcagatcacagcatctggccagtatggacaatgggccccaaagttggctcgcctccattactccggtagcataaatgcgtggtccactaaagaacctttcagctggattaaggtcgatcttcttgcccccatgatcatccacggcattaagacacagggagcgaggcagaaattctcctccctctacatctcacagttcattattatgtatagtttggacggcaagaagtggcaaacttatagaggtaacagtactggaacactcatggtgttcttcggcaacgttgatagctctggcatcaaacacaacatctttaatcctcccataatagctcggtacatcagattgcatccgacccactacagcattaggagtacactccgaatggagcttatgggttgcgacttgaattcctgttcaatgccactcggaatggagtctaaagccatctctgatgcacagataaccgccagtagctactttacgaacatgtttgctacgtggtcaccctctaaggcaaggcttcatttgcaaggccggtctaatgcctggagacctcaggtgaacaacccgaaagaatggctccaggtggactttcagaagaccatgaaagtaacaggtgtcactactcagggagttaagtccttgctcaccagcatgtatgtgaaggagttccttatttcctcatcacaagatggccaccagtggaccctcttctttcagaatggtaaggtcaaagtgtttcagggcaatcaagacagcttcacacccgtggtgaacagtcttgatcctccactcttgacacgataccttcgaatccatccacagtcttgggttcaccagattgcattgcgcatggaagtacttggatgcgaggctcaggacctctac

SEQ ID NO: 16 - protein, 1457 aa, synthetic construct
  REGION 1..1457: note = Variant of human B-domain deleted Factor VIII
MQIELSTCFFLCLLRFCFSATRRYYLGAVELSWDYMQSDLGELPVDARFPPRVPKSFPFNTSVVYKKTLFVEFTDHLFNIAKPRPPWMGLLGPTIQAEVYDTVVITLKNMASHPVSLHAVGVSYWKASEGAEYDDQTSQREKEDDKVFPGGSHTYVWQVLKENGPMASDPLCLTYSYLSHVDLVKDLNSGLIGALLVCREGSLAKEKTQTLHKFILLFAVFDEGKSWHSETKNSLMQDRDAASARAWPKMHTVNGYVNRSLPGLIGCHRKSVYWHVIGMGTTPEVHSIFLEGHTFLVRNHRQASLEISPITFLTAQTLLMDLGQFLLFCHISSHEHDGMEAYVKVDSCPEEPQLRMKNNEEAEDYDDDLTDSEMDVVRFDDDNSPSFIQIRSVAKKHPKTWVHYIAAEEEDWDYAPLVLAPDDRSYKSQYLNNGPQRIGRKYKKVRFMAYTDETFKTREAIQHESGILGPLLYGEVGDTLLIIFKNQASRPYNIYPHGITDVRPLYSRRLPKGVKHLKDFPILPGEIFKYKWTVTVEDGPTKSDPRCLTRYYSSFVNMERDLASGLIGPLLICYKESVDQRGNQIMSDKRNVILFSVFDENRSWYLTENIQRFLPNPAGVQLEDPEFQASNIMHSINGYVFDSLQLSVCLHEVAYWYILSIGAQTDFLSVFFSGYTFKHKMVYEDTLTLFPFSGETVFMSMENPGLWILGCHNSDFRNRGMTALLKVSSCDKNTGDYYEDSYEDISAYLLSKNNAIEPRSFSQNPPVLKRHQREITRTTLQSDQEEIDYDDTISVEMKKEDFDIYDEDENQSPRSFQKKTRHYFIAAVERLWDYGMSSSPHVLRNRAQSGSVPQFKKVVFQEFTDGSFTQPLYRGELNEHLGLLGPYIRAEVEDNIMVTFRNQASRPYSFYSSLISYEEDQRQGAEPRKNFVKPNETKTYFWKVQHHMAPTKDEFDCKAWAYFSDVDLEKDVHSGLIGPLLVCHTNTLNPAHGRQVTVQEFALFFTIFDETKSWYFTENMERNCRAPCNIQMEDPTFKENYRFHAINGYIMDTLPGLVMAQDQRIRWYLLSMGSNENIHSIHFSGHVFTVRKKEEYKMALYNLYPGVFETVEMLPSKAGIWRVECLIGEHLHAGMSTLFLVYSNKCQTPLGMASGHIRDFQITASGQYGQWAPKLARLHYSGSINAWSTKEPFSWIKVDLLAPMIIHGIKTQGARQKFSSLYISQFIIMYSLDGKKWQTYRGNSTGTLMVFFGNVDSSGIKHNIFNPPIIARYIRLHPTHYSIRSTLRMELMGCDLNSCSMPLGMESKAISDAQITASSYFTNMFATWSPSKARLHLQGRSNAWRPQVNNPKEWLQVDFQKTMKVTGVTTQGVKSLLTSMYVKEFLISSSQDGHQWTLFFQNGKVKVFQGNQDSFTPVVNSLDPPLLTRYLRIHPQSWVHQIALRMEVLGCEAQDLY

SEQ ID NO: 17 - DNA, 4371 bp, synthetic construct
  misc_feature 1..4371: note = Variant of human B-domain deleted Factor VIII
  source 1..4371: mol_type = other DNA
atgcagattgaactgtctacctgcttcttcctctgtttgctgaggttctgctttagcgccactagacggtactaccttggcgctgtggagctgtcctgggactatatgcagagtgatttgggagagcttcccgtcgacgcacgatttcctcctcgcgttccaaagtcatttcccttcaacacaagccgtgtgtacaagaagacgctcttcgtcgaattcaccgatcacctgttcaatatcgccaaacccagaccaccatggatgggtcttttggggcctaccatacaagcggaggtgtatgacacagttgttatcactctcaagaacatggcttctcatccggtaagtcttcacgcagtgggcgtgtcctactggaaagcttcagaaggagccgagtatgatgatcagacatcccagagggagaaagaagacgacaaggtatttccaggtgggtctcatacctatgtgtggcaagtgctcaaagagaatggccctatggcaagcgatccgctctgtttgacttacagctacctttcacacgttgacctcgtcaaggacctcaactccgggttgattggagccttgttggtatgcagggaaggatctcttgccaaagagaagacacagaccctccacaagtttatccttctctttgctgtgttcgatgagggcaaaagttggcatagcgaaacgaagaattccctcatgcaggatcgcgacgcagccagcgccagagcttggcccaagatgcacactgtgaacggatatgtcaataggtcacttcctggcttgattgggtgtcatcggaaaagtgtctactggcacgtgatcggaatggggacaacaccagaggtccactccatatttctcgaaggccataccttccttgttcgaaaccacagacaggcatccttggagatctctcccattacctttctcactgcccaaacgctccttatggacttgggtcagttccttctcttctgccatatcagctcacaccagcatgatggtatggaagcttatgtgaaagtcgacagttgtcctgaggagccacagttgcgcatgaagaataatgaagaagccgaggattacgacgacgatctcaccgattctgagatggacgtggtgaggtttgatgacgacaactctccctccttcattcaaatccggagcgtggcgaagaaacaccccaagacttgggtccactatatagcggcggaagaggaggattgggattacgctcctcttgtattggcaccagatgaccgctcatacaaaagccagtacctcaacaacggaccgcagagaattggccggaagtataagaaagtgcgatttatggcctatacagacgaaacctttaagacaagggaggccatccagcatgagagtgggattttgggacctcttctttacggcgaagttggtgataccctcctcatcatcttcaagaatcaagcttctcgcccctataacatttacccacacgggatcactgacgttaggcctttgtatagcagaagacttcccaaaggcgtgaagcatctcaaagacttccccattttgccaggcgagatctttaagtacaaatggaccgtcacagtggaagatggaccgactaaatcagaccctcgatgccttacgcggtactattcctccttcgtgaatatggagagagatttggcaagcggactcataggaccactcctcatctgttacaaggaatctgtagaccagaggggtaaccagattatgagtgataaacgcaatgtgatcctttttagcgtcttcgacgagaaccggtcctggtacttgaccgagaatatacaaaggttccttcccaaccccgcaggcgttcagttggaagaccctgagtttcaggccagcaatattatgcactcaatcaacggctatgtgtttgatagtctccagctttctgtttgcctccatgaagtagcctattggtacatcttgtcaattggtgctcaaacagacttcctctccgtcttcttctccggctacacctttaagcacaagatggtgtatgaggacactctcacactctttccattttctggagaaaccgtgttcatgagcatggagaatccaggcctttggatcttgggttgccacaacagtgattttcgcaatcggggaatgactgctctcctcaaagtcagcagctgtgataagaacacaggcgactattacgaagattcttacgaggacataagtgcctacttgttgtccaagaataacgccattgagcccagatcattctcccagaatcctcccgtgcttaaaaggcatcagcgcgaaatcaccagaactactcttcagtctgatcaagaggagattgactatgacgacaccataagcgtggaaatgaagaaggaggatttcgatatctatgacgaagatgagaaccagtctccgcggagctttcagaagaagacgcgacactacttcattgcagcagtcgaaaggctttgggactacggtatgtcatcatcccctcatgtgttgcgcaatagagctcagagtggaagtgttccacagttcaagaaagtcgtctttcaagagtttacagatggcagcttcacacagcctctctatcggggcgagcttaacgaacatttgggactccttggtccctatatccgagccgaagtggaggacaacattatggttacctttaggaatcaagcctctcgcccctacagcttctactcctccctcatcagttatgaggaggatcagagacaaggcgctgaaccacggaagaactttgtgaaaccgaatgagacgaagacctacttctggaaagtacagcaccacatggcccccacaaaagacgaattcgattgcaaagcatgggcgtatttttcagacgttgacttggagaaagatgtacattcaggacttattggtcctttgttggtgtgtcacactaacactctcaatccagcccatggcaggcaggtgacagtccaggaattcgctcttttctttaccatctttgatgagaccaagtcctggtacttcacggaaaacatggagcgcaattgcagagccccctgtaacatacagatggaggaccctacctttaaggaaaattatcggttccacgcaatcaacggatacattatggatacactccctggccttgtgatggctcaggaccaacgaatcaggtggtacctcctcagcatgggttctaatgagaacatacactccattcacttttcaggacatgtgttcactgtccggaagaaagaagagtataagatggccctctacaatttgtatccaggcgtgtttgagaccgttgaaatgcttccctctaaagctggcatctggagagtagagtgcttgatcggagaacatcttcacgcaggtatgagcaccttgttcctcgtgtacagcaacaaatgtcagaccccacttggcatggccagtggacacattcgcgactttcagatcacagcatctggccagtatggacaatgggccccaaagttggctcgcctccattactccggtagcataaatgcgtggtccactaaagaacctttcagctggattaaggtcgatcttcttgcccccatgatcatccacggcattaagacacagggagcgaggcagaaattctcctccctctacatctcacagttcattattatgtatagtttggacggcaagaagtggcaaacttatagaggtaacagtactggaacactcatggtgttcttcggcaacgttgatagctctggcatcaaacacaacatctttaatcctcccataatagctcggtacatcagattgcatccgacccactacagcattaggagtacactccgaatggagcttatgggttgcgacttgaattcctgttcaatgccactcggaatggagtctaaagccatctctgatgcacagataaccgccagtagctactttacgaacatgtttgctacgtggtcaccctctaaggcaaggcttcatttgcaaggccggtctaatgcctggagacctcaggtgaacaacccgaaagaatggctccaggtggactttcagaagaccatgaaagtaacaggtgtcactactcagggagttaagtccttgctcaccagcatgtatgtgaaggagttccttatttcctcatcacaagatggccaccagtggaccctcttctttcagaatggtaaggtcaaagtgtttcagggcaatcaagacagcttcacacccgtggtgaacagtcttgatcctccactcttgacacgataccttcgaatccatccacagtcttgggttcaccagattgcattgcgcatggaagtacttggatgcgaggctcaggacctctac

SEQ ID NO: 18 - protein, 1457 aa, synthetic construct
  REGION 1..1457: note = Variant of human B-domain deleted Factor VIII
MQIELSTCFFLCLLRFCFSATRRYYLGAVELSWDYMQSDLGELPVDARFPPRVPKSFPFNTSRVYKKTLFVEFTDHLFNIAKPRPPWMGLLGPTIQAEVYDTVVITLKNMASHPVSLHAVGVSYWKASEGAEYDDQTSQREKEDDKVFPGGSHTYVWQVLKENGPMASDPLCLTYSYLSHVDLVKDLNSGLIGALLVCREGSLAKEKTQTLHKFILLFAVFDEGKSWHSETKNSLMQDRDAASARAWPKMHTVNGYVNRSLPGLIGCHRKSVYWHVIGMGTTPEVHSIFLEGHTFLVRNHRQASLEISPITFLTAQTLLMDLGQFLLFCHISSHQHDGMEAYVKVDSCPEEPQLRMKNNEEAEDYDDDLTDSEMDVVRFDDDNSPSFIQIRSVAKKHPKTWVHYIAAEEEDWDYAPLVLAPDDRSYKSQYLNNGPQRIGRKYKKVRFMAYTDETFKTREAIQHESGILGPLLYGEVGDTLLIIFKNQASRPYNIYPHGITDVRPLYSRRLPKGVKHLKDFPILPGEIFKYKWTVTVEDGPTKSDPRCLTRYYSSFVNMERDLASGLIGPLLICYKESVDQRGNQIMSDKRNVILFSVFDENRSWYLTENIQRFLPNPAGVQLEDPEFQASNIMHSINGYVFDSLQLSVCLHEVAYWYILSIGAQTDFLSVFFSGYTFKHKMVYEDTLTLFPFSGETVFMSMENPGLWILGCHNSDFRNRGMTALLKVSSCDKNTGDYYEDSYEDISAYLLSKNNAIEPRSFSQNPPVLKRHQREITRTTLQSDQEEIDYDDTISVEMKKEDFDIYDEDENQSPRSFQKKTRHYFIAAVERLWDYGMSSSPHVLRNRAQSGSVPQFKKVVFQEFTDGSFTQPLYRGELNEHLGLLGPYIRAEVEDNIMVTFRNQASRPYSFYSSLISYEEDQRQGAEPRKNFVKPNETKTYFWKVQHHMAPTKDEFDCKAWAYFSDVDLEKDVHSGLIGPLLVCHTNTLNPAHGRQVTVQEFALFFTIFDETKSWYFTENMERNCRAPCNIQMEDPTFKENYRFHAINGYIMDTLPGLVMAQDQRIRWYLLSMGSNENIHSIHFSGHVFTVRKKEEYKMALYNLYPGVFETVEMLPSKAGIWRVECLIGEHLHAGMSTLFLVYSNKCQTPLGMASGHIRDFQITASGQYGQWAPKLARLHYSGSINAWSTKEPFSWIKVDLLAPMIIHGIKTQGARQKFSSLYISQFIIMYSLDGKKWQTYRGNSTGTLMVFFGNVDSSGIKHNIFNPPIIARYIRLHPTHYSIRSTLRMELMGCDLNSCSMPLGMESKAISDAQITASSYFTNMFATWSPSKARLHLQGRSNAWRPQVNNPKEWLQVDFQKTMKVTGVTTQGVKSLLTSMYVKEFLISSSQDGHQWTLFFQNGKVKVFQGNQDSFTPVVNSLDPPLLTRYLRIHPQSWVHQIALRMEVLGCEAQDLY

SEQ ID NO: 19 - DNA, 4371 bp, synthetic construct
  misc_feature 1..4371: note = Variant of human B-domain deleted Factor VIII
  source 1..4371: mol_type = other DNA
atgcagattgaactgtctacctgcttcttcctctgtttgctgaggttctgctttagcgccactagacggtactaccttggcgctgtggagctgtcctgggactatatgcagagtgatttgggagagcttcccgtcgacgcacgatttcctcctcgcgttccaaagtcatttcccttcaacacaagcgtggtgtacaagaagacgctcttcgtcgaattcaccgatcacctgttcaatatcgccaaacccagaccaccatggatgggtcttttggggcctaccatacaagcggaggtgtatgacacagttgttatcactctcaagaacatggcttctcatccggtaagtcttcacgcagtgggcgtgtcctactggaaagcttcagaaggagccgagtatgatgatcagacatcccagagggagaaagaagacgacaaggtatttccaggtgggtctcatacctatgtgtggcaagtgctcaaagagaatggccctatggcaagcgatccgctctgtttgacttacagctacctttcacacgttgacctcgtcaaggacctcaactccgggttgattggagccttgttggtatgcagggaaggatctcttgccaaagagaagacacagaccctccacaagtttatccttctctttgctgtgttcgatgagggcaaaagttggcatagcgaaacgaagaattccctcatgcaggatcgcgacgcagccagcgccagagcttggcccaagatgcacactgtgaacggatatgtcaataggtcacttcctggcttgattgggtgtcatcggaaaagtgtctactggcacgtgatcggaatggggacaacaccagaggtccactccatatttctcgaaggccataccttccttgttcgaaaccacagacaggcatccttggagatctctcccattacctttctcactgcccaaacgctccttatggacttgggtcagttccttctcttctgccatatcagctcacaccagcatgatggtatggaagcttatgtggctgtcgacagttgtcctgaggagccacagttgcgcatgaagaataatgaagaagccgaggattacgacgacgatctcaccgattctgagatggacgtggtgaggtttgatgacgacaactctccctccttcattcaaatccggagcgtggcgaagaaacaccccaagacttgggtccactatatagcggcggaagaggaggattgggattacgctcctcttgtattggcaccagatgaccgctcatacaaaagccagtacctcaacaacggaccgcagagaattggccggaagtataagaaagtgcgatttatggcctatacagacgaaacctttaagacaagggaggccatccagcatgagagtgggattttgggacctcttctttacggcgaagttggtgataccctcctcatcatcttcaagaatcaagcttctcgcccctataacatttacccacacgggatcactgacgttaggcctttgtatagcagaagacttcccaaaggcgtgaagcatctcaaagacttccccattttgccaggcgagatctttaagtacaaatggaccgtcacagtggaagatggaccgactaaatcagaccctcgatgccttacgcggtactattcctccttcgtgaatatggagagagatttggcaagcggactcataggaccactcctcatctgttacaaggaatctgtagaccagaggggtaaccagattatgagtgataaacgcaatgtgatcctttttagcgtcttcgacgagaaccggtcctggtacttgaccgagaatatacaaaggttccttcccaaccccgcaggcgttcagttggaagaccctgagtttcaggccagcaatattatgcactcaatcaacggctatgtgtttgatagtctccagctttctgtttgcctccatgaagtagcctattggtacatcttgtcaattggtgctcaaacagacttcctctccgtcttcttctccggctacacctttaagcacaagatggtgtatgaggacactctcacactctttccattttctggagaaaccgtgttcatgagcatggagaatccaggcctttggatcttgggttgccacaacagtgattttcgcaatcggggaatgactgctctcctcaaagtcagcagctgtgataagaacacaggcgactattacgaagattcttacgaggacataagtgcctacttgttgtccaagaataacgccattgagcccagatcattctcccagaatcctcccgtgcttaaaaggcatcagcgcgaaatcaccagaactactcttcagtctgatcaagaggagattgactatgacgacaccataagcgtggaaatgaagaaggaggatttcgatatctatgacgaagatgagaaccagtctccgcggagctttcagaagaagacgcgacactacttcattgcagcagtcgaaaggctttgggactacggtatgtcatcatcccctcatgtgttgcgcaatagagctcagagtggaagtgttccacagttcaagaaagtcgtctttcaagagtttacagatggcagcttcacacagcctctctatcggggcgagcttaacgaacatttgggactccttggtccctatatccgagccgaagtggaggacaacattatggttacctttaggaatcaagcctctcgcccctacagcttctactcctccctcatcagttatgaggaggatcagagacaaggcgctgaaccacggaagaactttgtgaaaccgaatgagacgaagacctacttctggaaagtacagcaccacatggcccccacaaaagacgaattcgattgcaaagcatgggcgtatttttcagacgttgacttggagaaagatgtacattcaggacttattggtcctttgttggtgtgtcacactaacactctcaatccagcccatggcaggcaggtgacagtccaggaattcgctcttttctttaccatctttgatgagaccaagtcctggtacttcacggaaaacatggagcgcaattgcagagccccctgtaacatacagatggaggaccctacctttaaggaaaattatcggttccacgcaatcaacggatacattatggatacactccctggccttgtgatggctcaggaccaacgaatcaggtggtacctcctcagcatgggttctaatgagaacatacactccattcacttttcaggacatgtgttcactgtccggaagaaagaagagtataagatggccctctacaatttgtatccaggcgtgtttgagaccgttgaaatgcttccctctaaagctggcatctggagagtagagtgcttgatcggagaacatcttcacgcaggtatgagcaccttgttcctcgtgtacagcaacaaatgtcagaccccacttggcatggccagtggacacattcgcgactttcagatcacagcatctggccagtatggacaatgggccccaaagttggctcgcctccattactccggtagcataaatgcgtggtccactaaagaacctttcagctggattaaggtcgatcttcttgcccccatgatcatccacggcattaagacacagggagcgaggcagaaattctcctccctctacatctcacagttcattattatgtatagtttggacggcaagaagtggcaaacttatagaggtaacagtactggaacactcatggtgttcttcggcaacgttgatagctctggcatcaaacacaacatctttaatcctcccataatagctcggtacatcagattgcatccgacccactacagcattaggagtacactccgaatggagcttatgggttgcgacttgaattcctgttcaatgccactcggaatggagtctaaagccatctctgatgcacagataaccgccagtagctactttacgaacatgtttgctacgtggtcaccctctaaggcaaggcttcatttgcaaggccggtctaatgcctggagacctcaggtgaacaacccgaaagaatggctccaggtggactttcagaagaccatgaaagtaacaggtgtcactactcagggagttaagtccttgctcaccagcatgtatgtgaaggagttccttatttcctcatcacaagatggccaccagtggaccctcttctttcagaatggtaaggtcaaagtgtttcagggcaatcaagacagcttcacacccgtggtgaacagtcttgatcctccactcttgacacgataccttcgaatccatccacagtcttgggttcaccagattgcattgcgcatggaagtacttggatgcgaggctcaggacctctac

SEQ ID NO: 20 - protein, 1457 aa, synthetic construct
  REGION 1..1457: note = Variant of human B-domain deleted Factor VIII
MQIELSTCFFLCLLRFCFSATRRYYLGAVELSWDYMQSDLGELPVDARFPPRVPKSFPFNTSVVYKKTLFVEFTDHLFNIAKPRPPWMGLLGPTIQAEVYDTVVITLKNMASHPVSLHAVGVSYWKASEGAEYDDQTSQREKEDDKVFPGGSHTYVWQVLKENGPMASDPLCLTYSYLSHVDLVKDLNSGLIGALLVCREGSLAKEKTQTLHKFILLFAVFDEGKSWHSETKNSLMQDRDAASARAWPKMHTVNGYVNRSLPGLIGCHRKSVYWHVIGMGTTPEVHSIFLEGHTFLVRNHRQASLEISPITFLTAQTLLMDLGQFLLFCHISSHQHDGMEAYVAVDSCPEEPQLRMKNNEEAEDYDDDLTDSEMDVVRFDDDNSPSFIQIRSVAKKHPKTWVHYIAAEEEDWDYAPLVLAPDDRSYKSQYLNNGPQRIGRKYKKVRFMAYTDETFKTREAIQHESGILGPLLYGEVGDTLLIIFKNQASRPYNIYPHGITDVRPLYSRRLPKGVKHLKDFPILPGEIFKYKWTVTVEDGPTKSDPRCLTRYYSSFVNMERDLASGLIGPLLICYKESVDQRGNQIMSDKRNVILFSVFDENRSWYLTENIQRFLPNPAGVQLEDPEFQASNIMHSINGYVFDSLQLSVCLHEVAYWYILSIGAQTDFLSVFFSGYTFKHKMVYEDTLTLFPFSGETVFMSMENPGLWILGCHNSDFRNRGMTALLKVSSCDKNTGDYYEDSYEDISAYLLSKNNAIEPRSFSQNPPVLKRHQREITRTTLQSDQEEIDYDDTISVEMKKEDFDIYDEDENQSPRSFQKKTRHYFIAAVERLWDYGMSSSPHVLRNRAQSGSVPQFKKVVFQEFTDGSFTQPLYRGELNEHLGLLGPYIRAEVEDNIMVTFRNQASRPYSFYSSLISYEEDQRQGAEPRKNFVKPNETKTYFWKVQHHMAPTKDEFDCKAWAYFSDVDLEKDVHSGLIGPLLVCHTNTLNPAHGRQVTVQEFALFFTIFDETKSWYFTENMERNCRAPCNIQMEDPTFKENYRFHAINGYIMDTLPGLVMAQDQRIRWYLLSMGSNENIHSIHFSGHVFTVRKKEEYKMALYNLYPGVFETVEMLPSKAGIWRVECLIGEHLHAGMSTLFLVYSNKCQTPLGMASGHIRDFQITASGQYGQWAPKLARLHYSGSINAWSTKEPFSWIKVDLLAPMIIHGIKTQGARQKFSSLYISQFIIMYSLDGKKWQTYRGNSTGTLMVFFGNVDSSGIKHNIFNPPIIARYIRLHPTHYSIRSTLRMELMGCDLNSCSMPLGMESKAISDAQITASSYFTNMFATWSPSKARLHLQGRSNAWRPQVNNPKEWLQVDFQKTMKVTGVTTQGVKSLLTSMYVKEFLISSSQDGHQWTLFFQNGKVKVFQGNQDSFTPVVNSLDPPLLTRYLRIHPQSWVHQIALRMEVLGCEAQDLY

SEQ ID NO: 21 - DNA, 4371 bp, synthetic construct
  misc_feature 1..4371: note = Variant of human B-domain deleted Factor VIII
  source 1..4371: mol_type = other DNA
atgcagattgaactgtctacctgcttcttcctctgtttgctgaggttctgctttagcgccactagacggtactaccttggcgctgtggagctgtcctgggactatatgcagagtgatttgggagagcttcccgtcgacgcacgatttcctcctcgcgttccaaagtcatttcccttcaacacaagcgtggtgtacaagaagacgctcttcgtcgaattcaccgatcacctgttcaatatcgccaaacccagaccaccatggatgggtcttttggggcctaccatacaagcggaggtgtatgacacagttgttatcactctcaagaacatggcttctcatccggtaagtcttcacgcagtgggcgtgtcctactggaaagcttcagaaggagccgagtatgatgatcagacatcccagagggagaaagaagacgacaaggtatttccaggtgggtctcatacctatgtgtggcaagtgctcaaagagaatggccctatggcaagcgatccgctctgtttgacttacagctacctttcacacgttgacctcgtcaaggacctcaactccgggttgattggagccttgttggtatgcagggaaggatctcttgccaaagagaagacacagaccctccacaagtttatccttctctttgctgtgttcgatgagggcaaaagttggcatagcgaaacgaagaattccctcatgcaggatcgcgacgcagccagcgccagagcttggcccaagatgcacactgtgaacggatatgtcaataggtcacttcctggcttgattgggtgtcatcggaaaagtgtctactggcacgtgatcggaatggggacaacaccagaggtccactccatatttctcgaaggccataccttccttgttcgaaaccacagacaggcatccttggagatctctcccattacctttctcactgcccaaacgctccttatggacttgggtcagttccttctcttctgccatatcagctcacaccagcatgatggtatggaagcttatgtgaaagtcgacagttgtcctgaggagccacagttgcgcatgaagaataatgaagaagccgaggattacgacgacgatctcaccgattctgagatggacgtggtgaggtttgatgacgacaactctccctccttcattcaaatccggagcgtggcgaagaaacaccccaagacttgggtccactatatagcggcggaagaggaggattgggattacgctcctcttgtattggcaccagatgaccgctcatacaaatttcagtacctcaacaacggaccgcagagaattggccggaagtataagaaagtgcgatttatggcctatacagacgaaacctttaagacaagggaggccatccagcatgagagtgggattttgggacctcttctttacggcgaagttggtgataccctcctcatcatcttcaagaatcaagcttctcgcccctataacatttacccacacgggatcactgacgttaggcctttgtatagcagaagacttcccaaaggcgtgaagcatctcaaagacttccccattttgccaggcgagatctttaagtacaaatggaccgtcacagtggaagatggaccgactaaatcagaccctcgatgccttacgcggtactattcctccttcgtgaatatggagagagatttggcaagcggactcataggaccactcctcatctgttacaaggaatctgtagaccagaggggtaaccagattatgagtgataaacgcaatgtgatcctttttagcgtcttcgacgagaaccggtcctggtacttgaccgagaatatacaaaggttccttcccaaccccgcaggcgttcagttggaagaccctgagtttcaggccagcaatattatgcactcaatcaacggctatgtgtttgatagtctccagctttctgtttgcctccatgaagtagcctattggtacatcttgtcaattggtgctcaaacagacttcctctccgtcttcttctccggctacacctttaagcacaagatggtgtatgaggacactctcacactctttccattttctggagaaaccgtgttcatgagcatggagaatccaggcctttggatcttgggttgccacaacagtgattttcgcaatcggggaatgactgctctcctcaaagtcagcagctgtgataagaacacaggcgactattacgaagattcttacgaggacataagtgcctacttgttgtccaagaataacgccattgagcccagatcattctcccagaatcctcccgtgcttaaaaggcatcagcgcgaaatcaccagaactactcttcagtctgatcaagaggagattgactatgacgacaccataagcgtggaaatgaagaaggaggatttcgatatctatgacgaagatgagaaccagtctccgcggagctttcagaagaagacgcgacactacttcattgcagcagtcgaaaggctttgggactacggtatgtcatcatcccctcatgtgttgcgcaatagagctcagagtggaagtgttccacagttcaagaaagtcgtctttcaagagtttacagatggcagcttcacacagcctctctatcggggcgagcttaacgaacatttgggactccttggtccctatatccgagccgaagtggaggacaacattatggttacctttaggaatcaagcctctcgcccctacagcttctactcctccctcatcagttatgaggaggatcagagacaaggcgctgaaccacggaagaactttgtgaaaccgaatgagacgaagacctacttctggaaagtacagcaccacatggcccccacaaaagacgaattcgattgcaaagcatgggcgtatttttcagacgttgacttggagaaagatgtacattcaggacttattggtcctttgttggtgtgtcacactaacactctcaatccagcccatggcaggcaggtgacagtccaggaattcgctcttttctttaccatctttgatgagaccaagtcctggtacttcacggaaaacatggagcgcaattgcagagccccctgtaacatacagatggaggaccctacctttaaggaaaattatcggttccacgcaatcaacggatacattatggatacactccctggccttgtgatggctcaggaccaacgaatcaggtggtacctcctcagcatgggttctaatgagaacatacactccattcacttttcaggacatgtgttcactgtccggaagaaagaagagtataagatggccctctacaatttgtatccaggcgtgtttgagaccgttgaaatgcttccctctaaagctggcatctggagagtagagtgcttgatcggagaacatcttcacgcaggtatgagcaccttgttcctcgtgtacagcaacaaatgtcagaccccacttggcatggccagtggacacattcgcgactttcagatcacagcatctggccagtatggacaatgggccccaaagttggctcgcctccattactccggtagcataaatgcgtggtccactaaagaacctttcagctggattaaggtcgatcttcttgcccccatgatcatccacggcattaagacacagggagcgaggcagaaattctcctccctctacatctcacagttcattattatgtatagtttggacggcaagaagtggcaaacttatagaggtaacagtactggaacactcatggtgttcttcggcaacgttgatagctctggcatcaaacacaacatctttaatcctcccataatagctcggtacatcagattgcatccgacccactacagcattaggagtacactccgaatggagcttatgggttgcgacttgaattcctgttcaatgccactcggaatggagtctaaagccatctctgatgcacagataaccgccagtagctactttacgaacatgtttgctacgtggtcaccctctaaggcaaggcttcatttgcaaggccggtctaatgcctggagacctcaggtgaacaacccgaaagaatggctccaggtggactttcagaagaccatgaaagtaacaggtgtcactactcagggagttaagtccttgctcaccagcatgtatgtgaaggagttccttatttcctcatcacaagatggccaccagtggaccctcttctttcagaatggtaaggtcaaagtgtttcagggcaatcaagacagcttcacacccgtggtgaacagtcttgatcctccactcttgacacgataccttcgaatccatccacagtcttgggttcaccagattgcattgcgcatggaagtacttggatgcgaggctcaggacctctac

SEQ ID NO: 22 - protein, 1457 aa, synthetic construct
  REGION 1..1457: note = Variant of human B-domain deleted Factor VIII
MQIELSTCFFLCLLRFCFSATRRYYLGAVELSWDYMQSDLGELPVDARFPPRVPKSFPFNTSVVYKKTLFVEFTDHLFNIAKPRPPWMGLLGPTIQAEVYDTVVITLKNMASHPVSLHAVGVSYWKASEGAEYDDQTSQREKEDDKVFPGGSHTYVWQVLKENGPMASDPLCLTYSYLSHVDLVKDLNSGLIGALLVCREGSLAKEKTQTLHKFILLFAVFDEGKSWHSETKNSLMQDRDAASARAWPKMHTVNGYVNRSLPGLIGCHRKSVYWHVIGMGTTPEVHSIFLEGHTFLVRNHRQASLEISPITFLTAQTLLMDLGQFLLFCHISSHQHDGMEAYVKVDSCPEEPQLRMKNNEEAEDYDDDLTDSEMDVVRFDDDNSPSFIQIRSVAKKHPKTWVHYIAAEEEDWDYAPLVLAPDDRSYKFQYLNNGPQRIGRKYKKVRFMAYTDETFKTREAIQHESGILGPLLYGEVGDTLLIIFKNQASRPYNIYPHGITDVRPLYSRRLPKGVKHLKDFPILPGEIFKYKWTVTVEDGPTKSDPRCLTRYYSSFVNMERDLASGLIGPLLICYKESVDQRGNQIMSDKRNVILFSVFDENRSWYLTENIQRFLPNPAGVQLEDPEFQASNIMHSINGYVFDSLQLSVCLHEVAYWYILSIGAQTDFLSVFFSGYTFKHKMVYEDTLTLFPFSGETVFMSMENPGLWILGCHNSDFRNRGMTALLKVSSCDKNTGDYYEDSYEDISAYLLSKNNAIEPRSFSQNPPVLKRHQREITRTTLQSDQEEIDYDDTISVEMKKEDFDIYDEDENQSPRSFQKKTRHYFIAAVERLWDYGMSSSPHVLRNRAQSGSVPQFKKVVFQEFTDGSFTQPLYRGELNEHLGLLGPYIRAEVEDNIMVTFRNQASRPYSFYSSLISYEEDQRQGAEPRKNFVKPNETKTYFWKVQHHMAPTKDEFDCKAWAYFSDVDLEKDVHSGLIGPLLVCHTNTLNPAHGRQVTVQEFALFFTIFDETKSWYFTENMERNCRAPCNIQMEDPTFKENYRFHAINGYIMDTLPGLVMAQDQRIRWYLLSMGSNENIHSIHFSGHVFTVRKKEEYKMALYNLYPGVFETVEMLPSKAGIWRVECLIGEHLHAGMSTLFLVYSNKCQTPLGMASGHIRDFQITASGQYGQWAPKLARLHYSGSINAWSTKEPFSWIKVDLLAPMIIHGIKTQGARQKFSSLYISQFIIMYSLDGKKWQTYRGNSTGTLMVFFGNVDSSGIKHNIFNPPIIARYIRLHPTHYSIRSTLRMELMGCDLNSCSMPLGMESKAISDAQITASSYFTNMFATWSPSKARLHLQGRSNAWRPQVNNPKEWLQVDFQKTMKVTGVTTQGVKSLLTSMYVKEFLISSSQDGHQWTLFFQNGKVKVFQGNQDSFTPVVNSLDPPLLTRYLRIHPQSWVHQIALRMEVLGCEAQDLY

SEQ ID NO: 23 - DNA, 4371 bp, synthetic construct
  misc_feature 1..4371: note = Variant of human B-domain deleted Factor VIII
  source 1..4371: mol_type = other DNA
atgcagattgaactgtctacctgcttcttcctctgtttgctgaggttctgctttagcgccactagacggtactaccttggcgctgtggagctgtcctgggactatatgcagagtgatttgggagagcttcccgtcgacgcacgatttcctcctcgcgttccaaagtcatttcccttcaacacaagcgtggtgtacaagaagacgctcttcgtcgaattcaccgatcacctgttcaatatcgccaaacccagaccaccatggatgggtcttttggggcctaccatacaagcggaggtgtatgacacagttgttatcactctcaagaacatggcttctcatccggtaagtcttcacgcagtgggcgtgtcctactggaaagcttcagaaggagccgagtatgatgatcagacatcccagagggagaaagaagacgacaaggtatttccaggtgggtctcatacctatgtgtggcaagtgctcaaagagaatggccctatggcaagcgatccgctctgtttgacttacagctacctttcacacgttgacctcgtcaaggacctcaactccgggttgattggagccttgttggtatgcagggaaggatctcttgccaaagagaagacacagaccctccacaagtttatccttctctttgctgtgttcgatgagggcaaaagttggcatagcgaaacgaagaattccctcatgcaggatcgcgacgcagccagcgccagagcttggcccaagatgcacactgtgaacggatatgtcaataggtcacttcctggcttgattgggtgtcatcggaaaagtgtctactggcacgtgatcggaatggggacaacaccagaggtccactccatatttctcgaaggccataccttccttgttcgaaaccacagacaggcatccttggagatctctcccattacctttctcactgcccaaacgctccttatggacttgggtcagttccttctcttctgccatatcagctcacaccagcatgatggtatggaagcttatgtgaaagtcgacagttgtcctgaggagccacagttgcgcatgaagaataatgaagaagccgaggattacgacgacgatctcaccgattctgagatggacgtggtgaggtttgatgacgacaactctccctccttcattcaaatccggagcgtggcgaagaaacaccccaagacttgggtccactatatagcggcggaagaggaggattgggattacgctcctcttgtattggcaccagatgaccgctcatacaaaagccagtacctcaacaacggaccgcagagaattggccggaagtataagaaagtgcgatttatggcctatacagacgaaacctttaagacaagggaggccatccagcatgagagtgggattttgggacctcttctttacggcgaagttggtgataccctcctcatcatcttcaagaatcaagcttctcgcccctataacatttacccacacgggatcactgacgttaggcctttgtatagcagaagacttcccaaaggcgtgaagcatctcaaagacttccccattttgccaggcgagatctttaagtacaaatggaccgtcacagtggaagatggaccgactaaatcagaccctcgatgccttacgcggtactattcctccttcgtgaatatggagagagatttggcaagcggactcataggaccactcctcatctgttacaaggaatctgtagaccagaggggtaaccagattatgagtgataaacgcaatgtgatcctttttagcgtcttcgacgagaaccggtcctggtacttgaccgagaatatacaaaggttccttcccaaccccgcaggcgttcagttggaagaccctgagtttcaggccagcaatattatgcactcaatcaacggctatgtgtttgatagtctccagctttctgtttgcctccatgaagtagcctattggtacatcttgtcaattggtgctcaaacagacttcctctccgtcttcttctccggctacacctttaagcacaagatggtgtatgaggacactctcacactctttccattttctggagaaaccgtgttcatgagcatggagaatccaggcctttggatcttgggttgccacaacagtgattttcgcaatcggggaatgactgctctcctcaaagtcagcagctgtgataagaacacaggcgactattacgaagattcttacgaggacataagtgcctacttgttgtccaagaataacgccattgagcccagatcattctcccagaatcctcccgtgcttaaaaggcatcagcgcgaaatcaccagaactactcttcagtctgatcaagaggagattgactatgacgacaccataagcgtggaaatgaagaaggaggatttcgatatctatgacgaagatgagaaccagtctccgcggagctttcagaagaagacgcgacactacttcattgcagcagtcgaaaggctttgggactacggtatgtcatcatcccctcatgtgttgcgcaatagagctcagagtggaagtgttccacagttcaagaaagtcgtctttcaagagtttacagatggcagcttcacacagcctctctatcggggcgagcttaaccagcatttgggactccttggtccctatatccgagccgaagtggaggacaacattatggttacctttaggaatcaagcctctcgcccctacagcttctactcctccctcatcagttatgaggaggatcagagacaaggcgctgaaccacggaagaactttgtgaaaccgaatgagacgaagacctacttctggaaagtacagcaccacatggcccccacaaaagacgaattcgattgcaaagcatgggcgtatttttcagacgttgacttggagaaagatgtacattcaggacttattggtcctttgttggtgtgtcacactaacactctcaatccagcccatggcaggcaggtgacagtccaggaattcgctcttttctttaccatctttgatgagaccaagtcctggtacttcacggaaaacatggagcgcaattgcagagccccctgtaacatacagatggaggaccctacctttaaggaaaattatcggttccacgcaatcaacggatacattatggatacactccctggccttgtgatggctcaggaccaacgaatcaggtggtacctcctcagcatgggttctaatgagaacatacactccattcacttttcaggacatgtgttcactgtccggaagaaagaagagtataagatggccctctacaatttgtatccaggcgtgtttgagaccgttgaaatgcttccctctaaagctggcatctggagagtagagtgcttgatcggagaacatcttcacgcaggtatgagcaccttgttcctcgtgtacagcaacaaatgtcagaccccacttggcatggccagtggacacattcgcgactttcagatcacagcatctggccagtatggacaatgggccccaaagttggctcgcctccattactccggtagcataaatgcgtggtccactaaagaacctttcagctggattaaggtcgatcttcttgcccccatgatcatccacggcattaagacacagggagcgaggcagaaattctcctccctctacatctcacagttcattattatgtatagtttggacggcaagaagtggcaaacttatagaggtaacagtactggaacactcatggtgttcttcggcaacgttgatagctctggcatcaaacacaacatctttaatcctcccataatagctcggtacatcagattgcatccgacccactacagcattaggagtacactccgaatggagcttatgggttgcgacttgaattcctgttcaatgccactcggaatggagtctaaagccatctctgatgcacagataaccgccagtagctactttacgaacatgtttgctacgtggtcaccctctaaggcaaggcttcatttgcaaggccggtctaatgcctggagacctcaggtgaacaacccgaaagaatggctccaggtggactttcagaagaccatgaaagtaacaggtgtcactactcagggagttaagtccttgctcaccagcatgtatgtgaaggagttccttatttcctcatcacaagatggccaccagtggaccctcttctttcagaatggtaaggtcaaagtgtttcagggcaatcaagacagcttcacacccgtggtgaacagtcttgatcctccactcttgacacgataccttcgaatccatccacagtcttgggttcaccagattgcattgcgcatggaagtacttggatgcgaggctcaggacctctac

SEQ ID NO: 24 - protein, 1457 aa, synthetic construct
  REGION 1..1457: note = Variant of human B-domain deleted Factor VIII
MQIELSTCFFLCLLRFCFSATRRYYLGAVELSWDYMQSDLGELPVDARFPPRVPKSFPFNTSVVYKKTLFVEFTDHLFNIAKPRPPWMGLLGPTIQAEVYDTVVITLKNMASHPVSLHAVGVSYWKASEGAEYDDQTSQREKEDDKVFPGGSHTYVWQVLKENGPMASDPLCLTYSYLSHVDLVKDLNSGLIGALLVCREGSLAKEKTQTLHKFILLFAVFDEGKSWHSETKNSLMQDRDAASARAWPKMHTVNGYVNRSLPGLIGCHRKSVYWHVIGMGTTPEVHSIFLEGHTFLVRNHRQASLEISPITFLTAQTLLMDLGQFLLFCHISSHQHDGMEAYVKVDSCPEEPQLRMKNNEEAEDYDDDLTDSEMDVVRFDDDNSPSFIQIRSVAKKHPKTWVHYIAAEEEDWDYAPLVLAPDDRSYKSQYLNNGPQRIGRKYKKVRFMAYTDETFKTREAIQHESGILGPLLYGEVGDTLLIIFKNQASRPYNIYPHGITDVRPLYSRRLPKGVKHLKDFPILPGEIFKYKWTVTVEDGPTKSDPRCLTRYYSSFVNMERDLASGLIGPLLICYKESVDQRGNQIMSDKRNVILFSVFDENRSWYLTENIQRFLPNPAGVQLEDPEFQASNIMHSINGYVFDSLQLSVCLHEVAYWYILSIGAQTDFLSVFFSGYTFKHKMVYEDTLTLFPFSGETVFMSMENPGLWILGCHNSDFRNRGMTALLKVSSCDKNTGDYYEDSYEDISAYLLSKNNAIEPRSFSQNPPVLKRHQREITRTTLQSDQEEIDYDDTISVEMKKEDFDIYDEDENQSPRSFQKKTRHYFIAAVERLWDYGMSSSPHVLRNRAQSGSVPQFKKVVFQEFTDGSFTQPLYRGELNQHLGLLGPYIRAEVEDNIMVTFRNQASRPYSFYSSLISYEEDQRQGAEPRKNFVKPNETKTYFWKVQHHMAPTKDEFDCKAWAYFSDVDLEKDVHSGLIGPLLVCHTNTLNPAHGRQVTVQEFALFFTIFDETKSWYFTENMERNCRAPCNIQMEDPTFKENYRFHAINGYIMDTLPGLVMAQDQRIRWYLLSMGSNENIHSIHFSGHVFTVRKKEEYKMALYNLYPGVFETVEMLPSKAGIWRVECLIGEHLHAGMSTLFLVYSNKCQTPLGMASGHIRDFQITASGQYGQWAPKLARLHYSGSINAWSTKEPFSWIKVDLLAPMIIHGIKTQGARQKFSSLYISQFIIMYSLDGKKWQTYRGNSTGTLMVFFGNVDSSGIKHNIFNPPIIARYIRLHPTHYSIRSTLRMELMGCDLNSCSMPLGMESKAISDAQITASSYFTNMFATWSPSKARLHLQGRSNAWRPQVNNPKEWLQVDFQKTMKVTGVTTQGVKSLLTSMYVKEFLISSSQDGHQWTLFFQNGKVKVFQGNQDSFTPVVNSLDPPLLTRYLRIHPQSWVHQIALRMEVLGCEAQDLY

SEQ ID NO: 25 - DNA, 4371 bp, synthetic construct
  misc_feature 1..4371: note = Variant of human B-domain deleted Factor VIII
  source 1..4371: mol_type = other DNA
atgcagattgaactgtctacctgcttcttcctctgtttgctgaggttctgctttagcgccactagacggtactaccttggcgctgtggagctgtcctgggactatatgcagagtgatttgggagagcttcccgtcgacgcacgatttcctcctcgcgttccaaagtcatttcccctgaacacaagcgtggtgtacaagaagacgctcttcgtcgaattcaccgatcacctgttcaatatcgccaaacccagaccaccatggatgggtcttttggggcctaccatacaagcggaggtgtatgacacagttgttatcactctcaagaacatggcttctcatccggtaagtcttcacgcagtgggcgtgtcctactggaaagcttcagaaggagccgagtatgatgatcagacatcccagagggagaaagaagacgacaaggtatttccaggtgggtctcatacctatgtgtggcaagtgctcaaagagaatggccctatggcaagcgatccgctctgtttgacttacagctacctttcacacgttgacctcgtcaaggacctcaactccgggttgattggagccttgttggtatgcagggaaggatctcttgccaaagagaagacacagaccctccacaagtttatccttctctttgctgtgttcgatgagggcaaaagttggcatagcgaaacgaagaattccctcatgcaggatcgcgacgcagccagcgccagagcttggcccaagatgcacactgtgaacggatatgtcaataggtcacttcctggcttgattgggtgtcatcggaaaagtgtctactggcacgtgatcggaatggggacaacaccagaggtccactccatatttctcgaaggccataccttccttgttcgaaaccacagacaggcatccttggagatctctcccattacctttctcactgcccaaacgctccttatggacttgggtcagttccttctcttctgccatatcagctcacaccagcatgatggtatggaagcttatgtgaaagtcgacagttgtcctgaggagccacagttgcgcatgaagaataatgaagaagccgaggattacgacgacgatctcaccgattctgagatggacgtggtgaggtttgatgacgacaactctccctccttcattcaaatccggagcgtggcgaagaaacaccccaagacttgggtccactatatagcggcggaagaggaggattgggattacgctcctcttgtattggcaccagatgaccgctcatacaaaagccagtacctcaacaacggaccgcagagaattggccggaagtataagaaagtgcgatttatggcctatacagacgaaacctttaagacaagggaggccatccagcatgagagtgggattttgggacctcttctttacggcgaagttggtgataccctcctcatcatcttcaagaatcaagcttctcgcccctataacatttacccacacgggatcactgacgttaggcctttgtatagcagaagacttcccaaaggcgtgaagcatctcaaagacttccccattttgccaggcgagatctttaagtacaaatggaccgtcacagtggaagatggaccgactaaatcagaccctcgatgccttacgcggtactattcctccttcgtgaatatggagagagatttggcaagcggactcataggaccactcctcatctgttacaaggaatctgtagaccagaggggtaaccagattatgagtgataaacgcaatgtgatcctttttagcgtcttcgacgagaaccggtcctggtacttgaccgagaatatacaaaggttccttcccaaccccgcaggcgttcagttggaagaccctgagtttcaggccagcaatattatgcactcaatcaacggctatgtgtttgatagtctccagctttctgtttgcctccatgaagtagcctattggtacatcttgtcaattggtgctcaaacagacttcctctccgtcttcttctccggctacacctttaagcacaagatggtgtatgaggacactctcacactctttccattttctggagaaaccgtgttcatgagcatggagaatccaggcctttggatcttgggttgccacaacagtgattttcgcaatcggggaatgactgctctcctcaaagtcagcagctgtgataagaacacaggcgactattacgaagattcttacgaggacataagtgcctacttgttgtccaagaataacgccattgagcccagatcattctcccagaatcctcccgtgcttaaaaggcatcagcgcgaaatcaccagaactactcttcagtctgatcaagaggagattgactatgacgacaccataagcgtggaaatgaagaaggaggatttcgatatctatgacgaagatgagaaccagtctccgcggagctttcagaagaagacgcgacactacttcattgcagcagtcgaaaggctttgggactacggtatgtcatcatcccctcatgtgttgcgcaatagagctcagagtggaagtgttccacagttcaagaaagtcgtctttcaagagtttacagatggcagcttcacacagcctctctatcggggcgagcttaacgaacatttgggactccttggtccctatatccgagccgaagtggaggacaacattatggttacctttaggaatcaagcctctcgcccctacagcttctactcctccctcatcagttatgaggaggatcagagacaaggcgctgaaccacggaagaactttgtgaaaccgaatgagacgaagacctacttctggaaagtacagcaccacatggcccccacaaaagacgaattcgattgcaaagcatgggcgtatttttcagacgttgacttggagaaagatgtacattcaggacttattggtcctttgttggtgtgtcacactaacactctcaatccagcccatggcaggcaggtgacagtccaggaattcgctcttttctttaccatctttgatgagaccaagtcctggtacttcacggaaaacatggagcgcaattgcagagccccctgtaacatacagatggaggaccctacctttaaggaaaattatcggttccacgcaatcaacggatacattatggatacactccctggccttgtgatggctcaggaccaacgaatcaggtggtacctcctcagcatgggttctaatgagaacatacactccattcacttttcaggacatgtgttcactgtccggaagaaagaagagtataagatggccctctacaatttgtatccaggcgtgtttgagaccgttgaaatgcttccctctaaagctggcatctggagagtagagtgcttgatcggagaacatcttcacgcaggtatgagcaccttgttcctcgtgtacagcaacaaatgtcagaccccacttggcatggccagtggacacattcgcgactttcagatcacagcatctggccagtatggacaatgggccccaaagttggctcgcctccattactccggtagcataaatgcgtggtccactaaagaacctttcagctggattaaggtcgatcttcttgcccccatgatcatccacggcattaagacacagggagcgaggcagaaattctcctccctctacatctcacagttcattattatgtatagtttggacggcaagaagtggcaaacttatagaggtaacagtactggaacactcatggtgttcttcggcaacgttgatagctctggcatcaaacacaacatctttaatcctcccataatagctcggtacatcagattgcatccgacccactacagcattaggagtacactccgaatggagcttatgggttgcgacttgaattcctgttcaatgccactcggaatggagtctaaagccatctctgatgcacagataaccgccagtagctactttacgaacatgtttgctacgtggtcaccctctaaggcaaggcttcatttgcaaggccggtctaatgcctggagacctcaggtgaacaacccgaaagaatggctccaggtggactttcagaagaccatgaaagtaacaggtgtcactactcagggagttaagtccttgctcaccagcatgtatgtgaaggagttccttatttcctcatcacaagatggccaccagtggaccctcttctttcagaatggtaaggtcaaagtgtttcagggcaatcaagacagcttcacacccgtggtgaacagtcttgatcctccactcttgacacgataccttcgaatccatccacagtcttgggttcaccagattgcattgcgcatggaagtacttggatgcgaggctcaggacctctac

SEQ ID NO: 26 - protein, 1457 aa, synthetic construct
  REGION 1..1457: note = Variant of human B-domain deleted Factor VIII
MQIELSTCFFLCLLRFCFSATRRYYLGAVELSWDYMQSDLGELPVDARFPPRVPKSFPLNTSVVYKKTLFVEFTDHLFNIAKPRPPWMGLLGPTIQAEVYDTVVITLKNMASHPVSLHAVGVSYWKASEGAEYDDQTSQREKEDDKVFPGGSHTYVWQVLKENGPMASDPLCLTYSYLSHVDLVKDLNSGLIGALLVCREGSLAKEKTQTLHKFILLFAVFDEGKSWHSETKNSLMQDRDAASARAWPKMHTVNGYVNRSLPGLIGCHRKSVYWHVIGMGTTPEVHSIFLEGHTFLVRNHRQASLEISPITFLTAQTLLMDLGQFLLFCHISSHQHDGMEAYVKVDSCPEEPQLRMKNNEEAEDYDDDLTDSEMDVVRFDDDNSPSFIQIRSVAKKHPKTWVHYIAAEEEDWDYAPLVLAPDDRSYKSQYLNNGPQRIGRKYKKVRFMAYTDETFKTREAIQHESGILGPLLYGEVGDTLLIIFKNQASRPYNIYPHGITDVRPLYSRRLPKGVKHLKDFPILPGEIFKYKWTVTVEDGPTKSDPRCLTRYYSSFVNMERDLASGLIGPLLICYKESVDQRGNQIMSDKRNVILFSVFDENRSWYLTENIQRFLPNPAGVQLEDPEFQASNIMHSINGYVFDSLQLSVCLHEVAYWYILSIGAQTDFLSVFFSGYTFKHKMVYEDTLTLFPFSGETVFMSMENPGLWILGCHNSDFRNRGMTALLKVSSCDKNTGDYYEDSYEDISAYLLSKNNAIEPRSFSQNPPVLKRHQREITRTTLQSDQEEIDYDDTISVEMKKEDFDIYDEDENQSPRSFQKKTRHYFIAAVERLWDYGMSSSPHVLRNRAQSGSVPQFKKVVFQEFTDGSFTQPLYRGELNEHLGLLGPYIRAEVEDNIMVTFRNQASRPYSFYSSLISYEEDQRQGAEPRKNFVKPNETKTYFWKVQHHMAPTKDEFDCKAWAYFSDVDLEKDVHSGLIGPLLVCHTNTLNPAHGRQVTVQEFALFFTIFDETKSWYFTENMERNCRAPCNIQMEDPTFKENYRFHAINGYIMDTLPGLVMAQDQRIRWYLLSMGSNENIHSIHFSGHVFTVRKKEEYKMALYNLYPGVFETVEMLPSKAGIWRVECLIGEHLHAGMSTLFLVYSNKCQTPLGMASGHIRDFQITASGQYGQWAPKLARLHYSGSINAWSTKEPFSWIKVDLLAPMIIHGIKTQGARQKFSSLYISQFIIMYSLDGKKWQTYRGNSTGTLMVFFGNVDSSGIKHNIFNPPIIARYIRLHPTHYSIRSTLRMELMGCDLNSCSMPLGMESKAISDAQITASSYFTNMFATWSPSKARLHLQGRSNAWRPQVNNPKEWLQVDFQKTMKVTGVTTQGVKSLLTSMYVKEFLISSSQDGHQWTLFFQNGKVKVFQGNQDSFTPVVNSLDPPLLTRYLRIHPQSWVHQIALRMEVLGCEAQDLY

SEQ ID NO: 27 - DNA, 4371 bp, synthetic construct
  misc_feature 1..4371: note = Variant of human B-domain deleted Factor VIII
  source 1..4371: mol_type = other DNA
atgcagattgaactgtctacctgcttcttcctctgtttgctgaggttctgctttagcgccactagacggtactaccttggcgctgtggagctgtcctgggactatatgcagagtgatttgggagagcttcccgtcgacgcacgatttcctcctcgcgttccaaagtcatttcccttcaacacaagcgtggtgtacaagaagacgctcttcgtcgaattcaccgatcacctgttcaatatcgccaaacccagaccaccatggatgggtcttttggggcctaccatacaagcggaggtgtatgacacagttgttatcactctcaagaacatggcttctcatccggtaagtcttcacgcagtgggcgtgtcctactggaaagcttcagaaggagccgagtatgatgatcagacatcccagagggagaaagaagacgacaaggtatttccaggtgggtctcatacctatgtgtggcaagtgctcaaagagaatggccctatggcaagcgatccgctctgtttgacttacagctacctttcacacgttgacctcgtcaaggacctcaactccgggttgattggagccttgttggtatgcagggaaggatctcttgccaaagagaagacacagaccctccacaagtttatccttctctttgctgtgttcgatgagggcaaaagttggcatagcgaaacgaagaattccctcatgcaggatcgcgacgcagccagcgccagagcttggcccaagatgcacactgtgaacggatatgtcaataggtcacttcctggcttgattgggtgtcatcggaaaagtgtctactggcacgtgatcggaatggggacaacaccagaggtccactccatatttctcgaaggccataccttccttgttcgaaaccacagacaggcatccttggagatctctcccattacctttctcactgcccaaacgctccttatggacttgggtcagttccttctcttctgccatatcagctcacaccagcatgatggtatggaagcttatgtgaaagtcgacagttgtcctgaggagccacagttgcgcatgaagaataatgaagaagccgaggattacgacgacgatctcaccgattctgagatggacgtggtgaggtttgatgacgacaactctccctccttcattcaaatccggagcgtggcgaagaaacaccccaagacttgggtccactatatagcggcggaagaggaggattgggattacgctcctcttgtattggcaccagatgaccgctcatacaaaagctcgtacctcaacaacggaccgcagagaattggccggaagtataagaaagtgcgatttatggcctatacagacgaaacctttaagacaagggaggccatccagcatgagagtgggattttgggacctcttctttacggcgaagttggtgataccctcctcatcatcttcaagaatcaagcttctcgcccctataacatttacccacacgggatcactgacgttaggcctttgtatagcagaagacttcccaaaggcgtgaagcatctcaaagacttccccattttgccaggcgagatctttaagtacaaatggaccgtcacagtggaagatggaccgactaaatcagaccctcgatgccttacgcggtactattcctccttcgtgaatatggagagagatttggcaagcggactcataggaccactcctcatctgttacaaggaatctgtagaccagaggggtaaccagattatgagtgataaacgcaatgtgatcctttttagcgtcttcgacgagaaccggtcctggtacttgaccgagaatatacaaaggttccttcccaaccccgcaggcgttcagttggaagaccctgagtttcaggccagcaatattatgcactcaatcaacggctatgtgtttgatagtctccagctttctgtttgcctccatgaagtagcctattggtacatcttgtcaattggtgctcaaacagacttcctctccgtcttcttctccggctacacctttaagcacaagatggtgtatgaggacactctcacactctttccattttctggagaaaccgtgttcatgagcatggagaatccaggcctttggatcttgggttgccacaacagtgattttcgcaatcggggaatgactgctctcctcaaagtcagcagctgtgataagaacacaggcgactattacgaagattcttacgaggacataagtgcctacttgttgtccaagaataacgccattgagcccagatcattctcccagaatcctcccgtgcttaaaaggcatcagcgcgaaatcaccagaactactcttcagtctgatcaagaggagattgactatgacgacaccataagcgtggaaatgaagaaggaggatttcgatatctatgacgaagatgagaaccagtctccgcggagctttcagaagaagacgcgacactacttcattgcagcagtcgaaaggctttgggactacggtatgtcatcatcccctcatgtgttgcgcaatagagctcagagtggaagtgttccacagttcaagaaagtcgtctttcaagagtttacagatggcagcttcacacagcctctctatcggggcgagcttaacgaacatttgggactccttggtccctatatccgagccgaagtggaggacaacattatggttacctttaggaatcaagcctctcgcccctacagcttctactcctccctcatcagttatgaggaggatcagagacaaggcgctgaaccacggaagaactttgtgaaaccgaatgagacgaagacctacttctggaaagtacagcaccacatggcccccacaaaagacgaattcgattgcaaagcatgggcgtatttttcagacgttgacttggagaaagatgtacattcaggacttattggtcctttgttggtgtgtcacactaacactctcaatccagcccatggcaggcaggtgacagtccaggaattcgctcttttctttaccatctttgatgagaccaagtcctggtacttcacggaaaacatggagcgcaattgcagagccccctgtaacatacagatggaggaccctacctttaaggaaaattatcggttccacgcaatcaacggatacattatggatacactccctggccttgtgatggctcaggaccaacgaatcaggtggtacctcctcagcatgggttctaatgagaacatacactccattcacttttcaggacatgtgttcactgtccggaagaaagaagagtataagatggccctctacaatttgtatccaggcgtgtttgagaccgttgaaatgcttccctctaaagctggcatctggagagtagagtgcttgatcggagaacatcttcacgcaggtatgagcaccttgttcctcgtgtacagcaacaaatgtcagaccccacttggcatggccagtggacacattcgcgactttcagatcacagcatctggccagtatggacaatgggccccaaagttggctcgcctccattactccggtagcataaatgcgtggtccactaaagaacctttcagctggattaaggtcgatcttcttgcccccatgatcatccacggcattaagacacagggagcgaggcagaaattctcctccctctacatctcacagttcattattatgtatagtttggacggcaagaagtggcaaacttatagaggtaacagtactggaacactcatggtgttcttcggcaacgttgatagctctggcatcaaacacaacatctttaatcctcccataatagctcggtacatcagattgcatccgacccactacagcattaggagtacactccgaatggagcttatgggttgcgacttgaattcctgttcaatgccactcggaatggagtctaaagccatctctgatgcacagataaccgccagtagctactttacgaacatgtttgctacgtggtcaccctctaaggcaaggcttcatttgcaaggccggtctaatgcctggagacctcaggtgaacaacccgaaagaatggctccaggtggactttcagaagaccatgaaagtaacaggtgtcactactcagggagttaagtccttgctcaccagcatgtatgtgaaggagttccttatttcctcatcacaagatggccaccagtggaccctcttctttcagaatggtaaggtcaaagtgtttcagggcaatcaagacagcttcacacccgtggtgaacagtcttgatcctccactcttgacacgataccttcgaatccatccacagtcttgggttcaccagattgcattgcgcatggaagtacttggatgcgaggctcaggacctctac

SEQ ID NO: 28 - protein, 1457 aa, synthetic construct
  REGION 1..1457: note = Variant of human B-domain deleted Factor VIII
MQIELSTCFFLCLLRFCFSATRRYYLGAVELSWDYMQSDLGELPVDARFPPRVPKSFPFNTSVVYKKTLFVEFTDHLFNIAKPRPPWMGLLGPTIQAEVYDTVVITLKNMASHPVSLHAVGVSYWKASEGAEYDDQTSQREKEDDKVFPGGSHTYVWQVLKENGPMASDPLCLTYSYLSHVDLVKDLNSGLIGALLVCREGSLAKEKTQTLHKFILLFAVFDEGKSWHSETKNSLMQDRDAASARAWPKMHTVNGYVNRSLPGLIGCHRKSVYWHVIGMGTTPEVHSIFLEGHTFLVRNHRQASLEISPITFLTAQTLLMDLGQFLLFCHISSHQHDGMEAYVKVDSCPEEPQLRMKNNEEAEDYDDDLTDSEMDVVRFDDDNSPSFIQIRSVAKKHPKTWVHYIAAEEEDWDYAPLVLAPDDRSYKSSYLNNGPQRIGRKYKKVRFMAYTDETFKTREAIQHESGILGPLLYGEVGDTLLIIFKNQASRPYNIYPHGITDVRPLYSRRLPKGVKHLKDFPILPGEIFKYKWTVTVEDGPTKSDPRCLTRYYSSFVNMERDLASGLIGPLLICYKESVDQRGNQIMSDKRNVILFSVFDENRSWYLTENIQRFLPNPAGVQLEDPEFQASNIMHSINGYVFDSLQLSVCLHEVAYWYILSIGAQTDFLSVFFSGYTFKHKMVYEDTLTLFPFSGETVFMSMENPGLWILGCHNSDFRNRGMTALLKVSSCDKNTGDYYEDSYEDISAYLLSKNNAIEPRSFSQNPPVLKRHQREITRTTLQSDQEEIDYDDTISVEMKKEDFDIYDEDENQSPRSFQKKTRHYFIAAVERLWDYGMSSSPHVLRNRAQSGSVPQFKKVVFQEFTDGSFTQPLYRGELNEHLGLLGPYIRAEVEDNIMVTFRNQASRPYSFYSSLISYEEDQRQGAEPRKNFVKPNETKTYFWKVQHHMAPTKDEFDCKAWAYFSDVDLEKDVHSGLIGPLLVCHTNTLNPAHGRQVTVQEFALFFTIFDETKSWYFTENMERNCRAPCNIQMEDPTFKENYRFHAINGYIMDTLPGLVMAQDQRIRWYLLSMGSNENIHSIHFSGHVFTVRKKEEYKMALYNLYPGVFETVEMLPSKAGIWRVECLIGEHLHAGMSTLFLVYSNKCQTPLGMASGHIRDFQITASGQYGQWAPKLARLHYSGSINAWSTKEPFSWIKVDLLAPMIIHGIKTQGARQKFSSLYISQFIIMYSLDGKKWQTYRGNSTGTLMVFFGNVDSSGIKHNIFNPPIIARYIRLHPTHYSIRSTLRMELMGCDLNSCSMPLGMESKAISDAQITASSYFTNMFATWSPSKARLHLQGRSNAWRPQVNNPKEWLQVDFQKTMKVTGVTTQGVKSLLTSMYVKEFLISSSQDGHQWTLFFQNGKVKVFQGNQDSFTPVVNSLDPPLLTRYLRIHPQSWVHQIALRMEVLGCEAQDLY

SEQ ID NO: 29 - DNA, 4371 bp, synthetic construct
  misc_feature 1..4371: note = Variant of human B-domain deleted Factor VIII
  source 1..4371: mol_type = other DNA
atgcagattgaactgtctacctgcttcttcctctgtttgctgaggttctgctttagcgccactagacggtactaccttggcgctgtggagctgtcctgggactatatgcagagtgatttgggagagcttcccgtcgacgcacgatttcctcctcgcgttccaaagtcatttcccttcaacacaagcgtggtgtacaagaagacgctcttcgtcgaattcaccgatcacctgttcaatatcgccaaacccagaccaccatggatgggtcttttggggcctaccatacaagcggaggtgtatgacacagttgttatcactctcaagaacatggcttctcatccggtaagtcttcacgcagtgggcgtgtcctactggaaagcttcagaaggagccgagtatgatgatcagacatcccagagggagaaagaagacgacaaggtatttccaggtgggtctcatacctatgtgtggcaagtgctcaaagagaatggccctatggcaagcgatccgctctgtttgacttacagctacctttcacacgttgacctcgtcaaggacctcaactccgggttgattggagccttgttggtatgcagggaaggatctcttgccagggagaagacacagaccctccacaagtttatccttctctttgctgtgttcgatgagggcaaaagttggcatagcgaaacgaagaattccctcatgcaggatcgcgacgcagccagcgccagagcttggcccaagatgcacactgtgaacggatatgtcaataggtcacttcctggcttgattgggtgtcatcggaaaagtgtctactggcacgtgatcggaatggggacaacaccagaggtccactccatatttctcgaaggccataccttccttgttcgaaaccacagacaggcatccttggagatctctcccattacctttctcactgcccaaacgctccttatggacttgggtcagttccttctcttctgccatatcagctcacaccagcatgatggtatggaagcttatgtgaaagtcgacagttgtcctgaggagccacagttgcgcatgaagaataatgaagaagccgaggattacgacgacgatctcaccgattctgagatggacgtggtgaggtttgatgacgacaactctccctccttcattcaaatccggagcgtggcgaagaaacaccccaagacttgggtccactatatagcggcggaagaggaggattgggattacgctcctcttgtattggcaccagatgaccgctcatacaaaagccagtacctcaacaacggaccgcagagaattggccggaagtataagaaagtgcgatttatggcctatacagacgaaacctttaagacaagggaggccatccagcatgagagtgggattttgggacctcttctttacggcgaagttggtgataccctcctcatcatcttcaagaatcaagcttctcgcccctataacatttacccacacgggatcactgacgttaggcctttgtatagcagaagacttcccaaaggcgtgaagcatctcaaagacttccccattttgccaggcgagatctttaagtacaaatggaccgtcacagtggaagatggaccgactaaatcagaccctcgatgccttacgcggtactattcctccttcgtgaatatggagagagatttggcaagcggactcataggaccactcctcatctgttacaaggaatctgtagaccagaggggtaaccagattatgagtgataaacgcaatgtgatcctttttagcgtcttcgacgagaaccggtcctggtacttgaccgagaatatacaaaggttccttcccaaccccgcaggcgttcagttggaagaccctgagtttcaggccagcaatattatgcactcaatcaacggctatgtgtttgatagtctccagctttctgtttgcctccatgaagtagcctattggtacatcttgtcaattggtgctcaaacagacttcctctccgtcttcttctccggctacacctttaagcacaagatggtgtatgaggacactctcacactctttccattttctggagaaaccgtgttcatgagcatggagaatccaggcctttggatcttgggttgccacaacagtgattttcgcaatcggggaatgactgctctcctcaaagtcagcagctgtgataagaacacaggcgactattacgaagattcttacgaggacataagtgcctacttgttgtccaagaataacgccattgagcccagatcattctcccagaatcctcccgtgcttaaaaggcatcagcgcgaaatcaccagaactactcttcagtctgatcaagaggagattgactatgacgacaccataagcgtggaaatgaagaaggaggatttcgatatctatgacgaagatgagaaccagtctccgcggagctttcagaagaagacgcgacactacttcattgcagcagtcgaaaggctttgggactacggtatgtcatcatcccctcatgtgttgcgcaatagagctcagagtggaagtgttccacagttcaagaaagtcgtctttcaagagtttacagatggcagcttcacacagcctctctatcggggcgagcttaacgaacatttgggactccttggtccctatatccgagccgaagtggaggacaacattatggttacctttaggaatcaagcctctcgcccctacagcttctactcctccctcatcagttatgaggaggatcagagacaaggcgctgaaccacggaagaactttgtgaaaccgaatgagacgaagacctacttctggaaagtacagcaccacatggcccccacaaaagacgaattcgattgcaaagcatgggcgtatttttcagacgttgacttggagaaagatgtacattcaggacttattggtcctttgttggtgtgtcacactaacactctcaatccagcccatggcaggcaggtgacagtccaggaattcgctcttttctttaccatctttgatgagaccaagtcctggtacttcacggaaaacatggagcgcaattgcagagccccctgtaacatacagatggaggaccctacctttaaggaaaattatcggttccacgcaatcaacggatacattatggatacactccctggccttgtgatggctcaggaccaacgaatcaggtggtacctcctcagcatgggttctaatgagaacatacactccattcacttttcaggacatgtgttcactgtccggaagaaagaagagtataagatggccctctacaatttgtatccaggcgtgtttgagaccgttgaaatgcttccctctaaagctggcatctggagagtagagtgcttgatcggagaacatcttcacgcaggtatgagcaccttgttcctcgtgtacagcaacaaatgtcagaccccacttggcatggccagtggacacattcgcgactttcagatcacagcatctggccagtatggacaatgggccccaaagttggctcgcctccattactccggtagcataaatgcgtggtccactaaagaacctttcagctggattaaggtcgatcttcttgcccccatgatcatccacggcattaagacacagggagcgaggcagaaattctcctccctctacatctcacagttcattattatgtatagtttggacggcaagaagtggcaaacttatagaggtaacagtactggaacactcatggtgttcttcggcaacgttgatagctctggcatcaaacacaacatctttaatcctcccataatagctcggtacatcagattgcatccgacccactacagcattaggagtacactccgaatggagcttatgggttgcgacttgaattcctgttcaatgccactcggaatggagtctaaagccatctctgatgcacagataaccgccagtagctactttacgaacatgtttgctacgtggtcaccctctaaggcaaggcttcatttgcaaggccggtctaatgcctggagacctcaggtgaacaacccgaaagaatggctccaggtggactttcagaagaccatgaaagtaacaggtgtcactactcagggagttaagtccttgctcaccagcatgtatgtgaaggagttccttatttcctcatcacaagatggccaccagtggaccctcttctttcagaatggtaaggtcaaagtgtttcagggcaatcaagacagcttcacacccgtggtgaacagtcttgatcctccactcttgacacgataccttcgaatccatccacagtcttgggttcaccagattgcattgcgcatggaagtacttggatgcgaggctcaggacctctac

SEQ ID NO: 30 - protein, 1457 aa, synthetic construct
  REGION 1..1457: note = Variant of human B-domain deleted Factor VIII
MQIELSTCFFLCLLRFCFSATRRYYLGAVELSWDYMQSDLGELPVDARFPPRVPKSFPFNTSVVYKKTLFVEFTDHLFNIAKPRPPWMGLLGPTIQAEVYDTVVITLKNMASHPVSLHAVGVSYWKASEGAEYDDQTSQREKEDDKVFPGGSHTYVWQVLKENGPMASDPLCLTYSYLSHVDLVKDLNSGLIGALLVCREGSLAREKTQTLHKFILLFAVFDEGKSWHSETKNSLMQDRDAASARAWPKMHTVNGYVNRSLPGLIGCHRKSVYWHVIGMGTTPEVHSIFLEGHTFLVRNHRQASLEISPITFLTAQTLLMDLGQFLLFCHISSHQHDGMEAYVKVDSCPEEPQLRMKNNEEAEDYDDDLTDSEMDVVRFDDDNSPSFIQIRSVAKKHPKTWVHYIAAEEEDWDYAPLVLAPDDRSYKSQYLNNGPQRIGRKYKKVRFMAYTDETFKTREAIQHESGILGPLLYGEVGDTLLIIFKNQASRPYNIYPHGITDVRPLYSRRLPKGVKHLKDFPILPGEIFKYKWTVTVEDGPTKSDPRCLTRYYSSFVNMERDLASGLIGPLLICYKESVDQRGNQIMSDKRNVILFSVFDENRSWYLTENIQRFLPNPAGVQLEDPEFQASNIMHSINGYVFDSLQLSVCLHEVAYWYILSIGAQTDFLSVFFSGYTFKHKMVYEDTLTLFPFSGETVFMSMENPGLWILGCHNSDFRNRGMTALLKVSSCDKNTGDYYEDSYEDISAYLLSKNNAIEPRSFSQNPPVLKRHQREITRTTLQSDQEEIDYDDTISVEMKKEDFDIYDEDENQSPRSFQKKTRHYFIAAVERLWDYGMSSSPHVLRNRAQSGSVPQFKKVVFQEFTDGSFTQPLYRGELNEHLGLLGPYIRAEVEDNIMVTFRNQASRPYSFYSSLISYEEDQRQGAEPRKNFVKPNETKTYFWKVQHHMAPTKDEFDCKAWAYFSDVDLEKDVHSGLIGPLLVCHTNTLNPAHGRQVTVQEFALFFTIFDETKSWYFTENMERNCRAPCNIQMEDPTFKENYRFHAINGYIMDTLPGLVMAQDQRIRWYLLSMGSNENIHSIHFSGHVFTVRKKEEYKMALYNLYPGVFETVEMLPSKAGIWRVECLIGEHLHAGMSTLFLVYSNKCQTPLGMASGHIRDFQITASGQYGQWAPKLARLHYSGSINAWSTKEPFSWIKVDLLAPMIIHGIKTQGARQKFSSLYISQFIIMYSLDGKKWQTYRGNSTGTLMVFFGNVDSSGIKHNIFNPPIIARYIRLHPTHYSIRSTLRMELMGCDLNSCSMPLGMESKAISDAQITASSYFTNMFATWSPSKARLHLQGRSNAWRPQVNNPKEWLQVDFQKTMKVTGVTTQGVKSLLTSMYVKEFLISSSQDGHQWTLFFQNGKVKVFQGNQDSFTPVVNSLDPPLLTRYLRIHPQSWVHQIALRMEVLGCEAQDLY

SEQ ID NO: 31 - DNA, 4371 bp, synthetic construct
  misc_feature 1..4371: note = Variant of human B-domain deleted Factor VIII
  source 1..4371: mol_type = other DNA
atgcagattgaactgtctacctgcttcttcctctgtttgctgaggttctgctttagcgccactagacggtactaccttggcgctgtggagctgtcctgggactatatgcagagtgatttgggagagcttcccgtcgacgcacgatttcctcctcgcgttccaaagtcatttcccttcaacacaagcgtggtgtacaagaagacgctcttcgtcgaattcaccgatcacctgttcaatatcgccaaacccagaccaccatggatgggtcttttggggcctaccatacaagcggaggtgtatgacacagttgttatcactctcaagaacatggcttctcatccggtaagtcttcacgcagtgggcgtgtcctactggaaagcttcagaaggagccgagtatgatgatcagacatcccagagggagaaagaagacgacaaggtatttccaggtgggtctcatacctatgtgtggcaagtgctcaaagagaatggccctatggcaagcgatccgctctgtttgacttacagctacctttcacacgttgacctcgtcaaggacctcaactccgggttgattggagccttgttggtatgcagggaaggatctcttgccaaagagaagacacagaccctccacaagtttatccttctctttgctgtgttcgatgagggcaaaagttggcatagcgaaacgaagaattccctcatgcaggatcgcgacgcagccagcgccagagcttggcccaagatgcacactgtgaacggatatgtcaataggtcacttcctggcttgattgggtgtcatcggaaaagtgtctactggcacgtgatcggaatggggacaacaccagaggtccactccatatttctcgaaggccataccttccttgttcgaaaccacagacaggcatccttggagatctctcccattacctttctcactgcccaaacgctccttatggacttgggtcagttccttctcttctgccatatcagctcacaccagcatgatggtatggaagcttatgtgaaagtcgacagttgtcctgaggagccacagttgcgcatgaagaataatgaagaagccgaggattacgacgacgatctcaccgattctgagatggacgtggtgaggtttgatgacgacaactctccctccttcattcaaatccggagcgtggcgaagaaacaccccaagacttgggtccactatatagcggcggaagaggaggattgggattacgctcctcttgtattggcaccagatgaccgctcatacaaaagccagtacctcaacaacggaccgcagagaattggccggaagtataagaaagtgcgatttatggcctatacagacgaaacctttaagacaagggaggccatccagcatgagagtgggattttgggacctcttctttacggcgaagttggtgataccctcctcatcatcttcaagaatcaagcttctcgcccctataacatttacccacacgggatcactgacgttaggcctttgtatagcagaagacttcccaaaggcgtgaagcatctcaaagacttccccattttgccaggcgagatctttaagtacaaatggaccgtcacagtggaagatggaccgactaaatcagaccctcgatgccttacgcggtactattcctccttcgtgaatatggagagagatttggcaagcggactcataggaccactcctcatctgttacaaggaatctgtagaccagaggggtaaccagattatgagtgataaacgcaatgtgatcctttttagcgtcttcgacgagaaccggtcctggtacttgaccgagaatatacaaaggttccttcccaaccccgcaggcgttcagttggaagaccctgagtttcaggccagcaatattatgcactcaatcaacggctatgtgtttgatagtctccagctttctgtttgcctccatgaagtagcctattggtacatcttgtcaattggtgctcaaacagacttcctctccgtcttcttctccggctacacctttaagcacaagatggtgtatgaggacactctcacactctttccattttctggagaaaccgtgttcatgagcatggagaatccaggcctttggatcttgggttgccacaacagtgattttcgcaatcggggaatgactgctctcctcaaagtcagcagctgtgataagaacacaggcgactattacgaagattcttacgaggacataagtgcctacttgttgtccaagaataacgccattgagcccagatcattctcccagaatcctcccgtgcttaaaaggcatcagcgcgaaatcaccagaactactcttcagtctgatcaagaggagattgactatgacgacaccataagcgtggaaatgaagaaggaggatttcgatatctatgacgaagatgagaaccagtctccgcggagctttcagaagaagacgcgacactacttcattgcagcagtcgaaaggctttgggactacggtatgtcatcatcccctcatgtgttgcgcaatagagctcagagtggaagtgttccacagttcaagaaagtcgtctttcaagagtttacagatggcagcttcacacagcctctctatcggggcgagcttaacgaacatttgggactccttggtccctatatccgagccgaagtggaggacaacattatggttacctttaggaatcaagcctctcgcccctacagcttctactcctccctcatcagttatgaggaggatcagagacaaggcgctgaaccacggaagaactttgtgaaaccgaatgagacgaagacctacttctggaaagtacagcaccacatggcccccacaaaagacgaattcgattgcaaagcatgggcgtatttttcagacgttgacttggagaaagatgtacattcaggacttattggtcctttgttggtgtgtcacactaacactctcaatccagcccatggcaggcaggtgacagtccaggaattcgctcttttctttaccatctttgatgagaccaagtcctggtacttcacggaaaacatggagcgcaattgcagagccccctgtaacatacagatggaggaccctacctttaaggaaaattatcggttccacgcaatcaacggatacattatggatacactccctggccttgtgatggctcaggaccaacgaatcaggtggtacctcctcagcatgggttctaatgagaacatacactccattcacttttcaggacatgtgttcactgtccggaagaaagaagagtataagatggccctctacaatttgtatccaggcgtgtttgagaccgttgaaatgcttccctctaaagctggcatctggagagtagagtgcttgatcggagaacatcttcacgcaggtatgagcaccttgttcctcgtgtacagcaacaaatgtcagaccccacttggcatggccagtggacacattcgcgactttcagatcacagcatctggccagtatggacaatgggccccaaagttggctcgcctccattactccggtagcataaatgcgtggtccactaaagaacctttcagctggattaaggtcgatcttcttgcccccatgatcatccacggcattaagacacagggagcgaggcagaaattctcctccctctacatctcacagttcattattatgtatagtttggacggcaagaagtggcaaacttatagaggtaacagtactggaacactcatggtgttcttcggcaacgttgatagctctggcatcaaacacaactggtttaatcctcccataatagctcggtacatcagattgcatccgacccactacagcattaggagtacactccgaatggagcttatgggttgcgacttgaattcctgttcaatgccactcggaatggagtctaaagccatctctgatgcacagataaccgccagtagctactttacgaacatgtttgctacgtggtcaccctctaaggcaaggcttcatttgcaaggccggtctaatgcctggagacctcaggtgaacaacccgaaagaatggctccaggtggactttcagaagaccatgaaagtaacaggtgtcactactcagggagttaagtccttgctcaccagcatgtatgtgaaggagttccttatttcctcatcacaagatggccaccagtggaccctcttctttcagaatggtaaggtcaaagtgtttcagggcaatcaagacagcttcacacccgtggtgaacagtcttgatcctccactcttgacacgataccttcgaatccatccacagtcttgggttcaccagattgcattgcgcatggaagtacttggatgcgaggctcaggacctctac

SEQ ID NO: 32 - protein, 1457 aa, synthetic construct
  REGION 1..1457: note = Variant of human B-domain deleted Factor VIII
MQIELSTCFFLCLLRFCFSATRRYYLGAVELSWDYMQSDLGELPVDARFPPRVPKSFPFNTSVVYKKTLFVEFTDHLFNIAKPRPPWMGLLGPTIQAEVYDTVVITLKNMASHPVSLHAVGVSYWKASEGAEYDDQTSQREKEDDKVFPGGSHTYVWQVLKENGPMASDPLCLTYSYLSHVDLVKDLNSGLIGALLVCREGSLAKEKTQTLHKFILLFAVFDEGKSWHSETKNSLMQDRDAASARAWPKMHTVNGYVNRSLPGLIGCHRKSVYWHVIGMGTTPEVHSIFLEGHTFLVRNHRQASLEISPITFLTAQTLLMDLGQFLLFCHISSHQHDGMEAYVKVDSCPEEPQLRMKNNEEAEDYDDDLTDSEMDVVRFDDDNSPSFIQIRSVAKKHPKTWVHYIAAEEEDWDYAPLVLAPDDRSYKSQYLNNGPQRIGRKYKKVRFMAYTDETFKTREAIQHESGILGPLLYGEVGDTLLIIFKNQASRPYNIYPHGITDVRPLYSRRLPKGVKHLKDFPILPGEIFKYKWTVTVEDGPTKSDPRCLTRYYSSFVNMERDLASGLIGPLLICYKESVDQRGNQIMSDKRNVILFSVFDENRSWYLTENIQRFLPNPAGVQLEDPEFQASNIMHSINGYVFDSLQLSVCLHEVAYWYILSIGAQTDFLSVFFSGYTFKHKMVYEDTLTLFPFSGETVFMSMENPGLWILGCHNSDFRNRGMTALLKVSSCDKNTGDYYEDSYEDISAYLLSKNNAIEPRSFSQNPPVLKRHQREITRTTLQSDQEEIDYDDTISVEMKKEDFDIYDEDENQSPRSFQKKTRHYFIAAVERLWDYGMSSSPHVLRNRAQSGSVPQFKKVVFQEFTDGSFTQPLYRGELNEHLGLLGPYIRAEVEDNIMVTFRNQASRPYSFYSSLISYEEDQRQGAEPRKNFVKPNETKTYFWKVQHHMAPTKDEFDCKAWAYFSDVDLEKDVHSGLIGPLLVCHTNTLNPAHGRQVTVQEFALFFTIFDETKSWYFTENMERNCRAPCNIQMEDPTFKENYRFHAINGYIMDTLPGLVMAQDQRIRWYLLSMGSNENIHSIHFSGHVFTVRKKEEYKMALYNLYPGVFETVEMLPSKAGIWRVECLIGEHLHAGMSTLFLVYSNKCQTPLGMASGHIRDFQITASGQYGQWAPKLARLHYSGSINAWSTKEPFSWIKVDLLAPMIIHGIKTQGARQKFSSLYISQFIIMYSLDGKKWQTYRGNSTGTLMVFFGNVDSSGIKHNWFNPPIIARYIRLHPTHYSIRSTLRMELMGCDLNSCSMPLGMESKAISDAQITASSYFTNMFATWSPSKARLHLQGRSNAWRPQVNNPKEWLQVDFQKTMKVTGVTTQGVKSLLTSMYVKEFLISSSQDGHQWTLFFQNGKVKVFQGNQDSFTPVVNSLDPPLLTRYLRIHPQSWVHQIALRMEVLGCEAQDLY

SEQ ID NO: 33 - DNA, 4371 bp, synthetic construct
  misc_feature 1..4371: note = Variant of human B-domain deleted Factor VIII
  source 1..4371: mol_type = other DNA
atgcagattgaactgtctacctgcttcttcctctgtttgctgaggttctgctttagcgccactagacggtactaccttggcgctgtggagctgtcctgggactatatgcagagtgatttgggagagcttcccgtcgacgcacgatttcctcctcgcgttccaaagtcatttcccttcaacacaagcgtggtgtacaagaagacgctcttcgtcgaattcaccgatcacctgttcaatatcgccaaacccagaccaccatggatgggtcttttggggcctaccatacaagcggaggtgtatgacacagttgttatcactctcaagaacatggcttctcatccggtaagtcttcacgcagtgggcgtgtcctactggaaagcttcagaaggagccgagtatgatgatcagacatcccagagggagaaagaagacgacaaggtatttccaggtgggtctcatacctatgtgtggcaagtgctcaaagagaatggccctatggcaagcgatccgctctgtttgacttacagctacctttcacacgttgacctcgtcaaggacctcaactccgggttgattggagccttgttggtatgcagggaaggatctcttgccaaagagaagacacagaccctccacaagtttatccttctctttgctgtgttcgatgagggcaaaagttggcatagcgaaacgaagaattccctcatgcaggatcgcgacgcagccagcgccagagcttggcccaagatgcacactgtgaacggatatgtcaataggtcacttcctggcttgattgggtgtcatcggaaaagtgtctactggcacgtgatcggaatggggacaacaccagaggtccactccatatttctcgaaggccataccttccttgttcgaaaccacagacaggcatccttggagatctctcccattacctttctcactgcccaaacgctccttatggacttgggtcagttccttctcttctgccatatcagctcacaccagcatgatggtatggaagcttatgtgaaagtcgacagttgtcctgaggagccacagttgcgcatgaagaataatgaagaagccgaggattacgacgacgatctcaccgattctgagatggacgtggtgaggtttgatgacgacaactctccctccttcattcaaatccggagcgtggcgaagaaacaccccaagacttgggtccactatatagcggcggaagaggaggattgggattacgctcctcttgtattggcaccagatgaccgctcatacaaaagccagtacctcaacaacggaccgcagagaattggccggaagtataagaaagtgcgatttatggcctatacagacgaaacctttaagacaagggaggccatccagcatgagagtgggattttgggacctcttctttacggcgaagttggtgataccctcctcatcatcttcaagaatcaagcttctcgcccctataacatttacccacacgggatcactgacgttaggcctttgtatagcagaagacttcccaaaggcgtgaagcatctcaaagacttccccattttgccaggcgagatctttaagtacaaatggaccgtcacagtggaagatggaccgactaaatcagaccctcgatgccttacgcggtactattcctccttcgtgaatatggagagagatttggcaagcggactcataggaccactcctcatctgttacaaggaatctgtagaccagaggggtaaccagattatgagtgataaacgcaatgtgatcctttttagcgtcttcgacgagaaccggtcctggtacttgaccgagaatatacaaaggttccttcccaaccccgcaggcgttcagttggaagaccctgagtttcaggccagcaatattatgcactcaatcaacggctatgtgtttgatagtctccagctttctgtttgcctccatgaagtagcctattggtacatcttgtcaattggtgctcaaacagacttcctctccgtcttcttctccggctacacctttaagcacaagatggtgtatgaggacactctcacactctttccattttctggagaaaccgtgttcatgagcatggagaatccaggcctttggatcttgggttgccacaacagtgattttcgcaatcggggaatgactgctctcctcaaagtcagcagctgtgataagaacacaggcgactattacgaagattcttacgaggacataagtgcctacttgttgtccaagaataacgccattgagcccagatcattctcccagaatcctcccgtgcttaaaaggcatcagcgcgaaatcaccagaactactcttcagtctgatcaagaggagattgactatgacgacaccataagcgtggaaccgaagaaggaggatttcgatatctatgacgaagatgagaaccagtctccgcggagctttcagaagaagacgcgacactacttcattgcagcagtcgaaaggctttgggactacggtatgtcatcatcccctcatgtgttgcgcaatagagctcagagtggaagtgttccacagttcaagaaagtcgtctttcaagagtttacagatggcagcttcacacagcctctctatcggggcgagcttaacgaacatttgggactccttggtccctatatccgagccgaagtggaggacaacattatggttacctttaggaatcaagcctctcgcccctacagcttctactcctccctcatcagttatgaggaggatcagagacaaggcgctgaaccacggaagaactttgtgaaaccgaatgagacgaagacctacttctggaaagtacagcaccacatggcccccacaaaagacgaattcgattgcaaagcatgggcgtatttttcagacgttgacttggagaaagatgtacattcaggacttattggtcctttgttggtgtgtcacactaacactctcaatccagcccatggcaggcaggtgacagtccaggaattcgctcttttctttaccatctttgatgagaccaagtcctggtacttcacggaaaacatggagcgcaattgcagagccccctgtaacatacagatggaggaccctacctttaaggaaaattatcggttccacgcaatcaacggatacattatggatacactccctggccttgtgatggctcaggaccaacgaatcaggtggtacctcctcagcatgggttctaatgagaacatacactccattcacttttcaggacatgtgttcactgtccggaagaaagaagagtataagatggccctctacaatttgtatccaggcgtgtttgagaccgttgaaatgcttccctctaaagctggcatctggagagtagagtgcttgatcggagaacatcttcacgcaggtatgagcaccttgttcctcgtgtacagcaacaaatgtcagaccccacttggcatggccagtggacacattcgcgactttcagatcacagcatctggccagtatggacaatgggccccaaagttggctcgcctccattactccggtagcataaatgcgtggtccactaaagaacctttcagctggattaaggtcgatcttcttgcccccatgatcatccacggcattaagacacagggagcgaggcagaaattctcctccctctacatctcacagttcattattatgtatagtttggacggcaagaagtggcaaacttatagaggtaacagtactggaacactcatggtgttcttcggcaacgttgatagctctggcatcaaacacaacatctttaatcctcccataatagctcggtacatcagattgcatccgacccactacagcattaggagtacactccgaatggagcttatgggttgcgacttgaattcctgttcaatgccactcggaatggagtctaaagccatctctgatgcacagataaccgccagtagctactttacgaacatgtttgctacgtggtcaccctctaaggcaaggcttcatttgcaaggccggtctaatgcctggagacctcaggtgaacaacccgaaagaatggctccaggtggactttcagaagaccatgaaagtaacaggtgtcactactcagggagttaagtccttgctcaccagcatgtatgtgaaggagttccttatttcctcatcacaagatggccaccagtggaccctcttctttcagaatggtaaggtcaaagtgtttcagggcaatcaagacagcttcacacccgtggtgaacagtcttgatcctccactcttgacacgataccttcgaatccatccacagtcttgggttcaccagattgcattgcgcatggaagtacttggatgcgaggctcaggacctctac

SEQ ID NO: 34 - protein, 1457 aa, synthetic construct
  REGION 1..1457: note = Variant of human B-domain deleted Factor VIII
MQIELSTCFFLCLLRFCFSATRRYYLGAVELSWDYMQSDLGELPVDARFPPRVPKSFPFNTSVVYKKTLFVEFTDHLFNIAKPRPPWMGLLGPTIQAEVYDTVVITLKNMASHPVSLHAVGVSYWKASEGAEYDDQTSQREKEDDKVFPGGSHTYVWQVLKENGPMASDPLCLTYSYLSHVDLVKDLNSGLIGALLVCREGSLAKEKTQTLHKFILLFAVFDEGKSWHSETKNSLMQDRDAASARAWPKMHTVNGYVNRSLPGLIGCHRKSVYWHVIGMGTTPEVHSIFLEGHTFLVRNHRQASLEISPITFLTAQTLLMDLGQFLLFCHISSHQHDGMEAYVKVDSCPEEPQLRMKNNEEAEDYDDDLTDSEMDVVRFDDDNSPSFIQIRSVAKKHPKTWVHYIAAEEEDWDYAPLVLAPDDRSYKSQYLNNGPQRIGRKYKKVRFMAYTDETFKTREAIQHESGILGPLLYGEVGDTLLIIFKNQASRPYNIYPHGITDVRPLYSRRLPKGVKHLKDFPILPGEIFKYKWTVTVEDGPTKSDPRCLTRYYSSFVNMERDLASGLIGPLLICYKESVDQRGNQIMSDKRNVILFSVFDENRSWYLTENIQRFLPNPAGVQLEDPEFQASNIMHSINGYVFDSLQLSVCLHEVAYWYILSIGAQTDFLSVFFSGYTFKHKMVYEDTLTLFPFSGETVFMSMENPGLWILGCHNSDFRNRGMTALLKVSSCDKNTGDYYEDSYEDISAYLLSKNNAIEPRSFSQNPPVLKRHQREITRTTLQSDQEEIDYDDTISVEPKKEDFDIYDEDENQSPRSFQKKTRHYFIAAVERLWDYGMSSSPHVLRNRAQSGSVPQFKKVVFQEFTDGSFTQPLYRGELNEHLGLLGPYIRAEVEDNIMVTFRNQASRPYSFYSSLISYEEDQRQGAEPRKNFVKPNETKTYFWKVQHHMAPTKDEFDCKAWAYFSDVDLEKDVHSGLIGPLLVCHTNTLNPAHGRQVTVQEFALFFTIFDETKSWYFTENMERNCRAPCNIQMEDPTFKENYRFHAINGYIMDTLPGLVMAQDQRIRWYLLSMGSNENIHSIHFSGHVFTVRKKEEYKMALYNLYPGVFETVEMLPSKAGIWRVECLIGEHLHAGMSTLFLVYSNKCQTPLGMASGHIRDFQITASGQYGQWAPKLARLHYSGSINAWSTKEPFSWIKVDLLAPMIIHGIKTQGARQKFSSLYISQFIIMYSLDGKKWQTYRGNSTGTLMVFFGNVDSSGIKHNIFNPPIIARYIRLHPTHYSIRSTLRMELMGCDLNSCSMPLGMESKAISDAQITASSYFTNMFATWSPSKARLHLQGRSNAWRPQVNNPKEWLQVDFQKTMKVTGVTTQGVKSLLTSMYVKEFLISSSQDGHQWTLFFQNGKVKVFQGNQDSFTPVVNSLDPPLLTRYLRIHPQSWVHQIALRMEVLGCEAQDLY

SEQ ID NO: 35 - DNA, 4371 bp, synthetic construct
  misc_feature 1..4371: note = Variant of human B-domain deleted Factor VIII
  source 1..4371: mol_type = other DNA
atgcagattgaactgtctacctgcttcttcctctgtttgctgaggttctgctttagcgccactagacggtactaccttggcgctgtggagctgtcctgggactatatgcagagtgatttgggagagcttcccgtcgacgcacgatttcctcctcgcgttccaaagtcatttcccttcaacacaagcgtggtgtacaagaagacgctcttcgtcgaattcaccgatcacctgttcaatatcgccaaacccagaccaccatggatgggtcttttggggcctaccatacaagcggaggtgtatgacacagttgttatcactctcaagaacatggcttctcatccggtaagtcttcacgcagtgggcgtgtcctactggaaagcttcagaaggagccgagtatgatgatcagacatcccagagggagaaagaagacgacaaggtatttccaggtgggtctcatacctatgtgtggcaagtgctcaaagagaatggccctatggcaagcgatccgctctgtttgacttacagctacctttcacacgttgacctcgtcaaggacctcaactccgggttgattggagccttgttggtatgcagggaaggatctcttgccaaagagaagacacagaccctccacaagtttatccttctctttgctgtgttcgatgagggcaaaagttggcatagcgaaacgaagaattccctcatgcaggatcgcgacgcagccagcgccagagcttggcccaagatgcacactgtgaacggatatgtcaataggtcacttcctggcttgattgggtgtcatcggaaaagtgtctactggcacgtgatcggaatggggacaacaccagaggtccactccatatttctcgaaggccataccttccttgttcgaaaccacagacaggcatccttggagatctctcccattacctttctcactgcccaaacgctccttatggacttgggtcagttccttctcttctgccatatcagctcacaccagcatgatggtatggaagcttatgtgaaagtcgacagttgtcctgaggagccacagttgcgcatgaagaataatgaagaagccgaggattacgacgacgatctcaccgattctgagatggacgtggtgaggtttgatgacgacaactctccctccttcattcaaatccggagcgtggcgaagaaacaccccaagacttgggtccactatatagcggcggaagaggaggattgggattacgctcctcttgtattggcaccagatgaccgctcatacaaaagccagtacctcaacaacggaccgcagagaattggccggaagtataagaaagtgcgatttatggcctatacagacgaaacctttaagacaagggaggccatccagcatgagagtgggattttgggacctcttctttacggcgaagttggtgataccctcctcatcatcttcaagaatcaagcttctcgcccctataacatttacccacacgggatcactgacgttaggcctttgtatagcagaagacttcccaaaggcgtgaagcatctcaaagacttccccattttgccaggcgagatctttaagtacaaatggaccgtcacagtggaagatggaccgactaaatcagaccctcgatgccttacgcggtactattcctccttcgtgaatatggagagagatttggcaagcggactcataggaccactcctcatctgttacaaggaatctgtagaccagaggggtaaccagattatgagtgataaacgcaatgtgatcctttttagcgtcttcgacgagaaccggtcctggtacttgaccgagaatatacaaaggttccttcccaaccccgcaggcgttcagttggaagaccctgagtttcaggccagcaatattatgcactcaatcaacggctatgtgtttgatagtctccagctttctgtttgcctccatgaagtagcctattggtacatcttgtcaattggtgctcaaacagacttcctctccgtcttcttctccggctacacctttaagcacaagatggtgtatgaggacactctcacactctttccattttctggagaaaccgtgttcatgagcatggagaatccaggcctttggatcttgggttgccacaacagtgattttcgcaatcggggaatgactgctctcctcaaagtcagcagctgtgataagaacacaggcgactattacgaagattcttacgaggacataagtgcctacttgttgtccaagaataacgccattgagcccagatcattctcccagaatcctcccgtgcttaaaaggcatcagcgcgaaatcaccagaactactcttcagtctgatcaagaggagattgactatgacgacaccataagcgtggaaatgaagaaggaggatttcgatatctatgacgaagatgagaaccagtctccgcggagctttcagaagaagacgcgacactacttcattgcagcagtcgaaaggctttgggactacggtatgtcatcatcccctcatgtgttgcgcaatagagctcagagtggaagtgttccacagttcaagaaagtcgtctttcaagagtttacagatggcagcttcacacagcctctctatcggggcgagcttaacgaacatttgggactccttggtccctatatccgagccgaagtggaggacaacattatggttacctttaggaatcaagcctctcgcccctacagcttctactcctccctcatcagttatgaggaggatcagagacaaggcgctgaaccacggaagaactttgtgaaaccgaatgagacgaagacctacttctggaaagtacagcaccacatggcccccacaaaagacgaattcgattgcaaagcatgggcgtatttttcagacgttgacttggagaaagatgtacattcaggacttattggtcctttgttggtgtgtcacactaacactctcaatccagcccatggcaggcaggtgacagtccaggaattcgctcttttctttaccatctttgatgagaccaagtcctggtacttcacggaaaacatggagcgcaattgcagagccccctgtaacatacagatggaggaccctacctttaaggaaaattatcggttccacgcaatcaacggatacattatggatacactccctggccttgtgatggctcaggaccaacgaatcaggtggtacctcctcagcatgggttctaatgagaacatacactccattcacttttcaggacatgtgttcactgtccggaagaaagaagagtataagatggccctctacaatttgtatccaggcgtgtttgagaccgttgaaatgcttccctctaaagctggcatctggagagtagagtgcttgatcggagaacatcttcacgcaggtatgagcaccttgttcctcgtgtacagcaacaaatgtcagaccccacttggcatggccagtggacacattcgcgactttcagatcacagcatctggccagtatggacaatgggccccaaagttggctcgcctccattactccggtagcataaatgcgtggtccactaaagaacctttcagctggattaaggtcgatcttcttgcccccatgatcatccacggcattaagacacagggagcgaggcagaaattctcctccctctacatctcacagttcattattatgtatagtttggacggcaagaagtggcaaacttatagaggtaacagtactggaacatctatggtgttcttcggcaacgttgatagctctggcatcaaacacaacatctttaatcctcccataatagctcggtacatcagattgcatccgacccactacagcattaggagtacactccgaatggagcttatgggttgcgacttgaattcctgttcaatgccactcggaatggagtctaaagccatctctgatgcacagataaccgccagtagctactttacgaacatgtttgctacgtggtcaccctctaaggcaaggcttcatttgcaaggccggtctaatgcctggagacctcaggtgaacaacccgaaagaatggctccaggtggactttcagaagaccatgaaagtaacaggtgtcactactcagggagttaagtccttgctcaccagcatgtatgtgaaggagttccttatttcctcatcacaagatggccaccagtggaccctcttctttcagaatggtaaggtcaaagtgtttcagggcaatcaagacagcttcacacccgtggtgaacagtcttgatcctccactcttgacacgataccttcgaatccatccacagtcttgggttcaccagattgcattgcgcatggaagtacttggatgcgaggctcaggacctctac

SEQ ID NO: 36 - protein, 1457 aa, synthetic construct
  REGION 1..1457: note = Variant of human B-domain deleted Factor VIII
MQIELSTCFFLCLLRFCFSATRRYYLGAVELSWDYMQSDLGELPVDARFPPRVPKSFPFNTSVVYKKTLFVEFTDHLFNIAKPRPPWMGLLGPTIQAEVYDTVVITLKNMASHPVSLHAVGVSYWKASEGAEYDDQTSQREKEDDKVFPGGSHTYVWQVLKENGPMASDPLCLTYSYLSHVDLVKDLNSGLIGALLVCREGSLAKEKTQTLHKFILLFAVFDEGKSWHSETKNSLMQDRDAASARAWPKMHTVNGYVNRSLPGLIGCHRKSVYWHVIGMGTTPEVHSIFLEGHTFLVRNHRQASLEISPITFLTAQTLLMDLGQFLLFCHISSHQHDGMEAYVKVDSCPEEPQLRMKNNEEAEDYDDDLTDSEMDVVRFDDDNSPSFIQIRSVAKKHPKTWVHYIAAEEEDWDYAPLVLAPDDRSYKSQYLNNGPQRIGRKYKKVRFMAYTDETFKTREAIQHESGILGPLLYGEVGDTLLIIFKNQASRPYNIYPHGITDVRPLYSRRLPKGVKHLKDFPILPGEIFKYKWTVTVEDGPTKSDPRCLTRYYSSFVNMERDLASGLIGPLLICYKESVDQRGNQIMSDKRNVILFSVFDENRSWYLTENIQRFLPNPAGVQLEDPEFQASNIMHSINGYVFDSLQLSVCLHEVAYWYILSIGAQTDFLSVFFSGYTFKHKMVYEDTLTLFPFSGETVFMSMENPGLWILGCHNSDFRNRGMTALLKVSSCDKNTGDYYEDSYEDISAYLLSKNNAIEPRSFSQNPPVLKRHQREITRTTLQSDQEEIDYDDTISVEMKKEDFDIYDEDENQSPRSFQKKTRHYFIAAVERLWDYGMSSSPHVLRNRAQSGSVPQFKKVVFQEFTDGSFTQPLYRGELNEHLGLLGPYIRAEVEDNIMVTFRNQASRPYSFYSSLISYEEDQRQGAEPRKNFVKPNETKTYFWKVQHHMAPTKDEFDCKAWAYFSDVDLEKDVHSGLIGPLLVCHTNTLNPAHGRQVTVQEFALFFTIFDETKSWYFTENMERNCRAPCNIQMEDPTFKENYRFHAINGYIMDTLPGLVMAQDQRIRWYLLSMGSNENIHSIHFSGHVFTVRKKEEYKMALYNLYPGVFETVEMLPSKAGIWRVECLIGEHLHAGMSTLFLVYSNKCQTPLGMASGHIRDFQITASGQYGQWAPKLARLHYSGSINAWSTKEPFSWIKVDLLAPMIIHGIKTQGARQKFSSLYISQFIIMYSLDGKKWQTYRGNSTGTSMVFFGNVDSSGIKHNIFNPPIIARYIRLHPTHYSIRSTLRMELMGCDLNSCSMPLGMESKAISDAQITASSYFTNMFATWSPSKARLHLQGRSNAWRPQVNNPKEWLQVDFQKTMKVTGVTTQGVKSLLTSMYVKEFLISSSQDGHQWTLFFQNGKVKVFQGNQDSFTPVVNSLDPPLLTRYLRIHPQSWVHQIALRMEVLGCEAQDLY

SEQ ID NO: 37 - DNA, 4371 bp, synthetic construct
  misc_feature 1..4371: note = Variant of human B-domain deleted Factor VIII
  source 1..4371: mol_type = other DNA
atgcagattgaactgtctacctgcttcttcctctgtttgctgaggttctgctttagcgccactagacggtactaccttggcgctgtggagctgtcctgggactatatgcagagtgatttgggagagcttcccgtcgacgcacgatttcctcctcgcgttccaaagtcatttcccttcaacacaagcgtggtgtacaagaagacgctcttcgtcgaattcaccgatcacctgttcaatatcgccaaacccagaccaccatggatgggtcttttggggcctaccatacaagcggaggtgtatgacacagttgttatcactctcaagaacatggcttctcatccggtaagtcttcacgcagtgggcgtgtcctactggaaagcttcagaaggagccgagtatgatgatcagacatcccagagggagaaagaagacgacaaggtatttccaggtgggtctcatacctatgtgtggcaagtgctcaaagagaatggccctatggcaagcgatccgctctgtttgacttacagctacctttcacacgttgacctcgtcaaggacctcaactccgggttgattggagccttgttggtatgcagggaaggatctcttgccaaagagaagacacagaccctccacaagtttatccttctctttgctgtgttcgatgagggcaaaagttggcatagcgaaacgaagaattccctcatgcaggatcgcgacgcagccagcgccagagcttggcccaagatgcacactgtgaacggatatgtcaataggtcacttcctggcttgattgggtgtcatcggaaaagtgtctactggcacgtgatcggaatggggacaacaccagaggtccactccatatttctcgaaggccataccttccttgttcgaaaccacagacaggcatccttggagatctctcccattacctttctcactgcccaaacgctccttatggacttgggtcagttccttctcttctgccatatcagctcacaccagcatgatggtatggaagcttatgtgaaagtcgacagttgtcctgaggagccacagttgcgcatgaagaataatgaagaagccgaggattacgacgacgatctcaccgattctgagatggacgtggtgaggtttgatgacgacaactctccctccttcattcaaatccggagcgtggcgaagaaacaccccaagacttgggtccactatatagcggcggaagaggaggattgggattacgctcctcttgtattggcaccagatgaccgctcatacaaaagccagtacctcaacaacggaccgcagagaattggccggaagtataagaaagtgcgatttatggcctatacagacgaaacctttaagacaagggaggccatccagcatgagagtgggattttgggacctcttctttacggcgaagttggtgataccctcctcatcatcttcaagaatcaagcttctcgcccctataacatttacccacacgggatcactgacgttaggcctttgtatagcagaagacttcccaaaggcgtgaagcatctcaaagacttccccattttgccaggcgagatctttaagtacaaatggaccgtcacagtggaagatggaccgactaaatcagaccctcgatgccttacgcggtactattcctccttcgtgaatatggagagagatttggcaagcggactcataggaccactcctcatctgttacaaggaatctgtagaccagaggggtaaccagattatgagtgataaacgcaatgtgatcctttttagcgtcttcgacgagaaccggtcctggtacttgaccgagaatatacaaaggttccttcccaaccccgcaggcgttcagttggaagaccctgagtttcaggccagcaatattatgcactcaatcaacggctatgtgtttgatagtctccagctttctgtttgcctccatgaagtagcctattggtacatcttgtcaattggtgctcaaacagacttcctctccgtcttcttctccggctacacctttaagcacaagatggtgtatgaggacactctcacactctttccattttctggagaaaccgtgttcatgagcatggagaatccaggcctttggatcttgggttgccacaacagtgattttcgcaatcggggaatgactgctctcctcaaagtcagcagctgtgataagaacacaggcgactattacgaagattcttacgaggacataagtgcctacttgttgtccaagaataacgccattgagcccagatcattctcccagaatcctcccgtgcttaaaaggcatcagcgcgaaatcaccagaactactcttcagtctgatcaagaggagattgactatgacgacaccataagcgtggaaatgaagaaggaggatttcgatatctatgacgaagatgagaaccagtctccgcggagctttcagaagaagacgcgacactacttcattgcagcagtcgaaaggctttgggactacggtatgtcatcatcccctcatgtgttgcgcaatagagctcagagtggaagtgttccacagttcaagaaagtcgtctttcaagagtttacagatggcagcttcacacagcctctctatcggggcgagcttaacgaacatttgggactccttggtccctatatccgagccgaagtggaggacaacattatggttacctttaggaatcaagcctctcgcccctacagcttctactcctccctcatcagttatgaggaggatcagagacaaggcgctgaaccacggaagaactttgtgaaaccgaatgagacgaagacctacttctggaaagtacagcaccacatggcccccacaaaagacgaattcgattgcaaagcatgggcgtatttttcagacgttgacttggagaaagatgtacattcaggacttattggtcctttgttggtgtgtcacactaacactctcaatccagcccatggcaggcaggtgacagtccaggaattcgctcttttctttaccatctttgatgagaccaagtcctggtacttcacggaaaacatggagcgcaattgcagagccccctgtaacatacagatggaggaccctacctttaaggaaaattatcggttccacgcaatcaacggatacattatggatacactccctggccttgtgatggctcaggaccaacgaatcaggtggtacctcctcagcatgggttctaatgagaacatacactccattcacttttcaggacatgtgttcactgtccggaagaaagaagagtataagatggccctctacaatttgtatccaggcgtgtttgagaccgttgaaatgcttccctctaaagctggcatctggagagtagagtgcttgatcggagaacatcttcacgcaggtatgagcaccttgttcctcgtgtacagcaacaaatgtcagaccccacttggcatggccagtggacacattcgcgactttcagatcacagcatctggccagtatggacaatgggccccaaagttggctcgcctccattactccggtagcataaatgcgtggtccactaaagaacctttcagctggattaaggtcgatcttcttgcccccatgatcatccacggcattaagacacagggagcgaggcagaaattctcctccctctacatctcacagttcattattatgtatagtttggacggcaagaagtggcaaacttatagaggtaacagtactggaacactcatggtgttcttcggcaacgttgatagctctggcatcaaacacaaccgttttaatcctcccataatagctcggtacatcagattgcatccgacccactacagcattaggagtacactccgaatggagcttatgggttgcgacttgaattcctgttcaatgccactcggaatggagtctaaagccatctctgatgcacagataaccgccagtagctactttacgaacatgtttgctacgtggtcaccctctaaggcaaggcttcatttgcaaggccggtctaatgcctggagacctcaggtgaacaacccgaaagaatggctccaggtggactttcagaagaccatgaaagtaacaggtgtcactactcagggagttaagtccttgctcaccagcatgtatgtgaaggagttccttatttcctcatcacaagatggccaccagtggaccctcttctttcagaatggtaaggtcaaagtgtttcagggcaatcaagacagcttcacacccgtggtgaacagtcttgatcctccactcttgacacgataccttcgaatccatccacagtcttgggttcaccagattgcattgcgcatggaagtacttggatgcgaggctcaggacctctac

SEQ ID NO: 38 - protein, 1457 aa, synthetic construct
  REGION 1..1457: note = Variant of human B-domain deleted Factor VIII
MQIELSTCFFLCLLRFCFSATRRYYLGAVELSWDYMQSDLGELPVDARFPPRVPKSFPFNTSVVYKKTLFVEFTDHLFNIAKPRPPWMGLLGPTIQAEVYDTVVITLKNMASHPVSLHAVGVSYWKASEGAEYDDQTSQREKEDDKVFPGGSHTYVWQVLKENGPMASDPLCLTYSYLSHVDLVKDLNSGLIGALLVCREGSLAKEKTQTLHKFILLFAVFDEGKSWHSETKNSLMQDRDAASARAWPKMHTVNGYVNRSLPGLIGCHRKSVYWHVIGMGTTPEVHSIFLEGHTFLVRNHRQASLEISPITFLTAQTLLMDLGQFLLFCHISSHQHDGMEAYVKVDSCPEEPQLRMKNNEEAEDYDDDLTDSEMDVVRFDDDNSPSFIQIRSVAKKHPKTWVHYIAAEEEDWDYAPLVLAPDDRSYKSQYLNNGPQRIGRKYKKVRFMAYTDETFKTREAIQHESGILGPLLYGEVGDTLLIIFKNQASRPYNIYPHGITDVRPLYSRRLPKGVKHLKDFPILPGEIFKYKWTVTVEDGPTKSDPRCLTRYYSSFVNMERDLASGLIGPLLICYKESVDQRGNQIMSDKRNVILFSVFDENRSWYLTENIQRFLPNPAGVQLEDPEFQASNIMHSINGYVFDSLQLSVCLHEVAYWYILSIGAQTDFLSVFFSGYTFKHKMVYEDTLTLFPFSGETVFMSMENPGLWILGCHNSDFRNRGMTALLKVSSCDKNTGDYYEDSYEDISAYLLSKNNAIEPRSFSQNPPVLKRHQREITRTTLQSDQEEIDYDDTISVEMKKEDFDIYDEDENQSPRSFQKKTRHYFIAAVERLWDYGMSSSPHVLRNRAQSGSVPQFKKVVFQEFTDGSFTQPLYRGELNEHLGLLGPYIRAEVEDNIMVTFRNQASRPYSFYSSLISYEEDQRQGAEPRKNFVKPNETKTYFWKVQHHMAPTKDEFDCKAWAYFSDVDLEKDVHSGLIGPLLVCHTNTLNPAHGRQVTVQEFALFFTIFDETKSWYFTENMERNCRAPCNIQMEDPTFKENYRFHAINGYIMDTLPGLVMAQDQRIRWYLLSMGSNENIHSIHFSGHVFTVRKKEEYKMALYNLYPGVFETVEMLPSKAGIWRVECLIGEHLHAGMSTLFLVYSNKCQTPLGMASGHIRDFQITASGQYGQWAPKLARLHYSGSINAWSTKEPFSWIKVDLLAPMIIHGIKTQGARQKFSSLYISQFIIMYSLDGKKWQTYRGNSTGTLMVFFGNVDSSGIKHNRFNPPIIARYIRLHPTHYSIRSTLRMELMGCDLNSCSMPLGMESKAISDAQITASSYFTNMFATWSPSKARLHLQGRSNAWRPQVNNPKEWLQVDFQKTMKVTGVTTQGVKSLLTSMYVKEFLISSSQDGHQWTLFFQNGKVKVFQGNQDSFTPVVNSLDPPLLTRYLRIHPQSWVHQIALRMEVLGCEAQDLY

SEQ ID NO: 39 - DNA, 4371 bp, synthetic construct
  misc_feature 1..4371: note = Variant of human B-domain deleted Factor VIII
  source 1..4371: mol_type = other DNA
atgcagattgaactgtctacctgcttcttcctctgtttgctgaggttctgctttagcgccactagacggtactaccttggcgctgtggagctgtcctgggactatatgcagagtgatttgggagagcttcccgtcgacgcacgatttcctcctcgcgttccaaagtcatttcccttcaacacaagcgtggtgtacaagaagacgctcttcgtcgaattcaccgatcacctgttcaatatcgccaaacccagaccaccatggatgggtcttttggggcctaccatacaagcggaggtgtatgacacagttgttatcactctcaagaacatggcttctcatccggtaagtcttcacgcagtgggcgtgtcctactggaaagcttcagaaggagccgagtatgatgatcagacatcccagagggagaaagaagacgacaaggtatttccaggtgggtctcatacctatgtgtggcaagtgctcaaagagaatggccctatggcaagcgatccgctctgtttgacttacagctacctttcacacgttgacctcgtcaaggacctcaactccgggttgattggagccttgttggtatgcagggaaggatctcttgccaaagagaagacacagaccctccacaagtttatccttctctttgctgtgttcgatgagggcaaaagttggcatagcgaaacgaagaattccctcatgcaggatcgcgacgcagccagcgccagagcttggcccaagatgcacactgtgaacggatatgtcaataggtcacttcctggcttgattgggtgtcatcggaaaagtgtctactggcacgtgatcggaatggggacaacaccagaggtccactccatatttctcgaaggccataccttccttgttcgaaaccacagacaggcatccttggagatctctcccattacctttctcactgcccaaacgctccttatggacttgggtcagttccttctcttctgccatatcagctcacaccagcatgatggtatggaagcttatgtgaaagtcgacagttgtcctgaggagccacagttgcgcatgaagaataatgaagaagccgaggattacgacgacgatctcaccgattctgagatggacgtggtgaggtttgatgacgacaactctccctccttcattcaaatccggagcgtggcgaagaaacaccccaagacttgggtccactatatagcggcggaagaggaggattgggattacgctcctcttgtattggcaccagatgaccgctcatacaaaagccagtacctcaacaacggaccgcagagaattggccggaagtataagaaagtgcgatttatggcctatacagacgaaacctttaagacaagggaggccatccagcatgagagtgggattttgggacctcttctttacggcgaagttggtgataccctcctcatcatcttcaagaatcaagcttctcgcccctataacatttacccacacgggatcactgacgttaggcctttgtatagcagaagacttcccaaaggcgtgaagcatctcaaagacttccccattttgccaggcgagatctttaagtacaaatggaccgtcacagtggaagatggaccgactaaatcagaccctcgatgccttacgcggtactattcctccttcgtgaatatggagagagatttggcaagcggactcataggaccactcctcatctgttacaaggaatctgtagaccagaggggtaaccagattatgagtgataaacgcaatgtgatcctttttagcgtcttcgacgagaaccggtcctggtacttgaccgagaatatacaaaggttccttcccaaccccgcaggcgttcagttggaagaccctgagtttcaggccagcaatattatgcactcaatcaacggctatgtgtttgatagtctccagctttctgtttgcctccatgaagtagcctattggtacatcttgtcaattggtgctcaaacagacttcctctccgtcttcttctccggctacacctttaagcacaagatggtgtatgaggacactctcacactctttccattttctggagaaaccgtgttcatgagcatggagaatccaggcctttggatcttgggttgccacaacagtgattttcgcaatcggggaatgactgctctcctcaaagtcagcagctgtgataagaacacaggcgactattacgaagattcttacgaggacataagtgcctacttgttgtccaagaataacgccattgagcccagatcattctcccagaatcctcccgtgcttaaaaggcatcagcgcgaaatcaccagaactactcttcagtctgatcaagaggagattgactatgacgacaccataagcgtggaaatgaagaaggaggatttcgatatctatgacgaagatgagaaccagtctccgcggagctttcagaagaagacgcgacactacttcattgcagcagtcgaaaggctttgggactacggtatgtcatcatcccctcatgtgttgcgcaatagagctcagagtggaagtgttccacagttcaagaaagtcgtctttcaagagtttacagatggcagcttcacacagcctctcactcggggcgagcttaacgaacatttgggactccttggtccctatatccgagccgaagtggaggacaacattatggttacctttaggaatcaagcctctcgcccctacagcttctactcctccctcatcagttatgaggaggatcagagacaaggcgctgaaccacggaagaactttgtgaaaccgaatgagacgaagacctacttctggaaagtacagcaccacatggcccccacaaaagacgaattcgattgcaaagcatgggcgtatttttcagacgttgacttggagaaagatgtacattcaggacttattggtcctttgttggtgtgtcacactaacactctcaatccagcccatggcaggcaggtgacagtccaggaattcgctcttttctttaccatctttgatgagaccaagtcctggtacttcacggaaaacatggagcgcaattgcagagccccctgtaacatacagatggaggaccctacctttaaggaaaattatcggttccacgcaatcaacggatacattatggatacactccctggccttgtgatggctcaggaccaacgaatcaggtggtacctcctcagcatgggttctaatgagaacatacactccattcacttttcaggacatgtgttcactgtccggaagaaagaagagtataagatggccctctacaatttgtatccaggcgtgtttgagaccgttgaaatgcttccctctaaagctggcatctggagagtagagtgcttgatcggagaacatcttcacgcaggtatgagcaccttgttcctcgtgtacagcaacaaatgtcagaccccacttggcatggccagtggacacattcgcgactttcagatcacagcatctggccagtatggacaatgggccccaaagttggctcgcctccattactccggtagcataaatgcgtggtccactaaagaacctttcagctggattaaggtcgatcttcttgcccccatgatcatccacggcattaagacacagggagcgaggcagaaattctcctccctctacatctcacagttcattattatgtatagtttggacggcaagaagtggcaaacttatagaggtaacagtactggaacactcatggtgttcttcggcaacgttgatagctctggcatcaaacacaacatctttaatcctcccataatagctcggtacatcagattgcatccgacccactacagcattaggagtacactccgaatggagcttatgggttgcgacttgaattcctgttcaatgccactcggaatggagtctaaagccatctctgatgcacagataaccgccagtagctactttacgaacatgtttgctacgtggtcaccctctaaggcaaggcttcatttgcaaggccggtctaatgcctggagacctcaggtgaacaacccgaaagaatggctccaggtggactttcagaagaccatgaaagtaacaggtgtcactactcagggagttaagtccttgctcaccagcatgtatgtgaaggagttccttatttcctcatcacaagatggccaccagtggaccctcttctttcagaatggtaaggtcaaagtgtttcagggcaatcaagacagcttcacacccgtggtgaacagtcttgatcctccactcttgacacgataccttcgaatccatccacagtcttgggttcaccagattgcattgcgcatggaagtacttggatgcgaggctcaggacctctac

SEQ ID NO: 40 - protein, 1457 aa, synthetic construct
  REGION 1..1457: note = Variant of human B-domain deleted Factor VIII
MQIELSTCFFLCLLRFCFSATRRYYLGAVELSWDYMQSDLGELPVDARFPPRVPKSFPFNTSVVYKKTLFVEFTDHLFNIAKPRPPWMGLLGPTIQAEVYDTVVITLKNMASHPVSLHAVGVSYWKASEGAEYDDQTSQREKEDDKVFPGGSHTYVWQVLKENGPMASDPLCLTYSYLSHVDLVKDLNSGLIGALLVCREGSLAKEKTQTLHKFILLFAVFDEGKSWHSETKNSLMQDRDAASARAWPKMHTVNGYVNRSLPGLIGCHRKSVYWHVIGMGTTPEVHSIFLEGHTFLVRNHRQASLEISPITFLTAQTLLMDLGQFLLFCHISSHQHDGMEAYVKVDSCPEEPQLRMKNNEEAEDYDDDLTDSEMDVVRFDDDNSPSFIQIRSVAKKHPKTWVHYIAAEEEDWDYAPLVLAPDDRSYKSQYLNNGPQRIGRKYKKVRFMAYTDETFKTREAIQHESGILGPLLYGEVGDTLLIIFKNQASRPYNIYPHGITDVRPLYSRRLPKGVKHLKDFPILPGEIFKYKWTVTVEDGPTKSDPRCLTRYYSSFVNMERDLASGLIGPLLICYKESVDQRGNQIMSDKRNVILFSVFDENRSWYLTENIQRFLPNPAGVQLEDPEFQASNIMHSINGYVFDSLQLSVCLHEVAYWYILSIGAQTDFLSVFFSGYTFKHKMVYEDTLTLFPFSGETVFMSMENPGLWILGCHNSDFRNRGMTALLKVSSCDKNTGDYYEDSYEDISAYLLSKNNAIEPRSFSQNPPVLKRHQREITRTTLQSDQEEIDYDDTISVEMKKEDFDIYDEDENQSPRSFQKKTRHYFIAAVERLWDYGMSSSPHVLRNRAQSGSVPQFKKVVFQEFTDGSFTQPLTRGELNEHLGLLGPYIRAEVEDNIMVTFRNQASRPYSFYSSLISYEEDQRQGAEPRKNFVKPNETKTYFWKVQHHMAPTKDEFDCKAWAYFSDVDLEKDVHSGLIGPLLVCHTNTLNPAHGRQVTVQEFALFFTIFDETKSWYFTENMERNCRAPCNIQMEDPTFKENYRFHAINGYIMDTLPGLVMAQDQRIRWYLLSMGSNENIHSIHFSGHVFTVRKKEEYKMALYNLYPGVFETVEMLPSKAGIWRVECLIGEHLHAGMSTLFLVYSNKCQTPLGMASGHIRDFQITASGQYGQWAPKLARLHYSGSINAWSTKEPFSWIKVDLLAPMIIHGIKTQGARQKFSSLYISQFIIMYSLDGKKWQTYRGNSTGTLMVFFGNVDSSGIKHNIFNPPIIARYIRLHPTHYSIRSTLRMELMGCDLNSCSMPLGMESKAISDAQITASSYFTNMFATWSPSKARLHLQGRSNAWRPQVNNPKEWLQVDFQKTMKVTGVTTQGVKSLLTSMYVKEFLISSSQDGHQWTLFFQNGKVKVFQGNQDSFTPVVNSLDPPLLTRYLRIHPQSWVHQIALRMEVLGCEAQDLY

SEQ ID NO: 41 - DNA, 4371 bp, synthetic construct
  misc_feature 1..4371: note = Variant of human B-domain deleted Factor VIII
  source 1..4371: mol_type = other DNA
atgcagattgaactgtctacctgcttcttcctctgtttgctgaggttctgctttagcgccactagacggtactaccttggcgctgtggagctgtcctgggactatatgcagagtgatttgggagagcttcccgtcgacgcacgatttcctcctcgcgttccaaagtcatttcccttcaacacaagcgtggtgtacaagaagacgctcttcgtcgaattcaccgatcacctgttcaatatcgccaaacccagaccaccatggatgggtcttttggggcctaccatacaagcggaggtgtatgacacagttgttatcactctcaagaacatggcttctcatccggtaagtcttcacgcagtgggcgtgtcctactggaaagcttcagaaggagccgagtatgatgatcagacatcccagagggagaaagaagacgacaaggtatttccaggtgggtctcatacctatgtgtggcaagtgctcaaagagaatggccctatggcaagcgatccgctctgtttgacttacagctacctttcacacgttgacctcgtcaaggacctcaactccgggttgattggagccttgttggtatgcagggaaggatctcttgccaaagagaagacacagaccctccacaagtttatccttctctttgctgtgttcgatgagggcaaaagttggcatagcgaaacgaagaattccctcatgcaggatcgcgacgcagccagcgccagagcttggcccaagatgcacactgtgaacggatatgtcaataggtcacttcctggcttgattgggtgtcatcggaaaagtgtctactggcacgtgatcggaatggggacaacaccagaggtccactccatatttctcgaaggccataccttccttgttcgaaaccacagacaggcatccttggagatctctcccattacctttctcactgcccaaacgctccttatggacttgggtcagttccttctcttctgccatatcagctcacaccagcatgatggtatggaagcttatgtgaaagtcgacagttgtcctgaggagccacagttgcgcatgaagaataatgaagaagccgaggattacgacgacgatctcaccgattctgagatggacgtggtgaggtttgatgacgacaactctccctccttcattcaaatccggagcgtggcgaagaaacaccccaagacttgggtccactatatagcggcggaagaggaggattgggattacgctcctcttgtattggcaccagatgaccgctcatacaaaagccagtacctcaacaacggaccgcagagaattggccggaagtataagaaagtgcgatttatggcctatacagacgaaacctttaagacaagggaggccatccagcatgagagtgggattttgggacctcttctttacggcgaagttggtgataccctcctcatcatcttcaagaatcaagcttctcgcccctataacatttacccacacgggatcactgacgttaggcctttgtatagcagaagacttcccaaaggcgtgaagcatctcaaagacttccccattttgccaggcgagatctttaagtacaaatggaccgtcacagtggaagatggaccgactaaatcagaccctcgatgccttacgcggtactattcctccttcgtgaatatggagagagatttggcaagcggactcataggaccactcctcatctgttacaaggaatctgtagaccagaggggtaaccagattatgagtgataaacgcaatgtgatcctttttagcgtcttcgacgagaaccggtcctggtacttgaccgagaatatacaaaggttccttcccaaccccgcaggcgttcagttggaagaccctgagtttcaggccagcaatattatgcactcaatcaacggctatgtgtttgatagtctccagctttctgtttgcctccatgaagtagcctattggtacatcttgtcaattggtgctcaaacagacttcctctccgtcttcttctccggctacacctttaagcacaagatggtgtatgaggacactctcacactctttccattttctggagaaaccgtgttcatgagcatggagaatccaggcctttggatcttgggttgccacaacagtgattttcgcaatcggggaatgactgctctcctcaaagtcagcagctgtgataagaacacaggcgactattacgaagattcttacgaggacataagtgcctacttgttgtccaagaataacgccattgagcccagatcattctcccagaatcctcccgtgcttaaaaggcatcagcgcgaaatcaccagaactactcttcagtctgatcaagaggagattgactatgacgactatataagcgtggaaatgaagaaggaggatttcgatatctatgacgaagatgagaaccagtctccgcggagctttcagaagaagacgcgacactacttcattgcagcagtcgaaaggctttgggactacggtatgtcatcatcccctcatgtgttgcgcaatagagctcagagtggaagtgttccacagttcaagaaagtcgtctttcaagagtttacagatggcagcttcacacagcctctctatcggggcgagcttaacgaacatttgggactccttggtccctatatccgagccgaagtggaggacaacattatggttacctttaggaatcaagcctctcgcccctacagcttctactcctccctcatcagttatgaggaggatcagagacaaggcgctgaaccacggaagaactttgtgaaaccgaatgagacgaagacctacttctggaaagtacagcaccacatggcccccacaaaagacgaattcgattgcaaagcatgggcgtatttttcagacgttgacttggagaaagatgtacattcaggacttattggtcctttgttggtgtgtcacactaacactctcaatccagcccatggcaggcaggtgacagtccaggaattcgctcttttctttaccatctttgatgagaccaagtcctggtacttcacggaaaacatggagcgcaattgcagagccccctgtaacatacagatggaggaccctacctttaaggaaaattatcggttccacgcaatcaacggatacattatggatacactccctggccttgtgatggctcaggaccaacgaatcaggtggtacctcctcagcatgggttctaatgagaacatacactccattcacttttcaggacatgtgttcactgtccggaagaaagaagagtataagatggccctctacaatttgtatccaggcgtgtttgagaccgttgaaatgcttccctctaaagctggcatctggagagtagagtgcttgatcggagaacatcttcacgcaggtatgagcaccttgttcctcgtgtacagcaacaaatgtcagaccccacttggcatggccagtggacacattcgcgactttcagatcacagcatctggccagtatggacaatgggccccaaagttggctcgcctccattactccggtagcataaatgcgtggtccactaaagaacctttcagctggattaaggtcgatcttcttgcccccatgatcatccacggcattaagacacagggagcgaggcagaaattctcctccctctacatctcacagttcattattatgtatagtttggacggcaagaagtggcaaacttatagaggtaacagtactggaacactcatggtgttcttcggcaacgttgatagctctggcatcaaacacaacatctttaatcctcccataatagctcggtacatcagattgcatccgacccactacagcattaggagtacactccgaatggagcttatgggttgcgacttgaattcctgttcaatgccactcggaatggagtctaaagccatctctgatgcacagataaccgccagtagctactttacgaacatgtttgctacgtggtcaccctctaaggcaaggcttcatttgcaaggccggtctaatgcctggagacctcaggtgaacaacccgaaagaatggctccaggtggactttcagaagaccatgaaagtaacaggtgtcactactcagggagttaagtccttgctcaccagcatgtatgtgaaggagttccttatttcctcatcacaagatggccaccagtggaccctcttctttcagaatggtaaggtcaaagtgtttcagggcaatcaagacagcttcacacccgtggtgaacagtcttgatcctccactcttgacacgataccttcgaatccatccacagtcttgggttcaccagattgcattgcgcatggaagtacttggatgcgaggctcaggacctctac

SEQ ID NO: 42 - protein, 1457 aa, synthetic construct
  REGION 1..1457: note = Variant of human B-domain deleted Factor VIII
MQIELSTCFFLCLLRFCFSATRRYYLGAVELSWDYMQSDLGELPVDARFPPRVPKSFPFNTSVVYKKTLFVEFTDHLFNIAKPRPPWMGLLGPTIQAEVYDTVVITLKNMASHPVSLHAVGVSYWKASEGAEYDDQTSQREKEDDKVFPGGSHTYVWQVLKENGPMASDPLCLTYSYLSHVDLVKDLNSGLIGALLVCREGSLAKEKTQTLHKFILLFAVFDEGKSWHSETKNSLMQDRDAASARAWPKMHTVNGYVNRSLPGLIGCHRKSVYWHVIGMGTTPEVHSIFLEGHTFLVRNHRQASLEISPITFLTAQTLLMDLGQFLLFCHISSHQHDGMEAYVKVDSCPEEPQLRMKNNEEAEDYDDDLTDSEMDVVRFDDDNSPSFIQIRSVAKKHPKTWVHYIAAEEEDWDYAPLVLAPDDRSYKSQYLNNGPQRIGRKYKKVRFMAYTDETFKTREAIQHESGILGPLLYGEVGDTLLIIFKNQASRPYNIYPHGITDVRPLYSRRLPKGVKHLKDFPILPGEIFKYKWTVTVEDGPTKSDPRCLTRYYSSFVNMERDLASGLIGPLLICYKESVDQRGNQIMSDKRNVILFSVFDENRSWYLTENIQRFLPNPAGVQLEDPEFQASNIMHSINGYVFDSLQLSVCLHEVAYWYILSIGAQTDFLSVFFSGYTFKHKMVYEDTLTLFPFSGETVFMSMENPGLWILGCHNSDFRNRGMTALLKVSSCDKNTGDYYEDSYEDISAYLLSKNNAIEPRSFSQNPPVLKRHQREITRTTLQSDQEEIDYDDYISVEMKKEDFDIYDEDENQSPRSFQKKTRHYFIAAVERLWDYGMSSSPHVLRNRAQSGSVPQFKKVVFQEFTDGSFTQPLYRGELNEHLGLLGPYIRAEVEDNIMVTFRNQASRPYSFYSSLISYEEDQRQGAEPRKNFVKPNETKTYFWKVQHHMAPTKDEFDCKAWAYFSDVDLEKDVHSGLIGPLLVCHTNTLNPAHGRQVTVQEFALFFTIFDETKSWYFTENMERNCRAPCNIQMEDPTFKENYRFHAINGYIMDTLPGLVMAQDQRIRWYLLSMGSNENIHSIHFSGHVFTVRKKEEYKMALYNLYPGVFETVEMLPSKAGIWRVECLIGEHLHAGMSTLFLVYSNKCQTPLGMASGHIRDFQITASGQYGQWAPKLARLHYSGSINAWSTKEPFSWIKVDLLAPMIIHGIKTQGARQKFSSLYISQFIIMYSLDGKKWQTYRGNSTGTLMVFFGNVDSSGIKHNIFNPPIIARYIRLHPTHYSIRSTLRMELMGCDLNSCSMPLGMESKAISDAQITASSYFTNMFATWSPSKARLHLQGRSNAWRPQVNNPKEWLQVDFQKTMKVTGVTTQGVKSLLTSMYVKEFLISSSQDGHQWTLFFQNGKVKVFQGNQDSFTPVVNSLDPPLLTRYLRIHPQSWVHQIALRMEVLGCEAQDLY

SEQ ID NO: 43 - DNA, 4371 bp, synthetic construct
  misc_feature 1..4371: note = Variant of human B-domain deleted Factor VIII
  source 1..4371: mol_type = other DNA
atgcagattgaactgtctacctgcttcttcctctgtttgctgaggttctgctttagcgccactagacggtactaccttggcgctgtggagctgtcctgggactatatgcagagtgatttgggagagcttcccgtcgacgcacgatttcctcctcgcgttccaaagtcatttcccttcaacacaagcgtggtgtacaagaagacgctcttcgtcgaattcaccgatcacctgttcaatatcgccaaacccagaccaccatggatgggtcttttggggcctaccatacaagcggaggtgtatgacacagttgttatcactctcaagaacatggcttctcatccggtaagtcttcacgcagtgggcgtgtcctactggaaagcttcagaaggagccgagtatgatgatcagacatcccagagggagaaagaagacgacaaggtatttccaggtgggtctcatacctatgtgtggcaagtgctcaaagagaatggccctatggcaagcgatccgctctgtttgacttacagctacctttcacacgttgacctcgtcaaggacctcaactccgggttgattggagccttgttggtatgcagggaaggatctcttgccaaagagaagacacagaccctccacaagtttatccttctctttgctgtgttcgatgagggcaaaagttggcatagcgaaacgaagaattccctcatgcaggatcgcgacgcagccagcgccagagcttggcccaagatgcacactgtgaacggatatgtcaataggtcacttcctggcttgattgggtgtcatcggaaaagtgtctactggcacgtgatcggaatggggacaacaccagaggtccactccatatttctcgaaggccataccttccttgttcgaaaccacagacaggcatccttggagatctctcccattacctttctcactgcccaaacgctccttatggacttgggtcagttccttctcttctgccatatcagctcacaccagcatgatggtatggaagcttatgtgaaagtcgacagttgtcctgaggagccacagttgcgcatgaagaataatgaagaagccgaggattacgacgacgatctcaccgattctgagatggacgtggtgaggtttgatgacgacaactctccctccttcattcaaatccggagcgtggcgaagaaacaccccaagacttgggtccactatatagcggcggaagaggaggattgggattacgctcctcttgtattggcaccagatgaccgctcatacaaaagccagtacctcaacaacggaccgcagagaattggccggaagtataagaaagtgcgatttatggcctatacagacgaaacctttaagacaagggaggccatccagcatgagagtgggattttgggacctcttctttacggcgaagttggtgataccctcctcatcatcttcaagaatcaagcttctcgcccctataacatttacccacacgggatcactgacgttaggcctttgtatagcagaagacttcccaaaggcgtgaagcatctcaaagacttccccattttgccaggcgagatctttaagtacaaatggaccgtcacagtggaagatggaccgactaaatcagaccctcgatgccttacgcggtactattcctccttcgtgaatatggagagagatttggcaagcggactcataggaccactcctcatctgttacaaggaatctgtagaccagaggggtaaccagattatgagtgataaacgcaatgtgatcctttttagcgtcttcgacgagaaccggtcctggtacttgaccgagaatatacaaaggttccttcccaaccccgcaggcgttcagttggaagaccctgagtttcaggccagcaatattatgcactcaatcaacggctatgtgtttgatagtctccagctttctgtttgcctccatgaagtagcctattggtacatcttgtcaattggtgctcaaacagacttcctctccgtcttcttctccggctacacctttaagcacaagatggtgtatgaggacactctcacactctttccattttctggagaaaccgtgttcatgagcatggagaatccaggcctttggaagttgggttgccacaacagtgattttcgcaatcggggaatgactgctctcctcaaagtcagcagctgtgataagaacacaggcgactattacgaagattcttacgaggacataagtgcctacttgttgtccaagaataacgccattgagcccagatcattctcccagaatcctcccgtgcttaaaaggcatcagcgcgaaatcaccagaactactcttcagtctgatcaagaggagattgactatgacgacaccataagcgtggaaatgaagaaggaggatttcgatatctatgacgaagatgagaaccagtctccgcggagctttcagaagaagacgcgacactacttcattgcagcagtcgaaaggctttgggactacggtatgtcatcatcccctcatgtgttgcgcaatagagctcagagtggaagtgttccacagttcaagaaagtcgtctttcaagagtttacagatggcagcttcacacagcctctctatcggggcgagcttaacgaacatttgggactccttggtccctatatccgagccgaagtggaggacaacattatggttacctttaggaatcaagcctctcgcccctacagcttctactcctccctcatcagttatgaggaggatcagagacaaggcgctgaaccacggaagaactttgtgaaaccgaatgagacgaagacctacttctggaaagtacagcaccacatggcccccacaaaagacgaattcgattgcaaagcatgggcgtatttttcagacgttgacttggagaaagatgtacattcaggacttattggtcctttgttggtgtgtcacactaacactctcaatccagcccatggcaggcaggtgacagtccaggaattcgctcttttctttaccatctttgatgagaccaagtcctggtacttcacggaaaacatggagcgcaattgcagagccccctgtaacatacagatggaggaccctacctttaaggaaaattatcggttccacgcaatcaacggatacattatggatacactccctggccttgtgatggctcaggaccaacgaatcaggtggtacctcctcagcatgggttctaatgagaacatacactccattcacttttcaggacatgtgttcactgtccggaagaaagaagagtataagatggccctctacaatttgtatccaggcgtgtttgagaccgttgaaatgcttccctctaaagctggcatctggagagtagagtgcttgatcggagaacatcttcacgcaggtatgagcaccttgttcctcgtgtacagcaacaaatgtcagaccccacttggcatggccagtggacacattcgcgactttcagatcacagcatctggccagtatggacaatgggccccaaagttggctcgcctccattactccggtagcataaatgcgtggtccactaaagaacctttcagctggattaaggtcgatcttcttgcccccatgatcatccacggcattaagacacagggagcgaggcagaaattctcctccctctacatctcacagttcattattatgtatagtttggacggcaagaagtggcaaacttatagaggtaacagtactggaacactcatggtgttcttcggcaacgttgatagctctggcatcaaacacaacatctttaatcctcccataatagctcggtacatcagattgcatccgacccactacagcattaggagtacactccgaatggagcttatgggttgcgacttgaattcctgttcaatgccactcggaatggagtctaaagccatctctgatgcacagataaccgccagtagctactttacgaacatgtttgctacgtggtcaccctctaaggcaaggcttcatttgcaaggccggtctaatgcctggagacctcaggtgaacaacccgaaagaatggctccaggtggactttcagaagaccatgaaagtaacaggtgtcactactcagggagttaagtccttgctcaccagcatgtatgtgaaggagttccttatttcctcatcacaagatggccaccagtggaccctcttctttcagaatggtaaggtcaaagtgtttcagggcaatcaagacagcttcacacccgtggtgaacagtcttgatcctccactcttgacacgataccttcgaatccatccacagtcttgggttcaccagattgcattgcgcatggaagtacttggatgcgaggctcaggacctctac

SEQ ID NO: 44 - protein, 1457 aa, synthetic construct
  REGION 1..1457: note = Variant of human B-domain deleted Factor VIII
MQIELSTCFFLCLLRFCFSATRRYYLGAVELSWDYMQSDLGELPVDARFPPRVPKSFPFNTSVVYKKTLFVEFTDHLFNIAKPRPPWMGLLGPTIQAEVYDTVVITLKNMASHPVSLHAVGVSYWKASEGAEYDDQTSQREKEDDKVFPGGSHTYVWQVLKENGPMASDPLCLTYSYLSHVDLVKDLNSGLIGALLVCREGSLAKEKTQTLHKFILLFAVFDEGKSWHSETKNSLMQDRDAASARAWPKMHTVNGYVNRSLPGLIGCHRKSVYWHVIGMGTTPEVHSIFLEGHTFLVRNHRQASLEISPITFLTAQTLLMDLGQFLLFCHISSHQHDGMEAYVKVDSCPEEPQLRMKNNEEAEDYDDDLTDSEMDVVRFDDDNSPSFIQIRSVAKKHPKTWVHYIAAEEEDWDYAPLVLAPDDRSYKSQYLNNGPQRIGRKYKKVRFMAYTDETFKTREAIQHESGILGPLLYGEVGDTLLIIFKNQASRPYNIYPHGITDVRPLYSRRLPKGVKHLKDFPILPGEIFKYKWTVTVEDGPTKSDPRCLTRYYSSFVNMERDLASGLIGPLLICYKESVDQRGNQIMSDKRNVILFSVFDENRSWYLTENIQRFLPNPAGVQLEDPEFQASNIMHSINGYVFDSLQLSVCLHEVAYWYILSIGAQTDFLSVFFSGYTFKHKMVYEDTLTLFPFSGETVFMSMENPGLWKLGCHNSDFRNRGMTALLKVSSCDKNTGDYYEDSYEDISAYLLSKNNAIEPRSFSQNPPVLKRHQREITRTTLQSDQEEIDYDDTISVEMKKEDFDIYDEDENQSPRSFQKKTRHYFIAAVERLWDYGMSSSPHVLRNRAQSGSVPQFKKVVFQEFTDGSFTQPLYRGELNEHLGLLGPYIRAEVEDNIMVTFRNQASRPYSFYSSLISYEEDQRQGAEPRKNFVKPNETKTYFWKVQHHMAPTKDEFDCKAWAYFSDVDLEKDVHSGLIGPLLVCHTNTLNPAHGRQVTVQEFALFFTIFDETKSWYFTENMERNCRAPCNIQMEDPTFKENYRFHAINGYIMDTLPGLVMAQDQRIRWYLLSMGSNENIHSIHFSGHVFTVRKKEEYKMALYNLYPGVFETVEMLPSKAGIWRVECLIGEHLHAGMSTLFLVYSNKCQTPLGMASGHIRDFQITASGQYGQWAPKLARLHYSGSINAWSTKEPFSWIKVDLLAPMIIHGIKTQGARQKFSSLYISQFIIMYSLDGKKWQTYRGNSTGTLMVFFGNVDSSGIKHNIFNPPIIARYIRLHPTHYSIRSTLRMELMGCDLNSCSMPLGMESKAISDAQITASSYFTNMFATWSPSKARLHLQGRSNAWRPQVNNPKEWLQVDFQKTMKVTGVTTQGVKSLLTSMYVKEFLISSSQDGHQWTLFFQNGKVKVFQGNQDSFTPVVNSLDPPLLTRYLRIHPQSWVHQIALRMEVLGCEAQDLY

SEQ ID NO: 45 - DNA, 4371 bp, synthetic construct
  misc_feature 1..4371: note = Variant of human B-domain deleted Factor VIII
  source 1..4371: mol_type = other DNA
atgcagattgaactgtctacctgcttcttcctctgtttgctgaggttctgctttagcgccactagacggtactaccttggcgctgtggagctgtcctgggactatatgcagagtgatttgggagagcttcccgtcgacgcacgatttcctcctcgcgttccaaagtcatttcccttcaacacaagcgtggtgtacaagaagacgctcttcgtcgaattcaccgatcacctgttcaatatcgccaaacccagaccaccatggatgggtcttttggggcctaccatacaagcggaggtgtatgacacagttgttatcactctcaagaacatggcttctcatccggtaagtcttcacgcagtgggcgtgtcctactggaaagcttcagaaggagccgagtatgatgatcagacatcccagagggagaaagaagacgacaaggtatttccaggtgggtctcatacctatgtgtggcaagtgctcaaagagaatggccctatggcaagcgatccgctctgtttgacttacagctacctttcacacgttgacctcgtcaaggacctcaactccgggttgattggagccttgttggtatgcagggaaggatctcttgccaaagagaagacacagaccctccacaagtttatccttctctttgctgtgttcgatgagggcaaaagttggcatagcgaaacgaagaattccctcatgcaggatcgcgacgcagccagcgccagagcttggcccaagatgcacactgtgaacggatatgtcaataggtcacttcctggcttgattgggtgtcatcggaaaagtgtctactggcacgtgatcggaatggggacaacaccagaggtccactccatatttctcgaaggccataccttccttgttcgaaaccacagacaggcatccttggagatctctcccattacctttctcactgcccaaacgctccttatggacttgggtcagttccttctcttctgccatatcagctcacaccagcatgatggtatggaagcttatgtgcttgtcgacagttgtcctgaggagccacagttgcgcatgaagaataatgaagaagccgaggattacgacgacgatctcaccgattctgagatggacgtggtgaggtttgatgacgacaactctccctccttcattcaaatccggagcgtggcgaagaaacaccccaagacttgggtccactatatagcggcggaagaggaggattgggattacgctcctcttgtattggcaccagatgaccgctcatacaaaagccagtacctcaacaacggaccgcagagaattggccggaagtataagaaagtgcgatttatggcctatacagacgaaacctttaagacaagggaggccatccagcatgagagtgggattttgggacctcttctttacggcgaagttggtgataccctcctcatcatcttcaagaatcaagcttctcgcccctataacatttacccacacgggatcactgacgttaggcctttgtatagcagaagacttcccaaaggcgtgaagcatctcaaagacttccccattttgccaggcgagatctttaagtacaaatggaccgtcacagtggaagatggaccgactaaatcagaccctcgatgccttacgcggtactattcctccttcgtgaatatggagagagatttggcaagcggactcataggaccactcctcatctgttacaaggaatctgtagaccagaggggtaaccagattatgagtgataaacgcaatgtgatcctttttagcgtcttcgacgagaaccggtcctggtacttgaccgagaatatacaaaggttccttcccaaccccgcaggcgttcagttggaagaccctgagtttcaggccagcaatattatgcactcaatcaacggctatgtgtttgatagtctccagctttctgtttgcctccatgaagtagcctattggtacatcttgtcaattggtgctcaaacagacttcctctccgtcttcttctccggctacacctttaagcacaagatggtgtatgaggacactctcacactctttccattttctggagaaaccgtgttcatgagcatggagaatccaggcctttggatcttgggttgccacaacagtgattttcgcaatcggggaatgactgctctcctcaaagtcagcagctgtgataagaacacaggcgactattacgaagattcttacgaggacataagtgcctacttgttgtccaagaataacgccattgagcccagatcattctcccagaatcctcccgtgcttaaaaggcatcagcgcgaaatcaccagaactactcttcagtctgatcaagaggagattgactatgacgacaccataagcgtggaaatgaagaaggaggatttcgatatctatgacgaagatgagaaccagtctccgcggagctttcagaagaagacgcgacactacttcattgcagcagtcgaaaggctttgggactacggtatgtcatcatcccctcatgtgttgcgcaatagagctcagagtggaagtgttccacagttcaagaaagtcgtctttcaagagtttacagatggcagcttcacacagcctctctatcggggcgagcttaacgaacatttgggactccttggtccctatatccgagccgaagtggaggacaacattatggttacctttaggaatcaagcctctcgcccctacagcttctactcctccctcatcagttatgaggaggatcagagacaaggcgctgaaccacggaagaactttgtgaaaccgaatgagacgaagacctacttctggaaagtacagcaccacatggcccccacaaaagacgaattcgattgcaaagcatgggcgtatttttcagacgttgacttggagaaagatgtacattcaggacttattggtcctttgttggtgtgtcacactaacactctcaatccagcccatggcaggcaggtgacagtccaggaattcgctcttttctttaccatctttgatgagaccaagtcctggtacttcacggaaaacatggagcgcaattgcagagccccctgtaacatacagatggaggaccctacctttaaggaaaattatcggttccacgcaatcaacggatacattatggatacactccctggccttgtgatggctcaggaccaacgaatcaggtggtacctcctcagcatgggttctaatgagaacatacactccattcacttttcaggacatgtgttcactgtccggaagaaagaagagtataagatggccctctacaatttgtatccaggcgtgtttgagaccgttgaaatgcttccctctaaagctggcatctggagagtagagtgcttgatcggagaacatcttcacgcaggtatgagcaccttgttcctcgtgtacagcaacaaatgtcagaccccacttggcatggccagtggacacattcgcgactttcagatcacagcatctggccagtatggacaatgggccccaaagttggctcgcctccattactccggtagcataaatgcgtggtccactaaagaacctttcagctggattaaggtcgatcttcttgcccccatgatcatccacggcattaagacacagggagcgaggcagaaattctcctccctctacatctcacagttcattattatgtatagtttggacggcaagaagtggcaaacttatagaggtaacagtactggaacactcatggtgttcttcggcaacgttgatagctctggcatcaaacacaacatctttaatcctcccataatagctcggtacatcagattgcatccgacccactacagcattaggagtacactccgaatggagcttatgggttgcgacttgaattcctgttcaatgccactcggaatggagtctaaagccatctctgatgcacagataaccgccagtagctactttacgaacatgtttgctacgtggtcaccctctaaggcaaggcttcatttgcaaggccggtctaatgcctggagacctcaggtgaacaacccgaaagaatggctccaggtggactttcagaagaccatgaaagtaacaggtgtcactactcagggagttaagtccttgctcaccagcatgtatgtgaaggagttccttatttcctcatcacaagatggccaccagtggaccctcttctttcagaatggtaaggtcaaagtgtttcagggcaatcaagacagcttcacacccgtggtgaacagtcttgatcctccactcttgacacgataccttcgaatccatccacagtcttgggttcaccagattgcattgcgcatggaagtacttggatgcgaggctcaggacctctac

SEQ ID NO: 46 - protein, 1457 aa, synthetic construct
  REGION 1..1457: note = Variant of human B-domain deleted Factor VIII
MQIELSTCFFLCLLRFCFSATRRYYLGAVELSWDYMQSDLGELPVDARFPPRVPKSFPFNTSVVYKKTLFVEFTDHLFNIAKPRPPWMGLLGPTIQAEVYDTVVITLKNMASHPVSLHAVGVSYWKASEGAEYDDQTSQREKEDDKVFPGGSHTYVWQVLKENGPMASDPLCLTYSYLSHVDLVKDLNSGLIGALLVCREGSLAKEKTQTLHKFILLFAVFDEGKSWHSETKNSLMQDRDAASARAWPKMHTVNGYVNRSLPGLIGCHRKSVYWHVIGMGTTPEVHSIFLEGHTFLVRNHRQASLEISPITFLTAQTLLMDLGQFLLFCHISSHQHDGMEAYVLVDSCPEEPQLRMKNNEEAEDYDDDLTDSEMDVVRFDDDNSPSFIQIRSVAKKHPKTWVHYIAAEEEDWDYAPLVLAPDDRSYKSQYLNNGPQRIGRKYKKVRFMAYTDETFKTREAIQHESGILGPLLYGEVGDTLLIIFKNQASRPYNIYPHGITDVRPLYSRRLPKGVKHLKDFPILPGEIFKYKWTVTVEDGPTKSDPRCLTRYYSSFVNMERDLASGLIGPLLICYKESVDQRGNQIMSDKRNVILFSVFDENRSWYLTENIQRFLPNPAGVQLEDPEFQASNIMHSINGYVFDSLQLSVCLHEVAYWYILSIGAQTDFLSVFFSGYTFKHKMVYEDTLTLFPFSGETVFMSMENPGLWILGCHNSDFRNRGMTALLKVSSCDKNTGDYYEDSYEDISAYLLSKNNAIEPRSFSQNPPVLKRHQREITRTTLQSDQEEIDYDDTISVEMKKEDFDIYDEDENQSPRSFQKKTRHYFIAAVERLWDYGMSSSPHVLRNRAQSGSVPQFKKVVFQEFTDGSFTQPLYRGELNEHLGLLGPYIRAEVEDNIMVTFRNQASRPYSFYSSLISYEEDQRQGAEPRKNFVKPNETKTYFWKVQHHMAPTKDEFDCKAWAYFSDVDLEKDVHSGLIGPLLVCHTNTLNPAHGRQVTVQEFALFFTIFDETKSWYFTENMERNCRAPCNIQMEDPTFKENYRFHAINGYIMDTLPGLVMAQDQRIRWYLLSMGSNENIHSIHFSGHVFTVRKKEEYKMALYNLYPGVFETVEMLPSKAGIWRVECLIGEHLHAGMSTLFLVYSNKCQTPLGMASGHIRDFQITASGQYGQWAPKLARLHYSGSINAWSTKEPFSWIKVDLLAPMIIHGIKTQGARQKFSSLYISQFIIMYSLDGKKWQTYRGNSTGTLMVFFGNVDSSGIKHNIFNPPIIARYIRLHPTHYSIRSTLRMELMGCDLNSCSMPLGMESKAISDAQITASSYFTNMFATWSPSKARLHLQGRSNAWRPQVNNPKEWLQVDFQKTMKVTGVTTQGVKSLLTSMYVKEFLISSSQDGHQWTLFFQNGKVKVFQGNQDSFTPVVNSLDPPLLTRYLRIHPQSWVHQIALRMEVLGCEAQDLY

SEQ ID NO: 47 - DNA, 4371 bp, synthetic construct
  misc_feature 1..4371: note = Variant of human B-domain deleted Factor VIII
  source 1..4371: mol_type = other DNA
atgcagattgaactgtctacctgcttcttcctctgtttgctgaggttctgctttagcgccactagacggtactaccttggcgctgtggagctgtcctgggactatatgcagagtgatttgggagagcttcccgtcgacgcacgatttcctcctcgcgttccaaagtcagtgcccttcaacacaagcgtggtgtacaagaagacgctcttcgtcgaattcaccgatcacctgttcaatatcgccaaacccagaccaccatggatgggtcttttggggcctaccatacaagcggaggtgtatgacacagttgttatcactctcaagaacatggcttctcatccggtaagtcttcacgcagtgggcgtgtcctactggaaagcttcagaaggagccgagtatgatgatcagacatcccagagggagaaagaagacgacaaggtatttccaggtgggtctcatacctatgtgtggcaagtgctcaaagagaatggccctatggcaagcgatccgctctgtttgacttacagctacctttcacacgttgacctcgtcaaggacctcaactccgggttgattggagccttgttggtatgcagggaaggatctcttgccaaagagaagacacagaccctccacaagtttatccttctctttgctgtgttcgatgagggcaaaagttggcatagcgaaacgaagaattccctcatgcaggatcgcgacgcagccagcgccagagcttggcccaagatgcacactgtgaacggatatgtcaataggtcacttcctggcttgattgggtgtcatcggaaaagtgtctactggcacgtgatcggaatggggacaacaccagaggtccactccatatttctcgaaggccataccttccttgttcgaaaccacagacaggcatccttggagatctctcccattacctttctcactgcccaaacgctccttatggacttgggtcagttccttctcttctgccatatcagctcacaccagcatgatggtatggaagcttatgtgaaagtcgacagttgtcctgaggagccacagttgcgcatgaagaataatgaagaagccgaggattacgacgacgatctcaccgattctgagatggacgtggtgaggtttgatgacgacaactctccctccttcattcaaatccggagcgtggcgaagaaacaccccaagacttgggtccactatatagcggcggaagaggaggattgggattacgctcctcttgtattggcaccagatgaccgctcatacaaaagccagtacctcaacaacggaccgcagagaattggccggaagtataagaaagtgcgatttatggcctatacagacgaaacctttaagacaagggaggccatccagcatgagagtgggattttgggacctcttctttacggcgaagttggtgataccctcctcatcatcttcaagaatcaagcttctcgcccctataacatttacccacacgggatcactgacgttaggcctttgtatagcagaagacttcccaaaggcgtgaagcatctcaaagacttccccattttgccaggcgagatctttaagtacaaatggaccgtcacagtggaagatggaccgactaaatcagaccctcgatgccttacgcggtactattcctccttcgtgaatatggagagagatttggcaagcggactcataggaccactcctcatctgttacaaggaatctgtagaccagaggggtaaccagattatgagtgataaacgcaatgtgatcctttttagcgtcttcgacgagaaccggtcctggtacttgaccgagaatatacaaaggttccttcccaaccccgcaggcgttcagttggaagaccctgagtttcaggccagcaatattatgcactcaatcaacggctatgtgtttgatagtctccagctttctgtttgcctccatgaagtagcctattggtacatcttgtcaattggtgctcaaacagacttcctctccgtcttcttctccggctacacctttaagcacaagatggtgtatgaggacactctcacactctttccattttctggagaaaccgtgttcatgagcatggagaatccaggcctttggatcttgggttgccacaacagtgattttcgcaatcggggaatgactgctctcctcaaagtcagcagctgtgataagaacacaggcgactattacgaagattcttacgaggacataagtgcctacttgttgtccaagaataacgccattgagcccagatcattctcccagaatcctcccgtgcttaaaaggcatcagcgcgaaatcaccagaactactcttcagtctgatcaagaggagattgactatgacgacaccataagcgtggaaatgaagaaggaggatttcgatatctatgacgaagatgagaaccagtctccgcggagctttcagaagaagacgcgacactacttcattgcagcagtcgaaaggctttgggactacggtatgtcatcatcccctcatgtgttgcgcaatagagctcagagtggaagtgttccacagttcaagaaagtcgtctttcaagagtttacagatggcagcttcacacagcctctctatcggggcgagcttaacgaacatttgggactccttggtccctatatccgagccgaagtggaggacaacattatggttacctttaggaatcaagcctctcgcccctacagcttctactcctccctcatcagttatgaggaggatcagagacaaggcgctgaaccacggaagaactttgtgaaaccgaatgagacgaagacctacttctggaaagtacagcaccacatggcccccacaaaagacgaattcgattgcaaagcatgggcgtatttttcagacgttgacttggagaaagatgtacattcaggacttattggtcctttgttggtgtgtcacactaacactctcaatccagcccatggcaggcaggtgacagtccaggaattcgctcttttctttaccatctttgatgagaccaagtcctggtacttcacggaaaacatggagcgcaattgcagagccccctgtaacatacagatggaggaccctacctttaaggaaaattatcggttccacgcaatcaacggatacattatggatacactccctggccttgtgatggctcaggaccaacgaatcaggtggtacctcctcagcatgggttctaatgagaacatacactccattcacttttcaggacatgtgttcactgtccggaagaaagaagagtataagatggccctctacaatttgtatccaggcgtgtttgagaccgttgaaatgcttccctctaaagctggcatctggagagtagagtgcttgatcggagaacatcttcacgcaggtatgagcaccttgttcctcgtgtacagcaacaaatgtcagaccccacttggcatggccagtggacacattcgcgactttcagatcacagcatctggccagtatggacaatgggccccaaagttggctcgcctccattactccggtagcataaatgcgtggtccactaaagaacctttcagctggattaaggtcgatcttcttgcccccatgatcatccacggcattaagacacagggagcgaggcagaaattctcctccctctacatctcacagttcattattatgtatagtttggacggcaagaagtggcaaacttatagaggtaacagtactggaacactcatggtgttcttcggcaacgttgatagctctggcatcaaacacaacatctttaatcctcccataatagctcggtacatcagattgcatccgacccactacagcattaggagtacactccgaatggagcttatgggttgcgacttgaattcctgttcaatgccactcggaatggagtctaaagccatctctgatgcacagataaccgccagtagctactttacgaacatgtttgctacgtggtcaccctctaaggcaaggcttcatttgcaaggccggtctaatgcctggagacctcaggtgaacaacccgaaagaatggctccaggtggactttcagaagaccatgaaagtaacaggtgtcactactcagggagttaagtccttgctcaccagcatgtatgtgaaggagttccttatttcctcatcacaagatggccaccagtggaccctcttctttcagaatggtaaggtcaaagtgtttcagggcaatcaagacagcttcacacccgtggtgaacagtcttgatcctccactcttgacacgataccttcgaatccatccacagtcttgggttcaccagattgcattgcgcatggaagtacttggatgcgaggctcaggacctctac

SEQ ID NO: 48 - protein, 1457 aa, synthetic construct
  REGION 1..1457: note = Variant of human B-domain deleted Factor VIII
MQIELSTCFFLCLLRFCFSATRRYYLGAVELSWDYMQSDLGELPVDARFPPRVPKSVPFNTSVVYKKTLFVEFTDHLFNIAKPRPPWMGLLGPTIQAEVYDTVVITLKNMASHPVSLHAVGVSYWKASEGAEYDDQTSQREKEDDKVFPGGSHTYVWQVLKENGPMASDPLCLTYSYLSHVDLVKDLNSGLIGALLVCREGSLAKEKTQTLHKFILLFAVFDEGKSWHSETKNSLMQDRDAASARAWPKMHTVNGYVNRSLPGLIGCHRKSVYWHVIGMGTTPEVHSIFLEGHTFLVRNHRQASLEISPITFLTAQTLLMDLGQFLLFCHISSHQHDGMEAYVKVDSCPEEPQLRMKNNEEAEDYDDDLTDSEMDVVRFDDDNSPSFIQIRSVAKKHPKTWVHYIAAEEEDWDYAPLVLAPDDRSYKSQYLNNGPQRIGRKYKKVRFMAYTDETFKTREAIQHESGILGPLLYGEVGDTLLIIFKNQASRPYNIYPHGITDVRPLYSRRLPKGVKHLKDFPILPGEIFKYKWTVTVEDGPTKSDPRCLTRYYSSFVNMERDLASGLIGPLLICYKESVDQRGNQIMSDKRNVILFSVFDENRSWYLTENIQRFLPNPAGVQLEDPEFQASNIMHSINGYVFDSLQLSVCLHEVAYWYILSIGAQTDFLSVFFSGYTFKHKMVYEDTLTLFPFSGETVFMSMENPGLWILGCHNSDFRNRGMTALLKVSSCDKNTGDYYEDSYEDISAYLLSKNNAIEPRSFSQNPPVLKRHQREITRTTLQSDQEEIDYDDTISVEMKKEDFDIYDEDENQSPRSFQKKTRHYFIAAVERLWDYGMSSSPHVLRNRAQSGSVPQFKKVVFQEFTDGSFTQPLYRGELNEHLGLLGPYIRAEVEDNIMVTFRNQASRPYSFYSSLISYEEDQRQGAEPRKNFVKPNETKTYFWKVQHHMAPTKDEFDCKAWAYFSDVDLEKDVHSGLIGPLLVCHTNTLNPAHGRQVTVQEFALFFTIFDETKSWYFTENMERNCRAPCNIQMEDPTFKENYRFHAINGYIMDTLPGLVMAQDQRIRWYLLSMGSNENIHSIHFSGHVFTVRKKEEYKMALYNLYPGVFETVEMLPSKAGIWRVECLIGEHLHAGMSTLFLVYSNKCQTPLGMASGHIRDFQITASGQYGQWAPKLARLHYSGSINAWSTKEPFSWIKVDLLAPMIIHGIKTQGARQKFSSLYISQFIIMYSLDGKKWQTYRGNSTGTLMVFFGNVDSSGIKHNIFNPPIIARYIRLHPTHYSIRSTLRMELMGCDLNSCSMPLGMESKAISDAQITASSYFTNMFATWSPSKARLHLQGRSNAWRPQVNNPKEWLQVDFQKTMKVTGVTTQGVKSLLTSMYVKEFLISSSQDGHQWTLFFQNGKVKVFQGNQDSFTPVVNSLDPPLLTRYLRIHPQSWVHQIALRMEVLGCEAQDLY

SEQ ID NO: 49 - DNA, 4371 bp, synthetic construct
  misc_feature 1..4371: note = Variant of human B-domain deleted Factor VIII
  source 1..4371: mol_type = other DNA
atgcagattgaactgtctacctgcttcttcctctgtttgctgaggttctgctttagcgccactagacggtactaccttggcgctgtggagctgtcctgggactatatgcagagtgatttgggagagcttcccgtcgacgcacgatttcctcctcgcgttccaaagtcatttcccttcaacacaagcgtggtgtacaagaagacgctcttcgtcgaattcaccgatcacctgttcaatatcgccaaacccagaccaccatggatgggtcttttggggcctaccatacttgcggaggtgtatgacacagttgttatcactctcaagaacatggcttctcatccggtaagtcttcacgcagtgggcgtgtcctactggaaagcttcagaaggagccgagtatgatgatcagacatcccagagggagaaagaagacgacaaggtatttccaggtgggtctcatacctatgtgtggcaagtgctcaaagagaatggccctatggcaagcgatccgctctgtttgacttacagctacctttcacacgttgacctcgtcaaggacctcaactccgggttgattggagccttgttggtatgcagggaaggatctcttgccaaagagaagacacagaccctccacaagtttatccttctctttgctgtgttcgatgagggcaaaagttggcatagcgaaacgaagaattccctcatgcaggatcgcgacgcagccagcgccagagcttggcccaagatgcacactgtgaacggatatgtcaataggtcacttcctggcttgattgggtgtcatcggaaaagtgtctactggcacgtgatcggaatggggacaacaccagaggtccactccatatttctcgaaggccataccttccttgttcgaaaccacagacaggcatccttggagatctctcccattacctttctcactgcccaaacgctccttatggacttgggtcagttccttctcttctgccatatcagctcacaccagcatgatggtatggaagcttatgtgaaagtcgacagttgtcctgaggagccacagttgcgcatgaagaataatgaagaagccgaggattacgacgacgatctcaccgattctgagatggacgtggtgaggtttgatgacgacaactctccctccttcattcaaatccggagcgtggcgaagaaacaccccaagacttgggtccactatatagcggcggaagaggaggattgggattacgctcctcttgtattggcaccagatgaccgctcatacaaaagccagtacctcaacaacggaccgcagagaattggccggaagtataagaaagtgcgatttatggcctatacagacgaaacctttaagacaagggaggccatccagcatgagagtgggattttgggacctcttctttacggcgaagttggtgataccctcctcatcatcttcaagaatcaagcttctcgcccctataacatttacccacacgggatcactgacgttaggcctttgtatagcagaagacttcccaaaggcgtgaagcatctcaaagacttccccattttgccaggcgagatctttaagtacaaatggaccgtcacagtggaagatggaccgactaaatcagaccctcgatgccttacgcggtactattcctccttcgtgaatatggagagagatttggcaagcggactcataggaccactcctcatctgttacaaggaatctgtagaccagaggggtaaccagattatgagtgataaacgcaatgtgatcctttttagcgtcttcgacgagaaccggtcctggtacttgaccgagaatatacaaaggttccttcccaaccccgcaggcgttcagttggaagaccctgagtttcaggccagcaatattatgcactcaatcaacggctatgtgtttgatagtctccagctttctgtttgcctccatgaagtagcctattggtacatcttgtcaattggtgctcaaacagacttcctctccgtcttcttctccggctacacctttaagcacaagatggtgtatgaggacactctcacactctttccattttctggagaaaccgtgttcatgagcatggagaatccaggcctttggatcttgggttgccacaacagtgattttcgcaatcggggaatgactgctctcctcaaagtcagcagctgtgataagaacacaggcgactattacgaagattcttacgaggacataagtgcctacttgttgtccaagaataacgccattgagcccagatcattctcccagaatcctcccgtgcttaaaaggcatcagcgcgaaatcaccagaactactcttcagtctgatcaagaggagattgactatgacgacaccataagcgtggaaatgaagaaggaggatttcgatatctatgacgaagatgagaaccagtctccgcggagctttcagaagaagacgcgacactacttcattgcagcagtcgaaaggctttgggactacggtatgtcatcatcccctcatgtgttgcgcaatagagctcagagtggaagtgttccacagttcaagaaagtcgtctttcaagagtttacagatggcagcttcacacagcctctctatcggggcgagcttaacgaacatttgggactccttggtccctatatccgagccgaagtggaggacaacattatggttacctttaggaatcaagcctctcgcccctacagcttctactcctccctcatcagttatgaggaggatcagagacaaggcgctgaaccacggaagaactttgtgaaaccgaatgagacgaagacctacttctggaaagtacagcaccacatggcccccacaaaagacgaattcgattgcaaagcatgggcgtatttttcagacgttgacttggagaaagatgtacattcaggacttattggtcctttgttggtgtgtcacactaacactctcaatccagcccatggcaggcaggtgacagtccaggaattcgctcttttctttaccatctttgatgagaccaagtcctggtacttcacggaaaacatggagcgcaattgcagagccccctgtaacatacagatggaggaccctacctttaaggaaaattatcggttccacgcaatcaacggatacattatggatacactccctggccttgtgatggctcaggaccaacgaatcaggtggtacctcctcagcatgggttctaatgagaacatacactccattcacttttcaggacatgtgttcactgtccggaagaaagaagagtataagatggccctctacaatttgtatccaggcgtgtttgagaccgttgaaatgcttccctctaaagctggcatctggagagtagagtgcttgatcggagaacatcttcacgcaggtatgagcaccttgttcctcgtgtacagcaacaaatgtcagaccccacttggcatggccagtggacacattcgcgactttcagatcacagcatctggccagtatggacaatgggccccaaagttggctcgcctccattactccggtagcataaatgcgtggtccactaaagaacctttcagctggattaaggtcgatcttcttgcccccatgatcatccacggcattaagacacagggagcgaggcagaaattctcctccctctacatctcacagttcattattatgtatagtttggacggcaagaagtggcaaacttatagaggtaacagtactggaacactcatggtgttcttcggcaacgttgatagctctggcatcaaacacaacatctttaatcctcccataatagctcggtacatcagattgcatccgacccactacagcattaggagtacactccgaatggagcttatgggttgcgacttgaattcctgttcaatgccactcggaatggagtctaaagccatctctgatgcacagataaccgccagtagctactttacgaacatgtttgctacgtggtcaccctctaaggcaaggcttcatttgcaaggccggtctaatgcctggagacctcaggtgaacaacccgaaagaatggctccaggtggactttcagaagaccatgaaagtaacaggtgtcactactcagggagttaagtccttgctcaccagcatgtatgtgaaggagttccttatttcctcatcacaagatggccaccagtggaccctcttctttcagaatggtaaggtcaaagtgtttcagggcaatcaagacagcttcacacccgtggtgaacagtcttgatcctccactcttgacacgataccttcgaatccatccacagtcttgggttcaccagattgcattgcgcatggaagtacttggatgcgaggctcaggacctctac

SEQ ID NO: 50 - protein, 1457 aa, synthetic construct
  REGION 1..1457: note = Variant of human B-domain deleted Factor VIII
MQIELSTCFFLCLLRFCFSATRRYYLGAVELSWDYMQSDLGELPVDARFPPRVPKSFPFNTSVVYKKTLFVEFTDHLFNIAKPRPPWMGLLGPTILAEVYDTVVITLKNMASHPVSLHAVGVSYWKASEGAEYDDQTSQREKEDDKVFPGGSHTYVWQVLKENGPMASDPLCLTYSYLSHVDLVKDLNSGLIGALLVCREGSLAKEKTQTLHKFILLFAVFDEGKSWHSETKNSLMQDRDAASARAWPKMHTVNGYVNRSLPGLIGCHRKSVYWHVIGMGTTPEVHSIFLEGHTFLVRNHRQASLEISPITFLTAQTLLMDLGQFLLFCHISSHQHDGMEAYVKVDSCPEEPQLRMKNNEEAEDYDDDLTDSEMDVVRFDDDNSPSFIQIRSVAKKHPKTWVHYIAAEEEDWDYAPLVLAPDDRSYKSQYLNNGPQRIGRKYKKVRFMAYTDETFKTREAIQHESGILGPLLYGEVGDTLLIIFKNQASRPYNIYPHGITDVRPLYSRRLPKGVKHLKDFPILPGEIFKYKWTVTVEDGPTKSDPRCLTRYYSSFVNMERDLASGLIGPLLICYKESVDQRGNQIMSDKRNVILFSVFDENRSWYLTENIQRFLPNPAGVQLEDPEFQASNIMHSINGYVFDSLQLSVCLHEVAYWYILSIGAQTDFLSVFFSGYTFKHKMVYEDTLTLFPFSGETVFMSMENPGLWILGCHNSDFRNRGMTALLKVSSCDKNTGDYYEDSYEDISAYLLSKNNAIEPRSFSQNPPVLKRHQREITRTTLQSDQEEIDYDDTISVEMKKEDFDIYDEDENQSPRSFQKKTRHYFIAAVERLWDYGMSSSPHVLRNRAQSGSVPQFKKVVFQEFTDGSFTQPLYRGELNEHLGLLGPYIRAEVEDNIMVTFRNQASRPYSFYSSLISYEEDQRQGAEPRKNFVKPNETKTYFWKVQHHMAPTKDEFDCKAWAYFSDVDLEKDVHSGLIGPLLVCHTNTLNPAHGRQVTVQEFALFFTIFDETKSWYFTENMERNCRAPCNIQMEDPTFKENYRFHAINGYIMDTLPGLVMAQDQRIRWYLLSMGSNENIHSIHFSGHVFTVRKKEEYKMALYNLYPGVFETVEMLPSKAGIWRVECLIGEHLHAGMSTLFLVYSNKCQTPLGMASGHIRDFQITASGQYGQWAPKLARLHYSGSINAWSTKEPFSWIKVDLLAPMIIHGIKTQGARQKFSSLYISQFIIMYSLDGKKWQTYRGNSTGTLMVFFGNVDSSGIKHNIFNPPIIARYIRLHPTHYSIRSTLRMELMGCDLNSCSMPLGMESKAISDAQITASSYFTNMFATWSPSKARLHLQGRSNAWRPQVNNPKEWLQVDFQKTMKVTGVTTQGVKSLLTSMYVKEFLISSSQDGHQWTLFFQNGKVKVFQGNQDSFTPVVNSLDPPLLTRYLRIHPQSWVHQIALRMEVLGCEAQDLY

SEQ ID NO: 51 - DNA, 4371 bp, synthetic construct
  misc_feature 1..4371: note = Variant of human B-domain deleted Factor VIII
  source 1..4371: mol_type = other DNA
atgcagattgaactgtctacctgcttcttcctctgtttgctgaggttctgctttagcgccactagacggtactaccttggcgctgtggagctgtcctgggactatatgcagagtgatttgggagagcttcccgtcgacgcacgatttcctcctcgcgttccaaagtcatttcccttcaacacaagcgtggtgtacaagaagacgctcttcgtcgaattcaccgatcacctgttcaatatcgccaaacccagaccaccatggatgggtcttttggggcctaccatacaagcggaggtgtatgacacagttgttatcactctcaagaacatggcttctcatccggtaagtcttcacgcagtgggcgtgtcctactggaaagcttcagaaggagccgagtatgatgatcagacatcccagagggagaaagaagacgacaaggtatttccaggtgggtctcatacctatgtgtggcaagtgctcaaagagaatggccctatggcaagcgatccgctctgtttgacttacagctacctttcacacgttgacctcgtcaaggacctcaactccgggttgattggagccttgttggtatgcagggaaggatctcttgccaaagagaagacacagaccctccacaagtttatccttctctttgctgtgttcgatgagggcaaaagttggcatagcgaaacgaagaattccctcatgcaggatcgcgacgcagccagcgccagagcttggcccaagatgcacactgtgaacggatatgtcaataggtcacttcctggcttgattgggtgtcatcggaaaagtgtctactggcacgtgatcggaatggggacaacaccagaggtccactccatatttctcgaaggccataccttccttgttcgaaaccacagacaggcatccttggagatctctcccattacctttctcactgcccaaacgctccttatggacttgggtcagttccttctcttctgccatatcagctcacaccagcatgatggtatggaagcttatgtgaaagtcgacagttgtcctgaggagccacagttgcgcatgaagaataatgaagaatgggaggattacgacgacgatctcaccgattctgagatggacgtggtgaggtttgatgacgacaactctccctccttcattcaaatccggagcgtggcgaagaaacaccccaagacttgggtccactatatagcggcggaagaggaggattgggattacgctcctcttgtattggcaccagatgaccgctcatacaaaagccagtacctcaacaacggaccgcagagaattggccggaagtataagaaagtgcgatttatggcctatacagacgaaacctttaagacaagggaggccatccagcatgagagtgggattttgggacctcttctttacggcgaagttggtgataccctcctcatcatcttcaagaatcaagcttctcgcccctataacatttacccacacgggatcactgacgttaggcctttgtatagcagaagacttcccaaaggcgtgaagcatctcaaagacttccccattttgccaggcgagatctttaagtacaaatggaccgtcacagtggaagatggaccgactaaatcagaccctcgatgccttacgcggtactattcctccttcgtgaatatggagagagatttggcaagcggactcataggaccactcctcatctgttacaaggaatctgtagaccagaggggtaaccagattatgagtgataaacgcaatgtgatcctttttagcgtcttcgacgagaaccggtcctggtacttgaccgagaatatacaaaggttccttcccaaccccgcaggcgttcagttggaagaccctgagtttcaggccagcaatattatgcactcaatcaacggctatgtgtttgatagtctccagctttctgtttgcctccatgaagtagcctattggtacatcttgtcaattggtgctcaaacagacttcctctccgtcttcttctccggctacacctttaagcacaagatggtgtatgaggacactctcacactctttccattttctggagaaaccgtgttcatgagcatggagaatccaggcctttggatcttgggttgccacaacagtgattttcgcaatcggggaatgactgctctcctcaaagtcagcagctgtgataagaacacaggcgactattacgaagattcttacgaggacataagtgcctacttgttgtccaagaataacgccattgagcccagatcattctcccagaatcctcccgtgcttaaaaggcatcagcgcgaaatcaccagaactactcttcagtctgatcaagaggagattgactatgacgacaccataagcgtggaaatgaagaaggaggatttcgatatctatgacgaagatgagaaccagtctccgcggagctttcagaagaagacgcgacactacttcattgcagcagtcgaaaggctttgggactacggtatgtcatcatcccctcatgtgttgcgcaatagagctcagagtggaagtgttccacagttcaagaaagtcgtctttcaagagtttacagatggcagcttcacacagcctctctatcggggcgagcttaacgaacatttgggactccttggtccctatatccgagccgaagtggaggacaacattatggttacctttaggaatcaagcctctcgcccctacagcttctactcctccctcatcagttatgaggaggatcagagacaaggcgctgaaccacggaagaactttgtgaaaccgaatgagacgaagacctacttctggaaagtacagcaccacatggcccccacaaaagacgaattcgattgcaaagcatgggcgtatttttcagacgttgacttggagaaagatgtacattcaggacttattggtcctttgttggtgtgtcacactaacactctcaatccagcccatggcaggcaggtgacagtccaggaattcgctcttttctttaccatctttgatgagaccaagtcctggtacttcacggaaaacatggagcgcaattgcagagccccctgtaacatacagatggaggaccctacctttaaggaaaattatcggttccacgcaatcaacggatacattatggatacactccctggccttgtgatggctcaggaccaacgaatcaggtggtacctcctcagcatgggttctaatgagaacatacactccattcacttttcaggacatgtgttcactgtccggaagaaagaagagtataagatggccctctacaatttgtatccaggcgtgtttgagaccgttgaaatgcttccctctaaagctggcatctggagagtagagtgcttgatcggagaacatcttcacgcaggtatgagcaccttgttcctcgtgtacagcaacaaatgtcagaccccacttggcatggccagtggacacattcgcgactttcagatcacagcatctggccagtatggacaatgggccccaaagttggctcgcctccattactccggtagcataaatgcgtggtccactaaagaacctttcagctggattaaggtcgatcttcttgcccccatgatcatccacggcattaagacacagggagcgaggcagaaattctcctccctctacatctcacagttcattattatgtatagtttggacggcaagaagtggcaaacttatagaggtaacagtactggaacactcatggtgttcttcggcaacgttgatagctctggcatcaaacacaacatctttaatcctcccataatagctcggtacatcagattgcatccgacccactacagcattaggagtacactccgaatggagcttatgggttgcgacttgaattcctgttcaatgccactcggaatggagtctaaagccatctctgatgcacagataaccgccagtagctactttacgaacatgtttgctacgtggtcaccctctaaggcaaggcttcatttgcaaggccggtctaatgcctggagacctcaggtgaacaacccgaaagaatggctccaggtggactttcagaagaccatgaaagtaacaggtgtcactactcagggagttaagtccttgctcaccagcatgtatgtgaaggagttccttatttcctcatcacaagatggccaccagtggaccctcttctttcagaatggtaaggtcaaagtgtttcagggcaatcaagacagcttcacacccgtggtgaacagtcttgatcctccactcttgacacgataccttcgaatccatccacagtcttgggttcaccagattgcattgcgcatggaagtacttggatgcgaggctcaggacctctac

SEQ ID NO: 52 - protein, 1457 aa, synthetic construct
  REGION 1..1457: note = Variant of human B-domain deleted Factor VIII
MQIELSTCFFLCLLRFCFSATRRYYLGAVELSWDYMQSDLGELPVDARFPPRVPKSFPFNTSVVYKKTLFVEFTDHLFNIAKPRPPWMGLLGPTIQAEVYDTVVITLKNMASHPVSLHAVGVSYWKASEGAEYDDQTSQREKEDDKVFPGGSHTYVWQVLKENGPMASDPLCLTYSYLSHVDLVKDLNSGLIGALLVCREGSLAKEKTQTLHKFILLFAVFDEGKSWHSETKNSLMQDRDAASARAWPKMHTVNGYVNRSLPGLIGCHRKSVYWHVIGMGTTPEVHSIFLEGHTFLVRNHRQASLEISPITFLTAQTLLMDLGQFLLFCHISSHQHDGMEAYVKVDSCPEEPQLRMKNNEEWEDYDDDLTDSEMDVVRFDDDNSPSFIQIRSVAKKHPKTWVHYIAAEEEDWDYAPLVLAPDDRSYKSQYLNNGPQRIGRKYKKVRFMAYTDETFKTREAIQHESGILGPLLYGEVGDTLLIIFKNQASRPYNIYPHGITDVRPLYSRRLPKGVKHLKDFPILPGEIFKYKWTVTVEDGPTKSDPRCLTRYYSSFVNMERDLASGLIGPLLICYKESVDQRGNQIMSDKRNVILFSVFDENRSWYLTENIQRFLPNPAGVQLEDPEFQASNIMHSINGYVFDSLQLSVCLHEVAYWYILSIGAQTDFLSVFFSGYTFKHKMVYEDTLTLFPFSGETVFMSMENPGLWILGCHNSDFRNRGMTALLKVSSCDKNTGDYYEDSYEDISAYLLSKNNAIEPRSFSQNPPVLKRHQREITRTTLQSDQEEIDYDDTISVEMKKEDFDIYDEDENQSPRSFQKKTRHYFIAAVERLWDYGMSSSPHVLRNRAQSGSVPQFKKVVFQEFTDGSFTQPLYRGELNEHLGLLGPYIRAEVEDNIMVTFRNQASRPYSFYSSLISYEEDQRQGAEPRKNFVKPNETKTYFWKVQHHMAPTKDEFDCKAWAYFSDVDLEKDVHSGLIGPLLVCHTNTLNPAHGRQVTVQEFALFFTIFDETKSWYFTENMERNCRAPCNIQMEDPTFKENYRFHAINGYIMDTLPGLVMAQDQRIRWYLLSMGSNENIHSIHFSGHVFTVRKKEEYKMALYNLYPGVFETVEMLPSKAGIWRVECLIGEHLHAGMSTLFLVYSNKCQTPLGMASGHIRDFQITASGQYGQWAPKLARLHYSGSINAWSTKEPFSWIKVDLLAPMIIHGIKTQGARQKFSSLYISQFIIMYSLDGKKWQTYRGNSTGTLMVFFGNVDSSGIKHNIFNPPIIARYIRLHPTHYSIRSTLRMELMGCDLNSCSMPLGMESKAISDAQITASSYFTNMFATWSPSKARLHLQGRSNAWRPQVNNPKEWLQVDFQKTMKVTGVTTQGVKSLLTSMYVKEFLISSSQDGHQWTLFFQNGKVKVFQGNQDSFTPVVNSLDPPLLTRYLRIHPQSWVHQIALRMEVLGCEAQDLY

SEQ ID NO: 53 - DNA, 4371 bp, synthetic construct
  misc_feature 1..4371: note = Variant of human B-domain deleted Factor VIII
  source 1..4371: mol_type = other DNA
atgcagattgaactgtctacctgcttcttcctctgtttgctgaggttctgctttagcgccactagacggtactaccttggcgctgtggagctgtcctgggactatatgcagagtgatttgggagagcttcccgtcgacgcacgatttcctcctcgcgttccaaagtcatttcccttcaacacaagcggggtgtacaagaagacgctcttcgtcgaattcaccgatcacctgttcaatatcgccaaacccagaccaccatggatgggtcttttggggcctaccatacaagcggaggtgtatgacacagttgttatcactctcaagaacatggcttctcatccggtaagtcttcacgcagtgggcgtgtcctactggaaagcttcagaaggagccgagtatgatgatcagacatcccagagggagaaagaagacgacaaggtatttccaggtgggtctcatacctatgtgtggcaagtgctcaaagagaatggccctatggcaagcgatccgctctgtttgacttacagctacctttcacacgttgacctcgtcaaggacctcaactccgggttgattggagccttgttggtatgcagggaaggatctcttgccaaagagaagacacagaccctccacaagtttatccttctctttgctgtgttcgatgagggcaaaagttggcatagcgaaacgaagaattccctcatgcaggatcgcgacgcagccagcgccagagcttggcccaagatgcacactgtgaacggatatgtcaataggtcacttcctggcttgattgggtgtcatcggaaaagtgtctactggcacgtgatcggaatggggacaacaccagaggtccactccatatttctcgaaggccataccttccttgttcgaaaccacagacaggcatccttggagatctctcccattacctttctcactgcccaaacgctccttatggacttgggtcagttccttctcttctgccatatcagctcacaccagcatgatggtatggaagcttatgtgaaagtcgacagttgtcctgaggagccacagttgcgcatgaagaataatgaagaagccgaggattacgacgacgatctcaccgattctgagatggacgtggtgaggtttgatgacgacaactctccctccttcattcaaatccggagcgtggcgaagaaacaccccaagacttgggtccactatatagcggcggaagaggaggattgggattacgctcctcttgtattggcaccagatgaccgctcatacaaaagccagtacctcaacaacggaccgcagagaattggccggaagtataagaaagtgcgatttatggcctatacagacgaaacctttaagacaagggaggccatccagcatgagagtgggattttgggacctcttctttacggcgaagttggtgataccctcctcatcatcttcaagaatcaagcttctcgcccctataacatttacccacacgggatcactgacgttaggcctttgtatagcagaagacttcccaaaggcgtgaagcatctcaaagacttccccattttgccaggcgagatctttaagtacaaatggaccgtcacagtggaagatggaccgactaaatcagaccctcgatgccttacgcggtactattcctccttcgtgaatatggagagagatttggcaagcggactcataggaccactcctcatctgttacaaggaatctgtagaccagaggggtaaccagattatgagtgataaacgcaatgtgatcctttttagcgtcttcgacgagaaccggtcctggtacttgaccgagaatatacaaaggttccttcccaaccccgcaggcgttcagttggaagaccctgagtttcaggccagcaatattatgcactcaatcaacggctatgtgtttgatagtctccagctttctgtttgcctccatgaagtagcctattggtacatcttgtcaattggtgctcaaacagacttcctctccgtcttcttctccggctacacctttaagcacaagatggtgtatgaggacactctcacactctttccattttctggagaaaccgtgttcatgagcatggagaatccaggcctttggatcttgggttgccacaacagtgattttcgcaatcggggaatgactgctctcctcaaagtcagcagctgtgataagaacacaggcgactattacgaagattcttacgaggacataagtgcctacttgttgtccaagaataacgccattgagcccagatcattctcccagaatcctcccgtgcttaaaaggcatcagcgcgaaatcaccagaactactcttcagtctgatcaagaggagattgactatgacgacaccataagcgtggaaatgaagaaggaggatttcgatatctatgacgaagatgagaaccagtctccgcggagctttcagaagaagacgcgacactacttcattgcagcagtcgaaaggctttgggactacggtatgtcatcatcccctcatgtgttgcgcaatagagctcagagtggaagtgttccacagttcaagaaagtcgtctttcaagagtttacagatggcagcttcacacagcctctctatcggggcgagcttaacgaacatttgggactccttggtccctatatccgagccgaagtggaggacaacattatggttacctttaggaatcaagcctctcgcccctacagcttctactcctccctcatcagttatgaggaggatcagagacaaggcgctgaaccacggaagaactttgtgaaaccgaatgagacgaagacctacttctggaaagtacagcaccacatggcccccacaaaagacgaattcgattgcaaagcatgggcgtatttttcagacgttgacttggagaaagatgtacattcaggacttattggtcctttgttggtgtgtcacactaacactctcaatccagcccatggcaggcaggtgacagtccaggaattcgctcttttctttaccatctttgatgagaccaagtcctggtacttcacggaaaacatggagcgcaattgcagagccccctgtaacatacagatggaggaccctacctttaaggaaaattatcggttccacgcaatcaacggatacattatggatacactccctggccttgtgatggctcaggaccaacgaatcaggtggtacctcctcagcatgggttctaatgagaacatacactccattcacttttcaggacatgtgttcactgtccggaagaaagaagagtataagatggccctctacaatttgtatccaggcgtgtttgagaccgttgaaatgcttccctctaaagctggcatctggagagtagagtgcttgatcggagaacatcttcacgcaggtatgagcaccttgttcctcgtgtacagcaacaaatgtcagaccccacttggcatggccagtggacacattcgcgactttcagatcacagcatctggccagtatggacaatgggccccaaagttggctcgcctccattactccggtagcataaatgcgtggtccactaaagaacctttcagctggattaaggtcgatcttcttgcccccatgatcatccacggcattaagacacagggagcgaggcagaaattctcctccctctacatctcacagttcattattatgtatagtttggacggcaagaagtggcaaacttatagaggtaacagtactggaacactcatggtgttcttcggcaacgttgatagctctggcatcaaacacaacatctttaatcctcccataatagctcggtacatcagattgcatccgacccactacagcattaggagtacactccgaatggagcttatgggttgcgacttgaattcctgttcaatgccactcggaatggagtctaaagccatctctgatgcacagataaccgccagtagctactttacgaacatgtttgctacgtggtcaccctctaaggcaaggcttcatttgcaaggccggtctaatgcctggagacctcaggtgaacaacccgaaagaatggctccaggtggactttcagaagaccatgaaagtaacaggtgtcactactcagggagttaagtccttgctcaccagcatgtatgtgaaggagttccttatttcctcatcacaagatggccaccagtggaccctcttctttcagaatggtaaggtcaaagtgtttcagggcaatcaagacagcttcacacccgtggtgaacagtcttgatcctccactcttgacacgataccttcgaatccatccacagtcttgggttcaccagattgcattgcgcatggaagtacttggatgcgaggctcaggacctctac

SEQ ID NO: 54 - protein, 1457 aa, synthetic construct
  REGION 1..1457: note = Variant of human B-domain deleted Factor VIII
MQIELSTCFFLCLLRFCFSATRRYYLGAVELSWDYMQSDLGELPVDARFPPRVPKSFPFNTSGVYKKTLFVEFTDHLFNIAKPRPPWMGLLGPTIQAEVYDTVVITLKNMASHPVSLHAVGVSYWKASEGAEYDDQTSQREKEDDKVFPGGSHTYVWQVLKENGPMASDPLCLTYSYLSHVDLVKDLNSGLIGALLVCREGSLAKEKTQTLHKFILLFAVFDEGKSWHSETKNSLMQDRDAASARAWPKMHTVNGYVNRSLPGLIGCHRKSVYWHVIGMGTTPEVHSIFLEGHTFLVRNHRQASLEISPITFLTAQTLLMDLGQFLLFCHISSHQHDGMEAYVKVDSCPEEPQLRMKNNEEAEDYDDDLTDSEMDVVRFDDDNSPSFIQIRSVAKKHPKTWVHYIAAEEEDWDYAPLVLAPDDRSYKSQYLNNGPQRIGRKYKKVRFMAYTDETFKTREAIQHESGILGPLLYGEVGDTLLIIFKNQASRPYNIYPHGITDVRPLYSRRLPKGVKHLKDFPILPGEIFKYKWTVTVEDGPTKSDPRCLTRYYSSFVNMERDLASGLIGPLLICYKESVDQRGNQIMSDKRNVILFSVFDENRSWYLTENIQRFLPNPAGVQLEDPEFQASNIMHSINGYVFDSLQLSVCLHEVAYWYILSIGAQTDFLSVFFSGYTFKHKMVYEDTLTLFPFSGETVFMSMENPGLWILGCHNSDFRNRGMTALLKVSSCDKNTGDYYEDSYEDISAYLLSKNNAIEPRSFSQNPPVLKRHQREITRTTLQSDQEEIDYDDTISVEMKKEDFDIYDEDENQSPRSFQKKTRHYFIAAVERLWDYGMSSSPHVLRNRAQSGSVPQFKKVVFQEFTDGSFTQPLYRGELNEHLGLLGPYIRAEVEDNIMVTFRNQASRPYSFYSSLISYEEDQRQGAEPRKNFVKPNETKTYFWKVQHHMAPTKDEFDCKAWAYFSDVDLEKDVHSGLIGPLLVCHTNTLNPAHGRQVTVQEFALFFTIFDETKSWYFTENMERNCRAPCNIQMEDPTFKENYRFHAINGYIMDTLPGLVMAQDQRIRWYLLSMGSNENIHSIHFSGHVFTVRKKEEYKMALYNLYPGVFETVEMLPSKAGIWRVECLIGEHLHAGMSTLFLVYSNKCQTPLGMASGHIRDFQITASGQYGQWAPKLARLHYSGSINAWSTKEPFSWIKVDLLAPMIIHGIKTQGARQKFSSLYISQFIIMYSLDGKKWQTYRGNSTGTLMVFFGNVDSSGIKHNIFNPPIIARYIRLHPTHYSIRSTLRMELMGCDLNSCSMPLGMESKAISDAQITASSYFTNMFATWSPSKARLHLQGRSNAWRPQVNNPKEWLQVDFQKTMKVTGVTTQGVKSLLTSMYVKEFLISSSQDGHQWTLFFQNGKVKVFQGNQDSFTPVVNSLDPPLLTRYLRIHPQSWVHQIALRMEVLGCEAQDLY

SEQ ID NO: 55 - DNA, 4371 bp, synthetic construct
  misc_feature 1..4371: note = Variant of human B-domain deleted Factor VIII
  source 1..4371: mol_type = other DNA
atgcagattgaactgtctacctgcttcttcctctgtttgctgaggttctgctttagcgccactagacggtactaccttggcgctgtggagctgtcctgggactatatgcagagtgatttgggagagcttcccgtcgacgcacgatttcctcctcgcgttccaaagtcatttcccttcaacacaagcgtggtgtacaagaagacgctcttcgtcgaattcaccgatcacctgttcaatatcgccaaacccagaccaccatggatgggtcttttggggcctaccatacaagcggaggtgtatgacacagttgttatcactctcaagaacatggcttctcatccggtaagtcttcacgcagtgggcgtgtcctactggaaagcttcagaaggagccgagtatgatgatcagacatcccagagggagaaagaagacgacaaggtatttccaggtgggtctcatacctatgtgtggcaagtgctcaaagagaatggccctatggcaagcgatccgctctgtttgacttacagctacctttcacacgttgacctcgtcaaggacctcaactccgggttgattggagccttgttggtatgcagggaaggatctcttgccaaagagaagacacagaccctccacaagtttatccttctctttgctgtgttcgatgagggcaaaagttggcatagcgaaacgaagaattccctcatgcaggatcgcgacgcagccagcgccagagcttggcccaagatgcacactgtgaacggatatgtcaataggtcacttcctggcttgattgggtgtcatcggaaaagtgtctactggcacgtgatcggaatggggacaacaccagaggtccactccatatttctcgaaggccataccttccttgttcgaaaccacagacaggcatccttggagatctctcccattacctttctcactgcccaaacgctccttatggacttgggtcagttccttctcttctgccatatcagctcacaccagcatgatggtatggaagcttatgtgaaagtcgacagttgtcctgaggagccacagttgcgcatgaagaataatgaagaagccgaggattacgacgacgatctcaccgattctgagatggacgtggtgaggtttgatgacgacaactctccctccttcattcaaatccggagcgtggcgaagaaacaccccaagacttgggtccactatatagcggcggaagaggaggattgggattacgctcctcttgtattggcaccagatgaccgctcatacaaaagccagtacctcaacaacggaccgcagagaattggccggaagtataagaaagtgcgatttatggcctatacagacgaaacctttaagacaagggaggccatccagcatgagagtgggattttgggacctcttctttacggcgaagttggtgataccctcctcatcatcttcaagaatcaagcttctcgcccctataacatttacccacacgggatcactgacgttaggcctttgtatagcagaagacttcccaaaggcgtgaagcatctcaaagacttccccattttgccaggcgagatctttaagtacaaatggaccgtcacagtggaagatggaccgactaaatcagaccctcgatgccttacgcggtactattcctccttcgtgaatatggagagagatttggcaagcggactcataggaccactcctcatctgttacaaggaatctgtagaccagaggggtaaccagattatgagtgataaacgcaatgtgatcctttttagcgtcttcgacgagaaccggtcctggtacttgaccgagaatatacaaaggttccttcccaaccccgcaggcgttcagttggaagaccctgagtttcaggccagcaatattatgcactcaatcaacggctatgtgtttgatagtctccagctttctgtttgcctccatgaagtagcctattggtacatcttgtcaattggtgctcaaacagacttcctctccgtcttcttctccggctacacctttaagcacaagatggtgtatgaggacactctcacactctttccattttctggagaaaccgtgttcatgagcatggagaatccaggcctttggatcttgggttgccacaacagtgattttcgcaatcggggaatgactgctctcctcaaagtcagcagctgtgataagaacacaggcgactattacgaagattcttacgaggacataagtgcctacttgttgtccaagaataacgccattgagcccagatcattctcccagaatcctcccgtgcttaaaaggcatcagcgcgaaatcaccagaactactcttcagtctgatcaagaggagattgactatgacgacaccataagcgtggaaatgaagaaggaggatttcgatatctatgacgaagatgagaaccagtctccgcggagctttcagaagaagacgcgacactacttcattgcagcagtcgaaaggctttgggactacggtatgtcatcatcccctcatgtgttgcgcaatagagctcagagtggaagtgttccacagttcaagaaagtcgtctttcaagagtttacagatggcagcttcacacagcctctcctgcggggcgagcttaacgaacatttgggactccttggtccctatatccgagccgaagtggaggacaacattatggttacctttaggaatcaagcctctcgcccctacagcttctactcctccctcatcagttatgaggaggatcagagacaaggcgctgaaccacggaagaactttgtgaaaccgaatgagacgaagacctacttctggaaagtacagcaccacatggcccccacaaaagacgaattcgattgcaaagcatgggcgtatttttcagacgttgacttggagaaagatgtacattcaggacttattggtcctttgttggtgtgtcacactaacactctcaatccagcccatggcaggcaggtgacagtccaggaattcgctcttttctttaccatctttgatgagaccaagtcctggtacttcacggaaaacatggagcgcaattgcagagccccctgtaacatacagatggaggaccctacctttaaggaaaattatcggttccacgcaatcaacggatacattatggatacactccctggccttgtgatggctcaggaccaacgaatcaggtggtacctcctcagcatgggttctaatgagaacatacactccattcacttttcaggacatgtgttcactgtccggaagaaagaagagtataagatggccctctacaatttgtatccaggcgtgtttgagaccgttgaaatgcttccctctaaagctggcatctggagagtagagtgcttgatcggagaacatcttcacgcaggtatgagcaccttgttcctcgtgtacagcaacaaatgtcagaccccacttggcatggccagtggacacattcgcgactttcagatcacagcatctggccagtatggacaatgggccccaaagttggctcgcctccattactccggtagcataaatgcgtggtccactaaagaacctttcagctggattaaggtcgatcttcttgcccccatgatcatccacggcattaagacacagggagcgaggcagaaattctcctccctctacatctcacagttcattattatgtatagtttggacggcaagaagtggcaaacttatagaggtaacagtactggaacactcatggtgttcttcggcaacgttgatagctctggcatcaaacacaacatctttaatcctcccataatagctcggtacatcagattgcatccgacccactacagcattaggagtacactccgaatggagcttatgggttgcgacttgaattcctgttcaatgccactcggaatggagtctaaagccatctctgatgcacagataaccgccagtagctactttacgaacatgtttgctacgtggtcaccctctaaggcaaggcttcatttgcaaggccggtctaatgcctggagacctcaggtgaacaacccgaaagaatggctccaggtggactttcagaagaccatgaaagtaacaggtgtcactactcagggagttaagtccttgctcaccagcatgtatgtgaaggagttccttatttcctcatcacaagatggccaccagtggaccctcttctttcagaatggtaaggtcaaagtgtttcagggcaatcaagacagcttcacacccgtggtgaacagtcttgatcctccactcttgacacgataccttcgaatccatccacagtcttgggttcaccagattgcattgcgcatggaagtacttggatgcgaggctcaggacctctac

SEQ ID NO: 56 - protein, 1457 aa, synthetic construct
  REGION 1..1457: note = Variant of human B-domain deleted Factor VIII
MQIELSTCFFLCLLRFCFSATRRYYLGAVELSWDYMQSDLGELPVDARFPPRVPKSFPFNTSVVYKKTLFVEFTDHLFNIAKPRPPWMGLLGPTIQAEVYDTVVITLKNMASHPVSLHAVGVSYWKASEGAEYDDQTSQREKEDDKVFPGGSHTYVWQVLKENGPMASDPLCLTYSYLSHVDLVKDLNSGLIGALLVCREGSLAKEKTQTLHKFILLFAVFDEGKSWHSETKNSLMQDRDAASARAWPKMHTVNGYVNRSLPGLIGCHRKSVYWHVIGMGTTPEVHSIFLEGHTFLVRNHRQASLEISPITFLTAQTLLMDLGQFLLFCHISSHQHDGMEAYVKVDSCPEEPQLRMKNNEEAEDYDDDLTDSEMDVVRFDDDNSPSFIQIRSVAKKHPKTWVHYIAAEEEDWDYAPLVLAPDDRSYKSQYLNNGPQRIGRKYKKVRFMAYTDETFKTREAIQHESGILGPLLYGEVGDTLLIIFKNQASRPYNIYPHGITDVRPLYSRRLPKGVKHLKDFPILPGEIFKYKWTVTVEDGPTKSDPRCLTRYYSSFVNMERDLASGLIGPLLICYKESVDQRGNQIMSDKRNVILFSVFDENRSWYLTENIQRFLPNPAGVQLEDPEFQASNIMHSINGYVFDSLQLSVCLHEVAYWYILSIGAQTDFLSVFFSGYTFKHKMVYEDTLTLFPFSGETVFMSMENPGLWILGCHNSDFRNRGMTALLKVSSCDKNTGDYYEDSYEDISAYLLSKNNAIEPRSFSQNPPVLKRHQREITRTTLQSDQEEIDYDDTISVEMKKEDFDIYDEDENQSPRSFQKKTRHYFIAAVERLWDYGMSSSPHVLRNRAQSGSVPQFKKVVFQEFTDGSFTQPLLRGELNEHLGLLGPYIRAEVEDNIMVTFRNQASRPYSFYSSLISYEEDQRQGAEPRKNFVKPNETKTYFWKVQHHMAPTKDEFDCKAWAYFSDVDLEKDVHSGLIGPLLVCHTNTLNPAHGRQVTVQEFALFFTIFDETKSWYFTENMERNCRAPCNIQMEDPTFKENYRFHAINGYIMDTLPGLVMAQDQRIRWYLLSMGSNENIHSIHFSGHVFTVRKKEEYKMALYNLYPGVFETVEMLPSKAGIWRVECLIGEHLHAGMSTLFLVYSNKCQTPLGMASGHIRDFQITASGQYGQWAPKLARLHYSGSINAWSTKEPFSWIKVDLLAPMIIHGIKTQGARQKFSSLYISQFIIMYSLDGKKWQTYRGNSTGTLMVFFGNVDSSGIKHNIFNPPIIARYIRLHPTHYSIRSTLRMELMGCDLNSCSMPLGMESKAISDAQITASSYFTNMFATWSPSKARLHLQGRSNAWRPQVNNPKEWLQVDFQKTMKVTGVTTQGVKSLLTSMYVKEFLISSSQDGHQWTLFFQNGKVKVFQGNQDSFTPVVNSLDPPLLTRYLRIHPQSWVHQIALRMEVLGCEAQDLY

SEQ ID NO: 57 - DNA, 4371 bp, synthetic construct
  misc_feature 1..4371: note = Variant of human B-domain deleted Factor VIII
  source 1..4371: mol_type = other DNA
atgcagattgaactgtctacctgcttcttcctctgtttgctgaggttctgctttagcgccactagacggtactaccttggcgctgtggagctgtcctgggactatatgcagagtgatttgggagagcttcccgtcgacgcacgatttcctcctcgcgttccaaagtcatttcccttcaacacaagcgtggtgtacaagaagacgctcttcgtcgaattcaccgatcacctgttcaatatcgccaaacccagaccaccatggatgggtcttttggggcctaccatacaagcggaggtgtatgacacagttgttatcactctcaagaacatggcttctcatccggtaagtcttcacgcagtgggcgtgtcctactggaaagcttcagaaggagccgagtatgatgatcagacatcccagagggagaaagaagacgacaaggtatttccaggtgggtctcatacctatgtgtggcaagtgctcaaagagaatggccctatggcaagcgatccgctctgtttgacttacagctacctttcacacgttgacctcgtcaaggacctcaactccgggttgattggagccttgttggtatgcagggaaggatctcttgccaaagagaagacacagaccctccacaagtttatccttctctttgctgtgttcgatgagggcaaaagttggcatagcgaaacgaagaattccctcatgcaggatcgcgacgcagccagcgccagagcttggcccaagatgcacactgtgaacggatatgtcaataggtcacttcctggcttgattgggtgtcatcggaaaagtgtctactggcacgtgatcggaatggggacaacaccagaggtccactccatatttctcgaaggccataccttccttgttcgaaaccacagacaggcatccttggagatctctcccattacctttctcactgcccaaacgctccttatggacttgggtcagttccttctcttctgccatatcagctcacaccagcatgatggtatggaagcttatgtgaaagtcgacagttgtcctgaggagccacagttgcgcatgaagaataatgaagaagccgaggattacgacgacgatctcaccgattctgagatggacgtggtgaggtttgatgacgacaactctccctccttcattcaaatccggagcgtggcgaagaaacaccccaagacttgggtccactatatagcggcggaagaggaggattgggattacgctcctcttgtattggcaccagatgaccgctcatacaaaagccagtacctcaacaacggaccgcagagaattggccggaagtataagaaagtgcgatttatggcctatacagacgaaacctttaagacaagggaggccatccagcatgagagtgggattttgggacctcttctttacggcgaagttggtgataccctcctcatcatcttcaagaatcaagcttctcgcccctataacatttacccacacgggatcactgacgttaggcctttgtatagcagaagacttcccaaaggcgtgaagcatctcaaagacttccccattttgccaggcgagatctttaagtacaaatggaccgtcacagtggaagatggaccgactaaatcagaccctcgatgccttacgcggtactattcctccttcgtgaatatggagagagatttggcaagcggactcataggaccactcctcatctgttacaaggaatctgtagaccagaggggtaaccagattatgagtgataaacgcaatgtgatcctttttagcgtcttcgacgagaaccggtcctggtacttgaccgagaatatacaaaggttccttcccaaccccgcaggcgttcagttggaagaccctgagtttcaggccagcaatattatgcactcaatcaacggctatgtgtttgatagtctccagctttctgtttgcctccatgaagtagcctattggtacatcttgtcaattggtgctcaaacagacttcctctccgtcttcttctccggctacacctttaagcacaagatggtgtatgaggacactctcacactctttccattttctggagaaaccgtgttcatgagcatggagaatccaggcctttggatcttgggttgccacaacagtgattttcgcaatcggggaatgactgctctcctcaaagtcagcagctgtgataagaacacaggcgactattacgaagattcttacgaggacataagtgcctacttgttgtccaagaataacgccattgagcccagatcattctcccagaatcctcccgtgcttaaaaggcatcagcgcgaaatcaccagaactactcttcagtctgatcaagaggagattgactatgacgacaccataagcgtggaaatgaagaaggaggatttcgatatctatgacgaagatgagaaccagtctccgcggagctttcagaagaagacgcgacactacttcattgcagcagtcgaaaggctttgggactacggtatgtcatcatcccctcatgtgttgcgcaatagagctcagagtggaagtgttccacagttcaagaaagtcgtctttcaagagtttacagatggcagcttcacacagcctctctatcggggcgagcttaacgaacatttgggactccttggtccctatatccgagccgaagtggaggacaacattatggttacctttaggaatcaagcctctcgcccctacagcttctactcctccctcatcagttatgaggaggatcagagacaaggcgctgaaccacggaagaactttgtgaaaccgaatgagacgaagacctacttctggaaagtacagcaccacatggcccccacaaaagacgaattcgattgcaaagcatgggcgtatttttcagacgttgacttggagaaagatgtacattcaggacttattggtcctttgttggtgtgtcacactaacactctcaatccagcccatggcaggcaggtgacagtccaggaattcgctcttttctttaccatctttgatgagaccaagtcctggtacttcacggaaaacatggagcgcaattgcagagccccctgtaacatacagatggaggaccctacctttaaggaaaattatcggttccacgcaatcaacggatacattatggatacactccctggccttgtgatggctcaggaccaacgaatcaggtggtacctcctcagcatgggttctaatgagaacatacactccattcacttttcaggacatgtgttcactgtccggaagaaagaagagtataagatggccctctacaatttgtatccaggcgtgtttgagaccgttgaaatgcttccctctaaagctggcatctggagagtagagtgcttgatcggagaacatcttcacgcaggtatgagcaccttgttcctcgtgtacagcaacaaatgtcagaccccacttggcatggccagtggacacattcgcgactttcagatcacagcatctggccagtatggacaatgggccccaaagttggctcgcctccattactccggtagcataaatgcgtggtccactaaagaacctttcagctggattaaggtcgatcttcttgcccccatgatcatccacggcattaagacacagggagcgaggcagaaattctcctccctctacatctcacagttcattattatgtatagtttggacggcaagaagtggcaaacttatagaggtaacagtactggaacactcatggtgttcttcggcaacgttgatagctctggcatcaaacacaacatctttaatcctcccataatagctcggtacatcagattgcatccgacccactacagcattaggagtacactccgaatggagctttatggttgcgacttgaattcctgttcaatgccactcggaatggagtctaaagccatctctgatgcacagataaccgccagtagctactttacgaacatgtttgctacgtggtcaccctctaaggcaaggcttcatttgcaaggccggtctaatgcctggagacctcaggtgaacaacccgaaagaatggctccaggtggactttcagaagaccatgaaagtaacaggtgtcactactcagggagttaagtccttgctcaccagcatgtatgtgaaggagttccttatttcctcatcacaagatggccaccagtggaccctcttctttcagaatggtaaggtcaaagtgtttcagggcaatcaagacagcttcacacccgtggtgaacagtcttgatcctccactcttgacacgataccttcgaatccatccacagtcttgggttcaccagattgcattgcgcatggaagtacttggatgcgaggctcaggacctctac

SEQ ID NO: 58 - protein, 1457 aa, synthetic construct
  REGION 1..1457: note = Variant of human B-domain deleted Factor VIII
MQIELSTCFFLCLLRFCFSATRRYYLGAVELSWDYMQSDLGELPVDARFPPRVPKSFPFNTSVVYKKTLFVEFTDHLFNIAKPRPPWMGLLGPTIQAEVYDTVVITLKNMASHPVSLHAVGVSYWKASEGAEYDDQTSQREKEDDKVFPGGSHTYVWQVLKENGPMASDPLCLTYSYLSHVDLVKDLNSGLIGALLVCREGSLAKEKTQTLHKFILLFAVFDEGKSWHSETKNSLMQDRDAASARAWPKMHTVNGYVNRSLPGLIGCHRKSVYWHVIGMGTTPEVHSIFLEGHTFLVRNHRQASLEISPITFLTAQTLLMDLGQFLLFCHISSHQHDGMEAYVKVDSCPEEPQLRMKNNEEAEDYDDDLTDSEMDVVRFDDDNSPSFIQIRSVAKKHPKTWVHYIAAEEEDWDYAPLVLAPDDRSYKSQYLNNGPQRIGRKYKKVRFMAYTDETFKTREAIQHESGILGPLLYGEVGDTLLIIFKNQASRPYNIYPHGITDVRPLYSRRLPKGVKHLKDFPILPGEIFKYKWTVTVEDGPTKSDPRCLTRYYSSFVNMERDLASGLIGPLLICYKESVDQRGNQIMSDKRNVILFSVFDENRSWYLTENIQRFLPNPAGVQLEDPEFQASNIMHSINGYVFDSLQLSVCLHEVAYWYILSIGAQTDFLSVFFSGYTFKHKMVYEDTLTLFPFSGETVFMSMENPGLWILGCHNSDFRNRGMTALLKVSSCDKNTGDYYEDSYEDISAYLLSKNNAIEPRSFSQNPPVLKRHQREITRTTLQSDQEEIDYDDTISVEMKKEDFDIYDEDENQSPRSFQKKTRHYFIAAVERLWDYGMSSSPHVLRNRAQSGSVPQFKKVVFQEFTDGSFTQPLYRGELNEHLGLLGPYIRAEVEDNIMVTFRNQASRPYSFYSSLISYEEDQRQGAEPRKNFVKPNETKTYFWKVQHHMAPTKDEFDCKAWAYFSDVDLEKDVHSGLIGPLLVCHTNTLNPAHGRQVTVQEFALFFTIFDETKSWYFTENMERNCRAPCNIQMEDPTFKENYRFHAINGYIMDTLPGLVMAQDQRIRWYLLSMGSNENIHSIHFSGHVFTVRKKEEYKMALYNLYPGVFETVEMLPSKAGIWRVECLIGEHLHAGMSTLFLVYSNKCQTPLGMASGHIRDFQITASGQYGQWAPKLARLHYSGSINAWSTKEPFSWIKVDLLAPMIIHGIKTQGARQKFSSLYISQFIIMYSLDGKKWQTYRGNSTGTLMVFFGNVDSSGIKHNIFNPPIIARYIRLHPTHYSIRSTLRMELYGCDLNSCSMPLGMESKAISDAQITASSYFTNMFATWSPSKARLHLQGRSNAWRPQVNNPKEWLQVDFQKTMKVTGVTTQGVKSLLTSMYVKEFLISSSQDGHQWTLFFQNGKVKVFQGNQDSFTPVVNSLDPPLLTRYLRIHPQSWVHQIALRMEVLGCEAQDLY

SEQ ID NO: 59 - DNA, 4371 bp, synthetic construct
  misc_feature 1..4371: note = Variant of human B-domain deleted Factor VIII
  source 1..4371: mol_type = other DNA
atgcagattgaactgtctacctgcttcttcctctgtttgctgaggttctgctttagcgccactagacggtactaccttggcgctgtggagctgtcctgggactatatgcagagtgatttgggagagcttcccgtcgacgcacgatttcctcctcgcgttccaaagtcatttcccttcaacacaagcgtggtgtacaagaagacgctcttcgtcgaattcaccgatcacctgttcaatatcgccaaacccagaccaccatggatgggtcttttggggcctaccatacaagcggaggtgtatgacacagttgttatcactctcaagaacatggcttctcatccggtaagtcttcacgcagtgggcgtgtcctactggaaagcttcagaaggagccgagtatgatgatcagacatcccagagggagaaagaagacgacaaggtatttccaggtgggtctcatacctatgtgtggcaagtgctcaaagagaatggccctatggcaagcgatccgctctgtttgacttacagctacctttcacacgttgacctcgtcaaggacctcaactccgggttgattggagccttgttggtatgcagggaaggatctcttgccaaagagaagacacagaccctccacaagtttatccttctctttgctgtgttcgatgagggcaaaagttggcatagcgaaacgaagaattccctcatgcaggatcgcgacgcagccagcgccagagcttggcccaagatgcacactgtgaacggatatgtcaataggtcacttcctggcttgattgggtgtcatcggaaaagtgtctactggcacgtgatcggaatggggacaacaccagaggtccactccatatttctcgaaggccataccttccttgttcgaaaccacagacaggcatccttggagatctctcccattacctttctcactgcccaaacgctccttatggacttgggtcagttccttctcttctgccatatcagctcacaccagcatgatggtatggaagcttatgtgaaagtcgacagttgtcctgaggagccacagttgcgcatgaagaataatgaagaagccgaggattacgacgacgatctcaccgattctgagatggacgtggtgaggtttgatgacgacaactctccctccttcattcaaatccggagcgtggcgaagaaacaccccaagacttgggtccactatatagcggcggaagaggaggattgggattacgctcctcttgtattggcaccagatgaccgctcatacaaaagccagtacctcaacaacggaccgcagagaattggccggaagtataagaaagtgcgatttatggcctatacagacgaaacctttaagacaagggaggccatccagcatgagagtgggattttgggacctcttctttacggcgaagttggtgataccctcctcatcatcttcaagaatcaagcttctcgcccctataacatttacccacacgggatcactgacgttaggcctttgtatagcagaagacttcccaaaggcgtgaagcatctcaaagacttccccattttgccaggcgagatctttaagtacaaatggaccgtcacagtggaagatggaccgactaaatcagaccctcgatgccttacgcggtactattcctccttcgtgaatatggagagagatttggcaagcggactcataggaccactcctcatctgttacaaggaatctgtagaccagaggggtaaccagattatgagtgataaacgcaatgtgatcctttttagcgtcttcgacgagaaccggtcctggtacttgaccgagaatatacaaaggttccttcccaaccccgcaggcgttcagttggaagaccctgagtttcaggccagcaatattatgcactcaatcaacggctatgtgtttgatagtctccagctttctgtttgcctccatgaagtagcctattggtacatcttgtcaattggtgctcaaacagacttcctctccgtcttcttctccggctacacctttaagcacaagatggtgtatgaggacactctcacactctttccattttctggagaaaccgtgttcatgagcatggagaatccaggcctttggatcttgggttgccacaacagtgattttcgcaatcggggaatgactgctctcctcaaagtcagcagctgtgataagaacacaggcgactattacgaagattcttacgaggacataagtgcctacttgttgtccaagaataacgccattgagcccagatcattctcccagaatcctcccgtgcttaaaaggcatcagcgcgaaatcaccagaactactcttcagtctgatcaagaggagattgactatgacgacaccataagcgtggaaatgaagaaggaggatttcgatatctatgacgaagatgagaaccagtctccgcggagctttcagaagaagacgcgacactacttcattgcagcagtcgaaaggctttgggactacggtatgtcatcatcccctcatgtgttgcgcaatagagctcagagtggaagtgttccacagttcaagaaagtcgtctttcaagagtttacagatggcagcttcacacagcctctctatcggggcgagcttaacgaacatttgggactccttggtccctatatccgagccgaagtggaggacaacattatggttacctttaggaatcaagcctctcgcccctacagcttctactcctccctcatcagttatgaggaggatcagagacaaggcgctgaaccacggaagaactttgtgaaaccgaatgagacgaagacctacttctggaaagtacagcaccacatggcccccacaaaagacgaattcgattgcaaagcatgggcgtatttttcagacgttgacttggagaaagatgtacattcaggacttattggtcctttgttggtgtgtcacactaacactctcaatccagcccatggcaggcaggtgacagtccaggaattcgctcttttctttaccatctttgatgagaccaagtcctggtacttcacggaaaacatggagcgcaattgcagagccccctgtaacatacagatggaggaccctacctttaaggaaaattatcggttccacgcaatcaacggatacattatggatacactccctggccttgtgatggctcaggaccaacgaatcaggtggtacctcctcagcatgggttctaatgagaacatacactccattcacttttcaggacatgtgttcactgtccggaagaaagaagagtataagatggccctctacaatttgtatccaggcgtgtttgagaccgttgaaatgcttccctctaaagctggcatctggagagtagagtgcttgatcggagaacatcttcacgcaggtatgagcaccttgttcctcgtgtacagcaacaaatgtcagcagccacttggcatggccagtggacacattcgcgactttcagatcacagcatctggccagtatggacaatgggccccaaagttggctcgcctccattactccggtagcataaatgcgtggtccactaaagaacctttcagctggattaaggtcgatcttcttgcccccatgatcatccacggcattaagacacagggagcgaggcagaaattctcctccctctacatctcacagttcattattatgtatagtttggacggcaagaagtggcaaacttatagaggtaacagtactggaacactcatggtgttcttcggcaacgttgatagctctggcatcaaacacaacatctttaatcctcccataatagctcggtacatcagattgcatccgacccactacagcattaggagtacactccgaatggagcttatgggttgcgacttgaattcctgttcaatgccactcggaatggagtctaaagccatctctgatgcacagataaccgccagtagctactttacgaacatgtttgctacgtggtcaccctctaaggcaaggcttcatttgcaaggccggtctaatgcctggagacctcaggtgaacaacccgaaagaatggctccaggtggactttcagaagaccatgaaagtaacaggtgtcactactcagggagttaagtccttgctcaccagcatgtatgtgaaggagttccttatttcctcatcacaagatggccaccagtggaccctcttctttcagaatggtaaggtcaaagtgtttcagggcaatcaagacagcttcacacccgtggtgaacagtcttgatcctccactcttgacacgataccttcgaatccatccacagtcttgggttcaccagattgcattgcgcatggaagtacttggatgcgaggctcaggacctctac

SEQ ID NO: 60 - protein, 1457 aa, synthetic construct
  REGION 1..1457: note = Variant of human B-domain deleted Factor VIII
MQIELSTCFFLCLLRFCFSATRRYYLGAVELSWDYMQSDLGELPVDARFPPRVPKSFPFNTSVVYKKTLFVEFTDHLFNIAKPRPPWMGLLGPTIQAEVYDTVVITLKNMASHPVSLHAVGVSYWKASEGAEYDDQTSQREKEDDKVFPGGSHTYVWQVLKENGPMASDPLCLTYSYLSHVDLVKDLNSGLIGALLVCREGSLAKEKTQTLHKFILLFAVFDEGKSWHSETKNSLMQDRDAASARAWPKMHTVNGYVNRSLPGLIGCHRKSVYWHVIGMGTTPEVHSIFLEGHTFLVRNHRQASLEISPITFLTAQTLLMDLGQFLLFCHISSHQHDGMEAYVKVDSCPEEPQLRMKNNEEAEDYDDDLTDSEMDVVRFDDDNSPSFIQIRSVAKKHPKTWVHYIAAEEEDWDYAPLVLAPDDRSYKSQYLNNGPQRIGRKYKKVRFMAYTDETFKTREAIQHESGILGPLLYGEVGDTLLIIFKNQASRPYNIYPHGITDVRPLYSRRLPKGVKHLKDFPILPGEIFKYKWTVTVEDGPTKSDPRCLTRYYSSFVNMERDLASGLIGPLLICYKESVDQRGNQIMSDKRNVILFSVFDENRSWYLTENIQRFLPNPAGVQLEDPEFQASNIMHSINGYVFDSLQLSVCLHEVAYWYILSIGAQTDFLSVFFSGYTFKHKMVYEDTLTLFPFSGETVFMSMENPGLWILGCHNSDFRNRGMTALLKVSSCDKNTGDYYEDSYEDISAYLLSKNNAIEPRSFSQNPPVLKRHQREITRTTLQSDQEEIDYDDTISVEMKKEDFDIYDEDENQSPRSFQKKTRHYFIAAVERLWDYGMSSSPHVLRNRAQSGSVPQFKKVVFQEFTDGSFTQPLYRGELNEHLGLLGPYIRAEVEDNIMVTFRNQASRPYSFYSSLISYEEDQRQGAEPRKNFVKPNETKTYFWKVQHHMAPTKDEFDCKAWAYFSDVDLEKDVHSGLIGPLLVCHTNTLNPAHGRQVTVQEFALFFTIFDETKSWYFTENMERNCRAPCNIQMEDPTFKENYRFHAINGYIMDTLPGLVMAQDQRIRWYLLSMGSNENIHSIHFSGHVFTVRKKEEYKMALYNLYPGVFETVEMLPSKAGIWRVECLIGEHLHAGMSTLFLVYSNKCQQPLGMASGHIRDFQITASGQYGQWAPKLARLHYSGSINAWSTKEPFSWIKVDLLAPMIIHGIKTQGARQKFSSLYISQFIIMYSLDGKKWQTYRGNSTGTLMVFFGNVDSSGIKHNIFNPPIIARYIRLHPTHYSIRSTLRMELMGCDLNSCSMPLGMESKAISDAQITASSYFTNMFATWSPSKARLHLQGRSNAWRPQVNNPKEWLQVDFQKTMKVTGVTTQGVKSLLTSMYVKEFLISSSQDGHQWTLFFQNGKVKVFQGNQDSFTPVVNSLDPPLLTRYLRIHPQSWVHQIALRMEVLGCEAQDLY

SEQ ID NO: 61 - DNA, 4371 bp, synthetic construct
  misc_feature 1..4371: note = Variant of human B-domain deleted Factor VIII
  source 1..4371: mol_type = other DNA
atgcagattgaactgtctacctgcttcttcctctgtttgctgaggttctgctttagcgccactagacggtactaccttggcgctgtggagctgtcctgggactatatgcagagtgatttgggagagcttcccgtcgacgcacgatttcctcctcgcgttccaaagtcatttcccttcaacacaagcgtggtgtacaagaagacgctcttcgtcgaattcaccgatcacctgttcaatatcgccaaacccagaccaccatggatgggtcttttggggcctaccatacaagcggaggtgtatgacacagttgttatcactctcaagaacatggcttctcatccggtaagtcttcacgcagtgggcgtgtcctactggaaagcttcagaaggagccgagtatgatgatcagacatcccagagggagaaagaagacgacaaggtatttccaggtgggtctcatacctatgtgtggcaagtgctcaaagagaatggccctatggcaagcgatccgctctgtttgacttacagctacctttcacacgttgacctcgtcaaggacctcaactccgggttgattggagccttgttggtatgcagggaaggatctcttgccaaagagaagacacagaccctccacaagtttatccttctctttgctgtgttcgatgagggcaaaagttggcatagcgaaacgaagaattccctcatgcaggatcgcgacgcagccagcgccagagcttggcccaagatgcacactgtgaacggatatgtcaataggtcacttcctggcttgattgggtgtcatcggaaaagtgtctactggcacgtgatcggaatggggacaacaccagaggtccactccatatttctcgaaggccataccttccttgttcgaaaccacagacaggcatccttggagatctctcccattacctttctcactgcccaaacgctccttatggacttgggtcagttccttctcttctgccatatcagctcacaccagcatgatggtatggaagcttatgtgaaagtcgttagttgtcctgaggagccacagttgcgcatgaagaataatgaagaagccgaggattacgacgacgatctcaccgattctgagatggacgtggtgaggtttgatgacgacaactctccctccttcattcaaatccggagcgtggcgaagaaacaccccaagacttgggtccactatatagcggcggaagaggaggattgggattacgctcctcttgtattggcaccagatgaccgctcatacaaaagccagtacctcaacaacggaccgcagagaattggccggaagtataagaaagtgcgatttatggcctatacagacgaaacctttaagacaagggaggccatccagcatgagagtgggattttgggacctcttctttacggcgaagttggtgataccctcctcatcatcttcaagaatcaagcttctcgcccctataacatttacccacacgggatcactgacgttaggcctttgtatagcagaagacttcccaaaggcgtgaagcatctcaaagacttccccattttgccaggcgagatctttaagtacaaatggaccgtcacagtggaagatggaccgactaaatcagaccctcgatgccttacgcggtactattcctccttcgtgaatatggagagagatttggcaagcggactcataggaccactcctcatctgttacaaggaatctgtagaccagaggggtaaccagattatgagtgataaacgcaatgtgatcctttttagcgtcttcgacgagaaccggtcctggtacttgaccgagaatatacaaaggttccttcccaaccccgcaggcgttcagttggaagaccctgagtttcaggccagcaatattatgcactcaatcaacggctatgtgtttgatagtctccagctttctgtttgcctccatgaagtagcctattggtacatcttgtcaattggtgctcaaacagacttcctctccgtcttcttctccggctacacctttaagcacaagatggtgtatgaggacactctcacactctttccattttctggagaaaccgtgttcatgagcatggagaatccaggcctttggatcttgggttgccacaacagtgattttcgcaatcggggaatgactgctctcctcaaagtcagcagctgtgataagaacacaggcgactattacgaagattcttacgaggacataagtgcctacttgttgtccaagaataacgccattgagcccagatcattctcccagaatcctcccgtgcttaaaaggcatcagcgcgaaatcaccagaactactcttcagtctgatcaagaggagattgactatgacgacaccataagcgtggaaatgaagaaggaggatttcgatatctatgacgaagatgagaaccagtctccgcggagctttcagaagaagacgcgacactacttcattgcagcagtcgaaaggctttgggactacggtatgtcatcatcccctcatgtgttgcgcaatagagctcagagtggaagtgttccacagttcaagaaagtcgtctttcaagagtttacagatggcagcttcacacagcctctctatcggggcgagcttaacgaacatttgggactccttggtccctatatccgagccgaagtggaggacaacattatggttacctttaggaatcaagcctctcgcccctacagcttctactcctccctcatcagttatgaggaggatcagagacaaggcgctgaaccacggaagaactttgtgaaaccgaatgagacgaagacctacttctggaaagtacagcaccacatggcccccacaaaagacgaattcgattgcaaagcatgggcgtatttttcagacgttgacttggagaaagatgtacattcaggacttattggtcctttgttggtgtgtcacactaacactctcaatccagcccatggcaggcaggtgacagtccaggaattcgctcttttctttaccatctttgatgagaccaagtcctggtacttcacggaaaacatggagcgcaattgcagagccccctgtaacatacagatggaggaccctacctttaaggaaaattatcggttccacgcaatcaacggatacattatggatacactccctggccttgtgatggctcaggaccaacgaatcaggtggtacctcctcagcatgggttctaatgagaacatacactccattcacttttcaggacatgtgttcactgtccggaagaaagaagagtataagatggccctctacaatttgtatccaggcgtgtttgagaccgttgaaatgcttccctctaaagctggcatctggagagtagagtgcttgatcggagaacatcttcacgcaggtatgagcaccttgttcctcgtgtacagcaacaaatgtcagaccccacttggcatggccagtggacacattcgcgactttcagatcacagcatctggccagtatggacaatgggccccaaagttggctcgcctccattactccggtagcataaatgcgtggtccactaaagaacctttcagctggattaaggtcgatcttcttgcccccatgatcatccacggcattaagacacagggagcgaggcagaaattctcctccctctacatctcacagttcattattatgtatagtttggacggcaagaagtggcaaacttatagaggtaacagtactggaacactcatggtgttcttcggcaacgttgatagctctggcatcaaacacaacatctttaatcctcccataatagctcggtacatcagattgcatccgacccactacagcattaggagtacactccgaatggagcttatgggttgcgacttgaattcctgttcaatgccactcggaatggagtctaaagccatctctgatgcacagataaccgccagtagctactttacgaacatgtttgctacgtggtcaccctctaaggcaaggcttcatttgcaaggccggtctaatgcctggagacctcaggtgaacaacccgaaagaatggctccaggtggactttcagaagaccatgaaagtaacaggtgtcactactcagggagttaagtccttgctcaccagcatgtatgtgaaggagttccttatttcctcatcacaagatggccaccagtggaccctcttctttcagaatggtaaggtcaaagtgtttcagggcaatcaagacagcttcacacccgtggtgaacagtcttgatcctccactcttgacacgataccttcgaatccatccacagtcttgggttcaccagattgcattgcgcatggaagtacttggatgcgaggctcaggacctctac

SEQ ID NO: 62 - protein, 1457 aa, synthetic construct
  REGION 1..1457: note = Variant of human B-domain deleted Factor VIII
MQIELSTCFFLCLLRFCFSATRRYYLGAVELSWDYMQSDLGELPVDARFPPRVPKSFPFNTSVVYKKTLFVEFTDHLFNIAKPRPPWMGLLGPTIQAEVYDTVVITLKNMASHPVSLHAVGVSYWKASEGAEYDDQTSQREKEDDKVFPGGSHTYVWQVLKENGPMASDPLCLTYSYLSHVDLVKDLNSGLIGALLVCREGSLAKEKTQTLHKFILLFAVFDEGKSWHSETKNSLMQDRDAASARAWPKMHTVNGYVNRSLPGLIGCHRKSVYWHVIGMGTTPEVHSIFLEGHTFLVRNHRQASLEISPITFLTAQTLLMDLGQFLLFCHISSHQHDGMEAYVKVVSCPEEPQLRMKNNEEAEDYDDDLTDSEMDVVRFDDDNSPSFIQIRSVAKKHPKTWVHYIAAEEEDWDYAPLVLAPDDRSYKSQYLNNGPQRIGRKYKKVRFMAYTDETFKTREAIQHESGILGPLLYGEVGDTLLIIFKNQASRPYNIYPHGITDVRPLYSRRLPKGVKHLKDFPILPGEIFKYKWTVTVEDGPTKSDPRCLTRYYSSFVNMERDLASGLIGPLLICYKESVDQRGNQIMSDKRNVILFSVFDENRSWYLTENIQRFLPNPAGVQLEDPEFQASNIMHSINGYVFDSLQLSVCLHEVAYWYILSIGAQTDFLSVFFSGYTFKHKMVYEDTLTLFPFSGETVFMSMENPGLWILGCHNSDFRNRGMTALLKVSSCDKNTGDYYEDSYEDISAYLLSKNNAIEPRSFSQNPPVLKRHQREITRTTLQSDQEEIDYDDTISVEMKKEDFDIYDEDENQSPRSFQKKTRHYFIAAVERLWDYGMSSSPHVLRNRAQSGSVPQFKKVVFQEFTDGSFTQPLYRGELNEHLGLLGPYIRAEVEDNIMVTFRNQASRPYSFYSSLISYEEDQRQGAEPRKNFVKPNETKTYFWKVQHHMAPTKDEFDCKAWAYFSDVDLEKDVHSGLIGPLLVCHTNTLNPAHGRQVTVQEFALFFTIFDETKSWYFTENMERNCRAPCNIQMEDPTFKENYRFHAINGYIMDTLPGLVMAQDQRIRWYLLSMGSNENIHSIHFSGHVFTVRKKEEYKMALYNLYPGVFETVEMLPSKAGIWRVECLIGEHLHAGMSTLFLVYSNKCQTPLGMASGHIRDFQITASGQYGQWAPKLARLHYSGSINAWSTKEPFSWIKVDLLAPMIIHGIKTQGARQKFSSLYISQFIIMYSLDGKKWQTYRGNSTGTLMVFFGNVDSSGIKHNIFNPPIIARYIRLHPTHYSIRSTLRMELMGCDLNSCSMPLGMESKAISDAQITASSYFTNMFATWSPSKARLHLQGRSNAWRPQVNNPKEWLQVDFQKTMKVTGVTTQGVKSLLTSMYVKEFLISSSQDGHQWTLFFQNGKVKVFQGNQDSFTPVVNSLDPPLLTRYLRIHPQSWVHQIALRMEVLGCEAQDLY

SEQ ID NO: 63 - DNA, 4371 bp, synthetic construct
  misc_feature 1..4371: note = Variant of human B-domain deleted Factor VIII
  source 1..4371: mol_type = other DNA
atgcagattgaactgtctacctgcttcttcctctgtttgctgaggttctgctttagcgccactagacggtactaccttggcgctgtggagctgtcctgggactatatgcagagtgatttgggagagcttcccgtcgacgcacgatttcctcctcgcgttccaaagtcatttcccttcaacacaagcgtggtgtacaagaagacgctcttcgtcgaattcaccgatcacctgttcaatatcgccaaacccagaccaccatggatgggtcttttggggcctaccatacaagcggaggtgtatgacacagttgttatcactctcaagaacatggcttctcatccggtaagtcttcacgcagtgggcgtgtcctactggaaagcttcagaaggagccgagtatgatgatcagacatcccagagggagaaagaagacgacaaggtatttccaggtgggtctcatacctatgtgtggcaagtgctcaaagagaatggccctatggcaagcgatccgctctgtttgacttacagctacctttcacacgttgacctcgtcaaggacctcaactccgggttgattggagccttgttggtatgcagggaaggatctcttgccaaagagaagacacagaccctccacaagtttatccttctctttgctgtgttcgatgagggcaaaagttggcatagcgaaacgaagaattccctcatgcaggatcgcgacgcagccagcgccagagcttggcccaagatgcacactgtgaacggatatgtcaataggtcacttcctggcttgattgggtgtcatcggaaaagtgtctactggcacgtgatcggaatggggacaacaccagaggtccactccatatttctcgaaggccataccttccttgttcgaaaccacagacaggcatccttggagatctctcccattacctttctcactgcccaaacgctccttatggacttgggtcagttccttctcttctgccatatcagctcacaccagcatgatggtatggaagcttatgtgaaagtcgacagttgtcctgaggagccacagttgcgcatgaagaataatgaagaagccgaggattacgacgacgatctcaccgattctgagatggacgtggtgaggtttgatgacgacaactctccctccttcattcaaatccggagcgtggcgaagaaacaccccaagacttgggtccactatatagcggcggaagaggaggattgggattacgctcctcttgtattggcaccagatgaccgctcatacaaaagccagtacctcaacaacggaccgcagagaattggccggaagtataagaaagtgcgatttatggcctatacagacgaaacctttaagacaagggaggccatccagcatgagagtgggattttgggacctcttctttacggcgaagttggtgataccctcctcatcatcttcaagaatcaagcttctcgcccctataacatttacccacacgggatcactgacgttaggcctttgtatagcagaagacttcccaaaggcgtgaagcatctcaaagacttccccattttgccaggcgagatctttaagtacaaatggaccgtcacagtggaagatggaccgactaaatcagaccctcgatgccttacgcggtactattcctccttcgtgaatatggagagagatttggcaagcggactcataggaccactcctcatctgttacaaggaatctgtagaccagaggggtaaccagattatgagtgataaacgcaatgtgatcctttttagcgtcttcgacgagaaccggtcctggtacttgaccgagaatatacaaaggttccttcccaaccccgcaggcgttcagttggaagaccctgagtttcaggccagcaatattatgcactcaatcaacggctatgtgtttgatagtctccagctttctgtttgcctccatgaagtagcctattggtacatcttgtcaattggtgctcaaacagacttcctctccgtcttcttctccggctacacctttaagcacaagatggtgtatgaggacactctcacactctttccattttctggagaaaccgtgttcatgagcatggagaatccaggcctttggatcttgggttgccacaacagtgattttcgcaatcggggaatgactgctctcctcaaagtcagcagctgtgataagaacacaggcgactattacgaagattcttacgaggacataagtgcctacttgttgtccaagaataacgccattgagcccagatcattctcccagaatcctcccgtgcttaaaaggcatcagcgcgaaatcaccagaactactcttcagtctgatcaagaggagattgactatgacgacaccataagcgtggaaggtaagaaggaggatttcgatatctatgacgaagatgagaaccagtctccgcggagctttcagaagaagacgcgacactacttcattgcagcagtcgaaaggctttgggactacggtatgtcatcatcccctcatgtgttgcgcaatagagctcagagtggaagtgttccacagttcaagaaagtcgtctttcaagagtttacagatggcagcttcacacagcctctctatcggggcgagcttaacgaacatttgggactccttggtccctatatccgagccgaagtggaggacaacattatggttacctttaggaatcaagcctctcgcccctacagcttctactcctccctcatcagttatgaggaggatcagagacaaggcgctgaaccacggaagaactttgtgaaaccgaatgagacgaagacctacttctggaaagtacagcaccacatggcccccacaaaagacgaattcgattgcaaagcatgggcgtatttttcagacgttgacttggagaaagatgtacattcaggacttattggtcctttgttggtgtgtcacactaacactctcaatccagcccatggcaggcaggtgacagtccaggaattcgctcttttctttaccatctttgatgagaccaagtcctggtacttcacggaaaacatggagcgcaattgcagagccccctgtaacatacagatggaggaccctacctttaaggaaaattatcggttccacgcaatcaacggatacattatggatacactccctggccttgtgatggctcaggaccaacgaatcaggtggtacctcctcagcatgggttctaatgagaacatacactccattcacttttcaggacatgtgttcactgtccggaagaaagaagagtataagatggccctctacaatttgtatccaggcgtgtttgagaccgttgaaatgcttccctctaaagctggcatctggagagtagagtgcttgatcggagaacatcttcacgcaggtatgagcaccttgttcctcgtgtacagcaacaaatgtcagaccccacttggcatggccagtggacacattcgcgactttcagatcacagcatctggccagtatggacaatgggccccaaagttggctcgcctccattactccggtagcataaatgcgtggtccactaaagaacctttcagctggattaaggtcgatcttcttgcccccatgatcatccacggcattaagacacagggagcgaggcagaaattctcctccctctacatctcacagttcattattatgtatagtttggacggcaagaagtggcaaacttatagaggtaacagtactggaacactcatggtgttcttcggcaacgttgatagctctggcatcaaacacaacatctttaatcctcccataatagctcggtacatcagattgcatccgacccactacagcattaggagtacactccgaatggagcttatgggttgcgacttgaattcctgttcaatgccactcggaatggagtctaaagccatctctgatgcacagataaccgccagtagctactttacgaacatgtttgctacgtggtcaccctctaaggcaaggcttcatttgcaaggccggtctaatgcctggagacctcaggtgaacaacccgaaagaatggctccaggtggactttcagaagaccatgaaagtaacaggtgtcactactcagggagttaagtccttgctcaccagcatgtatgtgaaggagttccttatttcctcatcacaagatggccaccagtggaccctcttctttcagaatggtaaggtcaaagtgtttcagggcaatcaagacagcttcacacccgtggtgaacagtcttgatcctccactcttgacacgataccttcgaatccatccacagtcttgggttcaccagattgcattgcgcatggaagtacttggatgcgaggctcaggacctctac

SEQ ID NO: 64 - protein, 1457 aa, synthetic construct
  REGION 1..1457: note = Variant of human B-domain deleted Factor VIII
MQIELSTCFFLCLLRFCFSATRRYYLGAVELSWDYMQSDLGELPVDARFPPRVPKSFPFNTSVVYKKTLFVEFTDHLFNIAKPRPPWMGLLGPTIQAEVYDTVVITLKNMASHPVSLHAVGVSYWKASEGAEYDDQTSQREKEDDKVFPGGSHTYVWQVLKENGPMASDPLCLTYSYLSHVDLVKDLNSGLIGALLVCREGSLAKEKTQTLHKFILLFAVFDEGKSWHSETKNSLMQDRDAASARAWPKMHTVNGYVNRSLPGLIGCHRKSVYWHVIGMGTTPEVHSIFLEGHTFLVRNHRQASLEISPITFLTAQTLLMDLGQFLLFCHISSHQHDGMEAYVKVDSCPEEPQLRMKNNEEAEDYDDDLTDSEMDVVRFDDDNSPSFIQIRSVAKKHPKTWVHYIAAEEEDWDYAPLVLAPDDRSYKSQYLNNGPQRIGRKYKKVRFMAYTDETFKTREAIQHESGILGPLLYGEVGDTLLIIFKNQASRPYNIYPHGITDVRPLYSRRLPKGVKHLKDFPILPGEIFKYKWTVTVEDGPTKSDPRCLTRYYSSFVNMERDLASGLIGPLLICYKESVDQRGNQIMSDKRNVILFSVFDENRSWYLTENIQRFLPNPAGVQLEDPEFQASNIMHSINGYVFDSLQLSVCLHEVAYWYILSIGAQTDFLSVFFSGYTFKHKMVYEDTLTLFPFSGETVFMSMENPGLWILGCHNSDFRNRGMTALLKVSSCDKNTGDYYEDSYEDISAYLLSKNNAIEPRSFSQNPPVLKRHQREITRTTLQSDQEEIDYDDTISVEGKKEDFDIYDEDENQSPRSFQKKTRHYFIAAVERLWDYGMSSSPHVLRNRAQSGSVPQFKKVVFQEFTDGSFTQPLYRGELNEHLGLLGPYIRAEVEDNIMVTFRNQASRPYSFYSSLISYEEDQRQGAEPRKNFVKPNETKTYFWKVQHHMAPTKDEFDCKAWAYFSDVDLEKDVHSGLIGPLLVCHTNTLNPAHGRQVTVQEFALFFTIFDETKSWYFTENMERNCRAPCNIQMEDPTFKENYRFHAINGYIMDTLPGLVMAQDQRIRWYLLSMGSNENIHSIHFSGHVFTVRKKEEYKMALYNLYPGVFETVEMLPSKAGIWRVECLIGEHLHAGMSTLFLVYSNKCQTPLGMASGHIRDFQITASGQYGQWAPKLARLHYSGSINAWSTKEPFSWIKVDLLAPMIIHGIKTQGARQKFSSLYISQFIIMYSLDGKKWQTYRGNSTGTLMVFFGNVDSSGIKHNIFNPPIIARYIRLHPTHYSIRSTLRMELMGCDLNSCSMPLGMESKAISDAQITASSYFTNMFATWSPSKARLHLQGRSNAWRPQVNNPKEWLQVDFQKTMKVTGVTTQGVKSLLTSMYVKEFLISSSQDGHQWTLFFQNGKVKVFQGNQDSFTPVVNSLDPPLLTRYLRIHPQSWVHQIALRMEVLGCEAQDLY

SEQ ID NO: 65 - DNA, 4371 bp, synthetic construct
  misc_feature 1..4371: note = Variant of human B-domain deleted Factor VIII
  source 1..4371: mol_type = other DNA
atgcagattgaactgtctacctgcttcttcctctgtttgctgaggttctgctttagcgccactagacggtactaccttggcgctgtggagctgtcctgggactatatgcagagtgatttgggagagcttcccgtcgacgcacgatttcctcctcgcgttccaaagtcatttcccttcaacacaagcgtggtgtacaagaagacgctcttcgtcgaattcaccgatcacctgttcaatatcgccaaacccagaccaccatggatgggtcttttggggcctaccatacaagcggaggtgtatgacacagttgttatcactctcaagaacatggcttctcatccggtaagtcttcacgcagtgggcgtgtcctactggaaagcttcagaaggagccgagtatgatgatcagacatcccagagggagaaagaagacgacaaggtatttccaggtgggtctcatacctatgtgtggcaagtgctcaaagagaatggccctatggcaagcgatccgctctgtttgacttacagctacctttcacacgttgacctcgtcaaggacctcaactccgggttgattggagccttgttggtatgcagggaaggatctcttgccaaagagaagacacagaccctccacaagtttatccttctctttgctgtgttcgatgagggcaaaagttggcatagcgaaacgaagaattccctcatgcaggatcgcgacgcagccagcgccagagcttggcccaagatgcacactgtgaacggatatgtcaataggtcacttcctggcttgattgggtgtcatcggaaaagtgtctactggcacgtgatcggaatggggacaacaccagaggtccactccatatttctcgaaggccataccttccttgttcgaaaccacagacaggcatccttggagatctctcccattacctttctcactgcccaaacgctccttatggacttgggtcagttccttctcttctgccatatcagctcacaccagcatgatggtatggaagcttatgtgaaagtcgacagttgtcctgaggagccacagttgcgcatgaagaataatgaagaagccgaggattacgacgacgatctcaccgattctgagatggacgtggtgaggtttgatgacgacaactctccctccttcattcaaatccggagcgtggcgaagaaacaccccaagacttgggtccactatatagcggcggaagaggaggattgggattacgctcctcttgtattggcaccagatgaccgctcatacaaaagccagtacctcaacaacggaccgcagagaattggccggaagtataagaaagtgcgatttatggcctatacagacgaaacctttaagacaagggaggccatccagcatgagagtgggattttgggacctcttctttacggcgaagttggtgataccctcctcatcatcttcaagaatcaagcttctcgcccctataacatttacccacacgggatcactgacgttaggcctttgtatagcagaagacttcccaaaggcgtgaagcatctcaaagacttccccattttgccaggcgagatctttaagtacaaatggaccgtcacagtggaagatggaccgactaaatcagaccctcgatgccttacgcggtactattcctccttcgtgaatatggagagagatttggcaagcggactcataggaccactcctcatctgttacaaggaatctgtagaccagaggggtaaccagattatgagtgataaacgcaatgtgatcctttttagcgtcttcgacgagaaccggtcctggtacttgaccgagaatatacaaaggttccttcccaaccccgcaggcgttcagttggaagaccctgagtttcaggccagcaatattatgcactcaatcaacggctatgtgtttgatagtctccagctttctgtttgcctccatgaagtagcctattggtacatcttgtcaattggtgctcaaacagacttcctctccgtcttcttctccggctacacctttaagcacaagatggtgtatgaggacactctcacactctttccattttctggagaaaccgtgttcatgagcatggagaatccaggctattggatcttgggttgccacaacagtgattttcgcaatcggggaatgactgctctcctcaaagtcagcagctgtgataagaacacaggcgactattacgaagattcttacgaggacataagtgcctacttgttgtccaagaataacgccattgagcccagatcattctcccagaatcctcccgtgcttaaaaggcatcagcgcgaaatcaccagaactactcttcagtctgatcaagaggagattgactatgacgacaccataagcgtggaaatgaagaaggaggatttcgatatctatgacgaagatgagaaccagtctccgcggagctttcagaagaagacgcgacactacttcattgcagcagtcgaaaggctttgggactacggtatgtcatcatcccctcatgtgttgcgcaatagagctcagagtggaagtgttccacagttcaagaaagtcgtctttcaagagtttacagatggcagcttcacacagcctctctatcggggcgagcttaacgaacatttgggactccttggtccctatatccgagccgaagtggaggacaacattatggttacctttaggaatcaagcctctcgcccctacagcttctactcctccctcatcagttatgaggaggatcagagacaaggcgctgaaccacggaagaactttgtgaaaccgaatgagacgaagacctacttctggaaagtacagcaccacatggcccccacaaaagacgaattcgattgcaaagcatgggcgtatttttcagacgttgacttggagaaagatgtacattcaggacttattggtcctttgttggtgtgtcacactaacactctcaatccagcccatggcaggcaggtgacagtccaggaattcgctcttttctttaccatctttgatgagaccaagtcctggtacttcacggaaaacatggagcgcaattgcagagccccctgtaacatacagatggaggaccctacctttaaggaaaattatcggttccacgcaatcaacggatacattatggatacactccctggccttgtgatggctcaggaccaacgaatcaggtggtacctcctcagcatgggttctaatgagaacatacactccattcacttttcaggacatgtgttcactgtccggaagaaagaagagtataagatggccctctacaatttgtatccaggcgtgtttgagaccgttgaaatgcttccctctaaagctggcatctggagagtagagtgcttgatcggagaacatcttcacgcaggtatgagcaccttgttcctcgtgtacagcaacaaatgtcagaccccacttggcatggccagtggacacattcgcgactttcagatcacagcatctggccagtatggacaatgggccccaaagttggctcgcctccattactccggtagcataaatgcgtggtccactaaagaacctttcagctggattaaggtcgatcttcttgcccccatgatcatccacggcattaagacacagggagcgaggcagaaattctcctccctctacatctcacagttcattattatgtatagtttggacggcaagaagtggcaaacttatagaggtaacagtactggaacactcatggtgttcttcggcaacgttgatagctctggcatcaaacacaacatctttaatcctcccataatagctcggtacatcagattgcatccgacccactacagcattaggagtacactccgaatggagcttatgggttgcgacttgaattcctgttcaatgccactcggaatggagtctaaagccatctctgatgcacagataaccgccagtagctactttacgaacatgtttgctacgtggtcaccctctaaggcaaggcttcatttgcaaggccggtctaatgcctggagacctcaggtgaacaacccgaaagaatggctccaggtggactttcagaagaccatgaaagtaacaggtgtcactactcagggagttaagtccttgctcaccagcatgtatgtgaaggagttccttatttcctcatcacaagatggccaccagtggaccctcttctttcagaatggtaaggtcaaagtgtttcagggcaatcaagacagcttcacacccgtggtgaacagtcttgatcctccactcttgacacgataccttcgaatccatccacagtcttgggttcaccagattgcattgcgcatggaagtacttggatgcgaggctcaggacctctac

SEQ ID NO: 66 - protein, 1457 aa, synthetic construct
  REGION 1..1457: note = Variant of human B-domain deleted Factor VIII
MQIELSTCFFLCLLRFCFSATRRYYLGAVELSWDYMQSDLGELPVDARFPPRVPKSFPFNTSVVYKKTLFVEFTDHLFNIAKPRPPWMGLLGPTIQAEVYDTVVITLKNMASHPVSLHAVGVSYWKASEGAEYDDQTSQREKEDDKVFPGGSHTYVWQVLKENGPMASDPLCLTYSYLSHVDLVKDLNSGLIGALLVCREGSLAKEKTQTLHKFILLFAVFDEGKSWHSETKNSLMQDRDAASARAWPKMHTVNGYVNRSLPGLIGCHRKSVYWHVIGMGTTPEVHSIFLEGHTFLVRNHRQASLEISPITFLTAQTLLMDLGQFLLFCHISSHQHDGMEAYVKVDSCPEEPQLRMKNNEEAEDYDDDLTDSEMDVVRFDDDNSPSFIQIRSVAKKHPKTWVHYIAAEEEDWDYAPLVLAPDDRSYKSQYLNNGPQRIGRKYKKVRFMAYTDETFKTREAIQHESGILGPLLYGEVGDTLLIIFKNQASRPYNIYPHGITDVRPLYSRRLPKGVKHLKDFPILPGEIFKYKWTVTVEDGPTKSDPRCLTRYYSSFVNMERDLASGLIGPLLICYKESVDQRGNQIMSDKRNVILFSVFDENRSWYLTENIQRFLPNPAGVQLEDPEFQASNIMHSINGYVFDSLQLSVCLHEVAYWYILSIGAQTDFLSVFFSGYTFKHKMVYEDTLTLFPFSGETVFMSMENPGYWILGCHNSDFRNRGMTALLKVSSCDKNTGDYYEDSYEDISAYLLSKNNAIEPRSFSQNPPVLKRHQREITRTTLQSDQEEIDYDDTISVEMKKEDFDIYDEDENQSPRSFQKKTRHYFIAAVERLWDYGMSSSPHVLRNRAQSGSVPQFKKVVFQEFTDGSFTQPLYRGELNEHLGLLGPYIRAEVEDNIMVTFRNQASRPYSFYSSLISYEEDQRQGAEPRKNFVKPNETKTYFWKVQHHMAPTKDEFDCKAWAYFSDVDLEKDVHSGLIGPLLVCHTNTLNPAHGRQVTVQEFALFFTIFDETKSWYFTENMERNCRAPCNIQMEDPTFKENYRFHAINGYIMDTLPGLVMAQDQRIRWYLLSMGSNENIHSIHFSGHVFTVRKKEEYKMALYNLYPGVFETVEMLPSKAGIWRVECLIGEHLHAGMSTLFLVYSNKCQTPLGMASGHIRDFQITASGQYGQWAPKLARLHYSGSINAWSTKEPFSWIKVDLLAPMIIHGIKTQGARQKFSSLYISQFIIMYSLDGKKWQTYRGNSTGTLMVFFGNVDSSGIKHNIFNPPIIARYIRLHPTHYSIRSTLRMELMGCDLNSCSMPLGMESKAISDAQITASSYFTNMFATWSPSKARLHLQGRSNAWRPQVNNPKEWLQVDFQKTMKVTGVTTQGVKSLLTSMYVKEFLISSSQDGHQWTLFFQNGKVKVFQGNQDSFTPVVNSLDPPLLTRYLRIHPQSWVHQIALRMEVLGCEAQDLY

SEQ ID NO: 67 - DNA, 4371 bp, synthetic construct
  misc_feature 1..4371: note = Variant of human B-domain deleted Factor VIII
  source 1..4371: mol_type = other DNA
atgcagattgaactgtctacctgcttcttcctctgtttgctgaggttctgctttagcgccactagacggtactaccttggcgctgtggagctgtcctgggactatatgcagagtgatttgggagagcttcccgtcgacgcacgatttcctcctcgcgttccaaagtcatttcccttcaacacaagcgtggtgtacaagaagacgctcttcgtcgaattcaccgatcacctgttcaatatcgccaaacccagaccaccatggatgggtcttttggggcctaccatacaagcggaggtgtatgacacagttgttatcactctcaagaacatggcttctcatccggtaagtcttcacgcagtgggcgtgtcctactggaaagcttcagaaggagccgagtatgatgatcagacatcccagagggagaaagaagacgacaaggtatttccaggtgggtctcatacctatgtgtggcaagtgctcaaagagaatggccctatggcaagcgatccgctctgtttgacttacagctacctttcacacgttgacctcgtcaaggacctcaactccgggttgattggagccttgttggtatgcagggaaggatctcttgccaaagagaagacacagaccctccacaagtttatccttctctttgctgtgttcgatgagggcaaaagttggcatagcgaaacgaagaattccctcatgcaggatcgcgacgcagccagcgccagagcttggcccaagatgcacactgtgaacggatatgtcaataggtcacttcctggcttgattgggtgtcatcggaaaagtgtctactggcacgtgatcggaatggggacaacaccagaggtccactccatatttctcgaaggccataccttccttgttcgaaaccacagacaggcatccttggagatctctcccattacctttctcactgcccaaacgctccttatggacttgggtcagttccttctcttctgccatatcagctcacaccagcatgatggtatggaagcttatgtgaaagtcgacagttgtcctgaggagccacagttgcgcatgaagaataatgaagaagccgaggattacgacgacgatctcaccgattctgagatggacgtggtgaggtttgatgacgacaactctccctccttcattcaaatccggagcgtggcgaagaaacaccccaagacttgggtccactatatagcggcggaagaggaggattgggattacgctcctcttgtattggcaccagatgaccgctcatacaaaagccagtacctcaacaacggaccgcagagaattggccggaagtataagaaagtgcgatttatggcctatacagacgaaacctttaagacaagggaggccatccagcatgagagtgggattttgggacctcttctttacggcgaagttggtgataccctcctcatcatcttcaagaatcaagcttctcgcccctataacatttacccacacgggatcactgacgttaggcctttgtatagcagaagacttcccaaaggcgtgaagcatctcaaagacttccccattttgccaggcgagatctttaagtacaaatggaccgtcacagtggaagatggaccgactaaatcagaccctcgatgccttacgcggtactattcctccttcgtgaatatggagagagatttggcaagcggactcataggaccactcctcatctgttacaaggaatctgtagaccagaggggtaaccagattatgagtgataaacgcaatgtgatcctttttagcgtcttcgacgagaaccggtcctggtacttgaccgagaatatacaaaggttccttcccaaccccgcaggcgttcagttggaagaccctgagtttcaggccagcaatattatgcactcaatcaacggctatgtgtttgatagtctccagctttctgtttgcctccatgaagtagcctattggtacatcttgtcaattggtgctcaaacagacttcctctccgtcttcttctccggctacacctttaagcacaagatggtgtatgaggacactctcacactctttccattttctggagaaaccgtgttcatgagcatggagaatccaggcctttggatcttgggttgccacaacagtgattttcgcaatcggggaatgactgctctcctcaaagtcagcagctgtgataagaacacaggcgactattacgaagattcttacgaggacataagtgcctacttgttgtccaagaataacgccattgagcccagatcattctcccagaatcctcccgtgcttaaaaggcatcagcgcgaaatcaccagaactactcttcagtctgatcaagaggagattgactatgacgacaccataagcgtggaaatgaagaaggaggatttcgatatctatgacgaagatgagaaccagtctccgcggagctttcagaagaagacgcgacactacttcattgcagcagtcgaaaggctttgggactacggtatgtcatcatcccctcatgtgttgcgcaatagagctcagagtggaagtgttccacagttcaagaaagtcgtctttcaagagtttacagatggcagcttcacacagcctctctatcggggcgagcttaacgaacatttgggactccttggtccctatatccgagccgaagtggaggacaacattatggttacctttaggaatcaagcctctcgcccctacagcttctactcctccctcatcagttatgaggaggatcagagacaaggcgctgaaccacggaagaactttgtgaaaccgaatgagacgaagacctacttctggaaagtacagcaccacatggcccccacaaaagacgaattcgattgcaaagcatgggcgtatttttcagacgttgacttggagaaagatgtacattcaggacttattggtcctttgttggtgtgtcacactaacactctcaatccagcccatggcaggcaggtgacagtccaggaattcgctcttttctttaccatctttgatgagaccaagtcctggtacttcacggaaaacatggagcgcaattgcagagccccctgtaacatacagatggaggaccctacctttaaggaaaattatcggttccacgcaatcaacggatacattatggatacactccctggccttgtgatggctcaggaccaacgaatcaggtggtacctcctcagcatgggttctaatgagaacatacactccattcacttttcaggacatgtgttcactgtccggaagaaagaagagtataagatggccctctacaatttgtatccaggcgtgtttgagaccgttgaaatgcttccctctaaagctggcatctggagagtagagtgcttgatcggagaacatcttcacgcaggtatgagcaccttgttcctcgtgtacagcaacaaatgtcagaccccacttggcatggccagtggacacattcgcgactttcagatcacagcatctggccagtatggacaatgggccccaaagttggctcgcctccattactccggtagcataaatgcgtggtccactaaagaacctttcagctggattaaggtcgatcttcttgcccccatgatcatccacggcattaagacacagggagcgaggcagaaattctcctccctctacatctcacagttcattattatgtatagtttggacggcaagaagtggcaaacttatagaggtaacagtactggaacacggatggtgttcttcggcaacgttgatagctctggcatcaaacacaacatctttaatcctcccataatagctcggtacatcagattgcatccgacccactacagcattaggagtacactccgaatggagcttatgggttgcgacttgaattcctgttcaatgccactcggaatggagtctaaagccatctctgatgcacagataaccgccagtagctactttacgaacatgtttgctacgtggtcaccctctaaggcaaggcttcatttgcaaggccggtctaatgcctggagacctcaggtgaacaacccgaaagaatggctccaggtggactttcagaagaccatgaaagtaacaggtgtcactactcagggagttaagtccttgctcaccagcatgtatgtgaaggagttccttatttcctcatcacaagatggccaccagtggaccctcttctttcagaatggtaaggtcaaagtgtttcagggcaatcaagacagcttcacacccgtggtgaacagtcttgatcctccactcttgacacgataccttcgaatccatccacagtcttgggttcaccagattgcattgcgcatggaagtacttggatgcgaggctcaggacctctac

SEQ ID NO: 68 - protein, 1457 aa, synthetic construct
  REGION 1..1457: note = Variant of human B-domain deleted Factor VIII
MQIELSTCFFLCLLRFCFSATRRYYLGAVELSWDYMQSDLGELPVDARFPPRVPKSFPFNTSVVYKKTLFVEFTDHLFNIAKPRPPWMGLLGPTIQAEVYDTVVITLKNMASHPVSLHAVGVSYWKASEGAEYDDQTSQREKEDDKVFPGGSHTYVWQVLKENGPMASDPLCLTYSYLSHVDLVKDLNSGLIGALLVCREGSLAKEKTQTLHKFILLFAVFDEGKSWHSETKNSLMQDRDAASARAWPKMHTVNGYVNRSLPGLIGCHRKSVYWHVIGMGTTPEVHSIFLEGHTFLVRNHRQASLEISPITFLTAQTLLMDLGQFLLFCHISSHQHDGMEAYVKVDSCPEEPQLRMKNNEEAEDYDDDLTDSEMDVVRFDDDNSPSFIQIRSVAKKHPKTWVHYIAAEEEDWDYAPLVLAPDDRSYKSQYLNNGPQRIGRKYKKVRFMAYTDETFKTREAIQHESGILGPLLYGEVGDTLLIIFKNQASRPYNIYPHGITDVRPLYSRRLPKGVKHLKDFPILPGEIFKYKWTVTVEDGPTKSDPRCLTRYYSSFVNMERDLASGLIGPLLICYKESVDQRGNQIMSDKRNVILFSVFDENRSWYLTENIQRFLPNPAGVQLEDPEFQASNIMHSINGYVFDSLQLSVCLHEVAYWYILSIGAQTDFLSVFFSGYTFKHKMVYEDTLTLFPFSGETVFMSMENPGLWILGCHNSDFRNRGMTALLKVSSCDKNTGDYYEDSYEDISAYLLSKNNAIEPRSFSQNPPVLKRHQREITRTTLQSDQEEIDYDDTISVEMKKEDFDIYDEDENQSPRSFQKKTRHYFIAAVERLWDYGMSSSPHVLRNRAQSGSVPQFKKVVFQEFTDGSFTQPLYRGELNEHLGLLGPYIRAEVEDNIMVTFRNQASRPYSFYSSLISYEEDQRQGAEPRKNFVKPNETKTYFWKVQHHMAPTKDEFDCKAWAYFSDVDLEKDVHSGLIGPLLVCHTNTLNPAHGRQVTVQEFALFFTIFDETKSWYFTENMERNCRAPCNIQMEDPTFKENYRFHAINGYIMDTLPGLVMAQDQRIRWYLLSMGSNENIHSIHFSGHVFTVRKKEEYKMALYNLYPGVFETVEMLPSKAGIWRVECLIGEHLHAGMSTLFLVYSNKCQTPLGMASGHIRDFQITASGQYGQWAPKLARLHYSGSINAWSTKEPFSWIKVDLLAPMIIHGIKTQGARQKFSSLYISQFIIMYSLDGKKWQTYRGNSTGTRMVFFGNVDSSGIKHNIFNPPIIARYIRLHPTHYSIRSTLRMELMGCDLNSCSMPLGMESKAISDAQITASSYFTNMFATWSPSKARLHLQGRSNAWRPQVNNPKEWLQVDFQKTMKVTGVTTQGVKSLLTSMYVKEFLISSSQDGHQWTLFFQNGKVKVFQGNQDSFTPVVNSLDPPLLTRYLRIHPQSWVHQIALRMEVLGCEAQDLY

SEQ ID NO: 69 - DNA, 4371 bp, synthetic construct
  misc_feature 1..4371: note = Variant of human B-domain deleted Factor VIII
  source 1..4371: mol_type = other DNA
atgcagattgaactgtctacctgcttcttcctctgtttgctgaggttctgctttagcgccactagacggtactaccttggcgctgtggagctgtcctgggactatatgcagagtgatttgggagagcttcccgtcgacgcacgatttcctcctcgcgttccaaagtcatttcccttcaacacaagcgtggtgtacaagaagacgctcttcgtcgaattcaccgatcacctgttcaatatcgccaaacccagaccaccatggatgggtcttttggggcctaccatacaagcggaggtgtatgacacagttgttatcactctcaagaacatggcttctcatccggtaagtcttcacgcagtgggcgtgtcctactggaaagcttcagaaggagccgagtatgatgatcagacatcccagagggagaaagaagacgacaaggtatttccaggtgggtctcatacctatgtgtggcaagtgctcaaagagaatggccctatggcaagcgatccgctctgtttgacttacagctacctttcacacgttgacctcgtcaaggacctcaactccgggttgattggagccttgttggtatgcagggaaggatctcttgccaaagagaagacacagaccctccacaagtttatccttctctttgctgtgttcgatgagggcaaaagttggcatagcgaaacgaagaattccctcatgcaggatcgcgacgcagccagcgccagagcttggcccaagatgcacactgtgaacggatatgtcaataggtcacttcctggcttgattgggtgtcatcggaaaagtgtctactggcacgtgatcggaatggggacaacaccagaggtccactccatatttctcgaaggccataccttccttgttcgaaaccacagacaggcatccttggagatctctcccattacctttctcactgcccaaacgctccttatggacttgggtcagttccttctcttctgccatatcagctcacaccagcatgatggtatggaagcttatgtgaaagtcgacagttgtcctgaggagccacagttgcgcatgaagaataatgaagaagccgaggattacgacgacgatctcaccgattctgagatggacgtggtgaggtttgatgacgacaactctccctccttcattcaaatccggagcgtggcgaagaaacaccccaagacttgggtccactatatagcggcggaagaggaggattgggattacgctcctcttgtattggcaccagatgaccgctcatacaaaagccagtacctcaacgcgggaccgcagagaattggccggaagtataagaaagtgcgatttatggcctatacagacgaaacctttaagacaagggaggccatccagcatgagagtgggattttgggacctcttctttacggcgaagttggtgataccctcctcatcatcttcaagaatcaagcttctcgcccctataacatttacccacacgggatcactgacgttaggcctttgtatagcagaagacttcccaaaggcgtgaagcatctcaaagacttccccattttgccaggcgagatctttaagtacaaatggaccgtcacagtggaagatggaccgactaaatcagaccctcgatgccttacgcggtactattcctccttcgtgaatatggagagagatttggcaagcggactcataggaccactcctcatctgttacaaggaatctgtagaccagaggggtaaccagattatgagtgataaacgcaatgtgatcctttttagcgtcttcgacgagaaccggtcctggtacttgaccgagaatatacaaaggttccttcccaaccccgcaggcgttcagttggaagaccctgagtttcaggccagcaatattatgcactcaatcaacggctatgtgtttgatagtctccagctttctgtttgcctccatgaagtagcctattggtacatcttgtcaattggtgctcaaacagacttcctctccgtcttcttctccggctacacctttaagcacaagatggtgtatgaggacactctcacactctttccattttctggagaaaccgtgttcatgagcatggagaatccaggcctttggatcttgggttgccacaacagtgattttcgcaatcggggaatgactgctctcctcaaagtcagcagctgtgataagaacacaggcgactattacgaagattcttacgaggacataagtgcctacttgttgtccaagaataacgccattgagcccagatcattctcccagaatcctcccgtgcttaaaaggcatcagcgcgaaatcaccagaactactcttcagtctgatcaagaggagattgactatgacgacaccataagcgtggaaatgaagaaggaggatttcgatatctatgacgaagatgagaaccagtctccgcggagctttcagaagaagacgcgacactacttcattgcagcagtcgaaaggctttgggactacggtatgtcatcatcccctcatgtgttgcgcaatagagctcagagtggaagtgttccacagttcaagaaagtcgtctttcaagagtttacagatggcagcttcacacagcctctctatcggggcgagcttaacgaacatttgggactccttggtccctatatccgagccgaagtggaggacaacattatggttacctttaggaatcaagcctctcgcccctacagcttctactcctccctcatcagttatgaggaggatcagagacaaggcgctgaaccacggaagaactttgtgaaaccgaatgagacgaagacctacttctggaaagtacagcaccacatggcccccacaaaagacgaattcgattgcaaagcatgggcgtatttttcagacgttgacttggagaaagatgtacattcaggacttattggtcctttgttggtgtgtcacactaacactctcaatccagcccatggcaggcaggtgacagtccaggaattcgctcttttctttaccatctttgatgagaccaagtcctggtacttcacggaaaacatggagcgcaattgcagagccccctgtaacatacagatggaggaccctacctttaaggaaaattatcggttccacgcaatcaacggatacattatggatacactccctggccttgtgatggctcaggaccaacgaatcaggtggtacctcctcagcatgggttctaatgagaacatacactccattcacttttcaggacatgtgttcactgtccggaagaaagaagagtataagatggccctctacaatttgtatccaggcgtgtttgagaccgttgaaatgcttccctctaaagctggcatctggagagtagagtgcttgatcggagaacatcttcacgcaggtatgagcaccttgttcctcgtgtacagcaacaaatgtcagaccccacttggcatggccagtggacacattcgcgactttcagatcacagcatctggccagtatggacaatgggccccaaagttggctcgcctccattactccggtagcataaatgcgtggtccactaaagaacctttcagctggattaaggtcgatcttcttgcccccatgatcatccacggcattaagacacagggagcgaggcagaaattctcctccctctacatctcacagttcattattatgtatagtttggacggcaagaagtggcaaacttatagaggtaacagtactggaacactcatggtgttcttcggcaacgttgatagctctggcatcaaacacaacatctttaatcctcccataatagctcggtacatcagattgcatccgacccactacagcattaggagtacactccgaatggagcttatgggttgcgacttgaattcctgttcaatgccactcggaatggagtctaaagccatctctgatgcacagataaccgccagtagctactttacgaacatgtttgctacgtggtcaccctctaaggcaaggcttcatttgcaaggccggtctaatgcctggagacctcaggtgaacaacccgaaagaatggctccaggtggactttcagaagaccatgaaagtaacaggtgtcactactcagggagttaagtccttgctcaccagcatgtatgtgaaggagttccttatttcctcatcacaagatggccaccagtggaccctcttctttcagaatggtaaggtcaaagtgtttcagggcaatcaagacagcttcacacccgtggtgaacagtcttgatcctccactcttgacacgataccttcgaatccatccacagtcttgggttcaccagattgcattgcgcatggaagtacttggatgcgaggctcaggacctctac

SEQ ID NO: 70 - protein, 1457 aa, synthetic construct
  REGION 1..1457: note = Variant of human B-domain deleted Factor VIII
MQIELSTCFFLCLLRFCFSATRRYYLGAVELSWDYMQSDLGELPVDARFPPRVPKSFPFNTSVVYKKTLFVEFTDHLFNIAKPRPPWMGLLGPTIQAEVYDTVVITLKNMASHPVSLHAVGVSYWKASEGAEYDDQTSQREKEDDKVFPGGSHTYVWQVLKENGPMASDPLCLTYSYLSHVDLVKDLNSGLIGALLVCREGSLAKEKTQTLHKFILLFAVFDEGKSWHSETKNSLMQDRDAASARAWPKMHTVNGYVNRSLPGLIGCHRKSVYWHVIGMGTTPEVHSIFLEGHTFLVRNHRQASLEISPITFLTAQTLLMDLGQFLLFCHISSHQHDGMEAYVKVDSCPEEPQLRMKNNEEAEDYDDDLTDSEMDVVRFDDDNSPSFIQIRSVAKKHPKTWVHYIAAEEEDWDYAPLVLAPDDRSYKSQYLNAGPQRIGRKYKKVRFMAYTDETFKTREAIQHESGILGPLLYGEVGDTLLIIFKNQASRPYNIYPHGITDVRPLYSRRLPKGVKHLKDFPILPGEIFKYKWTVTVEDGPTKSDPRCLTRYYSSFVNMERDLASGLIGPLLICYKESVDQRGNQIMSDKRNVILFSVFDENRSWYLTENIQRFLPNPAGVQLEDPEFQASNIMHSINGYVFDSLQLSVCLHEVAYWYILSIGAQTDFLSVFFSGYTFKHKMVYEDTLTLFPFSGETVFMSMENPGLWILGCHNSDFRNRGMTALLKVSSCDKNTGDYYEDSYEDISAYLLSKNNAIEPRSFSQNPPVLKRHQREITRTTLQSDQEEIDYDDTISVEMKKEDFDIYDEDENQSPRSFQKKTRHYFIAAVERLWDYGMSSSPHVLRNRAQSGSVPQFKKVVFQEFTDGSFTQPLYRGELNEHLGLLGPYIRAEVEDNIMVTFRNQASRPYSFYSSLISYEEDQRQGAEPRKNFVKPNETKTYFWKVQHHMAPTKDEFDCKAWAYFSDVDLEKDVHSGLIGPLLVCHTNTLNPAHGRQVTVQEFALFFTIFDETKSWYFTENMERNCRAPCNIQMEDPTFKENYRFHAINGYIMDTLPGLVMAQDQRIRWYLLSMGSNENIHSIHFSGHVFTVRKKEEYKMALYNLYPGVFETVEMLPSKAGIWRVECLIGEHLHAGMSTLFLVYSNKCQTPLGMASGHIRDFQITASGQYGQWAPKLARLHYSGSINAWSTKEPFSWIKVDLLAPMIIHGIKTQGARQKFSSLYISQFIIMYSLDGKKWQTYRGNSTGTLMVFFGNVDSSGIKHNIFNPPIIARYIRLHPTHYSIRSTLRMELMGCDLNSCSMPLGMESKAISDAQITASSYFTNMFATWSPSKARLHLQGRSNAWRPQVNNPKEWLQVDFQKTMKVTGVTTQGVKSLLTSMYVKEFLISSSQDGHQWTLFFQNGKVKVFQGNQDSFTPVVNSLDPPLLTRYLRIHPQSWVHQIALRMEVLGCEAQDLY

SEQ ID NO: 71 - DNA, 4371 bp, synthetic construct
  misc_feature 1..4371: note = Variant of human B-domain deleted Factor VIII
  source 1..4371: mol_type = other DNA
atgcagattgaactgtctacctgcttcttcctctgtttgctgaggttctgctttagcgccactagacggtactaccttggcgctgtggagctgtcctgggactatatgcagagtgatttgggagagcttcccgtcgacgcacgatttcctcctcgcgttccaaagtcatttcccttcaacacaagcgtggtggcgaagaagacgctcttcgtcgaattcaccgatcacctgttcaatatcgccaaacccagaccaccatggatgggtcttttggggcctaccatacaagcggaggtgtatgacacagttgttatcactctcaagaacatggcttctcatccggtaagtcttcacgcagtgggcgtgtcctactggaaagcttcagaaggagccgagtatgatgatcagacatcccagagggagaaagaagacgacaaggtatttccaggtgggtctcatacctatgtgtggcaagtgctcaaagagaatggccctatggcaagcgatccgctctgtttgacttacagctacctttcacacgttgacctcgtcaaggacctcaactccgggttgattggagccttgttggtatgcagggaaggatctcttgccaaagagaagacacagaccctccacaagtttatccttctctttgctgtgttcgatgagggcaaaagttggcatagcgaaacgaagaattccctcatgcaggatcgcgacgcagccagcgccagagcttggcccaagatgcacactgtgaacggatatgtcaataggtcacttcctggcttgattgggtgtcatcggaaaagtgtctactggcacgtgatcggaatggggacaacaccagaggtccactccatatttctcgaaggccataccttccttgttcgaaaccacagacaggcatccttggagatctctcccattacctttctcactgcccaaacgctccttatggacttgggtcagttccttctcttctgccatatcagctcacaccagcatgatggtatggaagcttatgtgaaagtcgacagttgtcctgaggagccacagttgcgcatgaagaataatgaagaagccgaggattacgacgacgatctcaccgattctgagatggacgtggtgaggtttgatgacgacaactctccctccttcattcaaatccggagcgtggcgaagaaacaccccaagacttgggtccactatatagcggcggaagaggaggattgggattacgctcctcttgtattggcaccagatgaccgctcatacaaaagccagtacctcaacaacggaccgcagagaattggccggaagtataagaaagtgcgatttatggcctatacagacgaaacctttaagacaagggaggccatccagcatgagagtgggattttgggacctcttctttacggcgaagttggtgataccctcctcatcatcttcaagaatcaagcttctcgcccctataacatttacccacacgggatcactgacgttaggcctttgtatagcagaagacttcccaaaggcgtgaagcatctcaaagacttccccattttgccaggcgagatctttaagtacaaatggaccgtcacagtggaagatggaccgactaaatcagaccctcgatgccttacgcggtactattcctccttcgtgaatatggagagagatttggcaagcggactcataggaccactcctcatctgttacaaggaatctgtagaccagaggggtaaccagattatgagtgataaacgcaatgtgatcctttttagcgtcttcgacgagaaccggtcctggtacttgaccgagaatatacaaaggttccttcccaaccccgcaggcgttcagttggaagaccctgagtttcaggccagcaatattatgcactcaatcaacggctatgtgtttgatagtctccagctttctgtttgcctccatgaagtagcctattggtacatcttgtcaattggtgctcaaacagacttcctctccgtcttcttctccggctacacctttaagcacaagatggtgtatgaggacactctcacactctttccattttctggagaaaccgtgttcatgagcatggagaatccaggcctttggatcttgggttgccacaacagtgattttcgcaatcggggaatgactgctctcctcaaagtcagcagctgtgataagaacacaggcgactattacgaagattcttacgaggacataagtgcctacttgttgtccaagaataacgccattgagcccagatcattctcccagaatcctcccgtgcttaaaaggcatcagcgcgaaatcaccagaactactcttcagtctgatcaagaggagattgactatgacgacaccataagcgtggaaatgaagaaggaggatttcgatatctatgacgaagatgagaaccagtctccgcggagctttcagaagaagacgcgacactacttcattgcagcagtcgaaaggctttgggactacggtatgtcatcatcccctcatgtgttgcgcaatagagctcagagtggaagtgttccacagttcaagaaagtcgtctttcaagagtttacagatggcagcttcacacagcctctctatcggggcgagcttaacgaacatttgggactccttggtccctatatccgagccgaagtggaggacaacattatggttacctttaggaatcaagcctctcgcccctacagcttctactcctccctcatcagttatgaggaggatcagagacaaggcgctgaaccacggaagaactttgtgaaaccgaatgagacgaagacctacttctggaaagtacagcaccacatggcccccacaaaagacgaattcgattgcaaagcatgggcgtatttttcagacgttgacttggagaaagatgtacattcaggacttattggtcctttgttggtgtgtcacactaacactctcaatccagcccatggcaggcaggtgacagtccaggaattcgctcttttctttaccatctttgatgagaccaagtcctggtacttcacggaaaacatggagcgcaattgcagagccccctgtaacatacagatggaggaccctacctttaaggaaaattatcggttccacgcaatcaacggatacattatggatacactccctggccttgtgatggctcaggaccaacgaatcaggtggtacctcctcagcatgggttctaatgagaacatacactccattcacttttcaggacatgtgttcactgtccggaagaaagaagagtataagatggccctctacaatttgtatccaggcgtgtttgagaccgttgaaatgcttccctctaaagctggcatctggagagtagagtgcttgatcggagaacatcttcacgcaggtatgagcaccttgttcctcgtgtacagcaacaaatgtcagaccccacttggcatggccagtggacacattcgcgactttcagatcacagcatctggccagtatggacaatgggccccaaagttggctcgcctccattactccggtagcataaatgcgtggtccactaaagaacctttcagctggattaaggtcgatcttcttgcccccatgatcatccacggcattaagacacagggagcgaggcagaaattctcctccctctacatctcacagttcattattatgtatagtttggacggcaagaagtggcaaacttatagaggtaacagtactggaacactcatggtgttcttcggcaacgttgatagctctggcatcaaacacaacatctttaatcctcccataatagctcggtacatcagattgcatccgacccactacagcattaggagtacactccgaatggagcttatgggttgcgacttgaattcctgttcaatgccactcggaatggagtctaaagccatctctgatgcacagataaccgccagtagctactttacgaacatgtttgctacgtggtcaccctctaaggcaaggcttcatttgcaaggccggtctaatgcctggagacctcaggtgaacaacccgaaagaatggctccaggtggactttcagaagaccatgaaagtaacaggtgtcactactcagggagttaagtccttgctcaccagcatgtatgtgaaggagttccttatttcctcatcacaagatggccaccagtggaccctcttctttcagaatggtaaggtcaaagtgtttcagggcaatcaagacagcttcacacccgtggtgaacagtcttgatcctccactcttgacacgataccttcgaatccatccacagtcttgggttcaccagattgcattgcgcatggaagtacttggatgcgaggctcaggacctctac

SEQ ID NO: 72 - protein, 1457 aa, synthetic construct
  REGION 1..1457: note = Variant of human B-domain deleted Factor VIII
MQIELSTCFFLCLLRFCFSATRRYYLGAVELSWDYMQSDLGELPVDARFPPRVPKSFPFNTSVVAKKTLFVEFTDHLFNIAKPRPPWMGLLGPTIQAEVYDTVVITLKNMASHPVSLHAVGVSYWKASEGAEYDDQTSQREKEDDKVFPGGSHTYVWQVLKENGPMASDPLCLTYSYLSHVDLVKDLNSGLIGALLVCREGSLAKEKTQTLHKFILLFAVFDEGKSWHSETKNSLMQDRDAASARAWPKMHTVNGYVNRSLPGLIGCHRKSVYWHVIGMGTTPEVHSIFLEGHTFLVRNHRQASLEISPITFLTAQTLLMDLGQFLLFCHISSHQHDGMEAYVKVDSCPEEPQLRMKNNEEAEDYDDDLTDSEMDVVRFDDDNSPSFIQIRSVAKKHPKTWVHYIAAEEEDWDYAPLVLAPDDRSYKSQYLNNGPQRIGRKYKKVRFMAYTDETFKTREAIQHESGILGPLLYGEVGDTLLIIFKNQASRPYNIYPHGITDVRPLYSRRLPKGVKHLKDFPILPGEIFKYKWTVTVEDGPTKSDPRCLTRYYSSFVNMERDLASGLIGPLLICYKESVDQRGNQIMSDKRNVILFSVFDENRSWYLTENIQRFLPNPAGVQLEDPEFQASNIMHSINGYVFDSLQLSVCLHEVAYWYILSIGAQTDFLSVFFSGYTFKHKMVYEDTLTLFPFSGETVFMSMENPGLWILGCHNSDFRNRGMTALLKVSSCDKNTGDYYEDSYEDISAYLLSKNNAIEPRSFSQNPPVLKRHQREITRTTLQSDQEEIDYDDTISVEMKKEDFDIYDEDENQSPRSFQKKTRHYFIAAVERLWDYGMSSSPHVLRNRAQSGSVPQFKKVVFQEFTDGSFTQPLYRGELNEHLGLLGPYIRAEVEDNIMVTFRNQASRPYSFYSSLISYEEDQRQGAEPRKNFVKPNETKTYFWKVQHHMAPTKDEFDCKAWAYFSDVDLEKDVHSGLIGPLLVCHTNTLNPAHGRQVTVQEFALFFTIFDETKSWYFTENMERNCRAPCNIQMEDPTFKENYRFHAINGYIMDTLPGLVMAQDQRIRWYLLSMGSNENIHSIHFSGHVFTVRKKEEYKMALYNLYPGVFETVEMLPSKAGIWRVECLIGEHLHAGMSTLFLVYSNKCQTPLGMASGHIRDFQITASGQYGQWAPKLARLHYSGSINAWSTKEPFSWIKVDLLAPMIIHGIKTQGARQKFSSLYISQFIIMYSLDGKKWQTYRGNSTGTLMVFFGNVDSSGIKHNIFNPPIIARYIRLHPTHYSIRSTLRMELMGCDLNSCSMPLGMESKAISDAQITASSYFTNMFATWSPSKARLHLQGRSNAWRPQVNNPKEWLQVDFQKTMKVTGVTTQGVKSLLTSMYVKEFLISSSQDGHQWTLFFQNGKVKVFQGNQDSFTPVVNSLDPPLLTRYLRIHPQSWVHQIALRMEVLGCEAQDLY

SEQ ID NO: 73 - DNA, 4371 bp, synthetic construct
  misc_feature 1..4371: note = Variant of human B-domain deleted Factor VIII
  source 1..4371: mol_type = other DNA
atgcagattgaactgtctacctgcttcttcctctgtttgctgaggttctgctttagcgccactagacggtactaccttggcgctgtggagctgtcctgggactatatgcagagtgatttgggagagcttcccgtcgacgcacgatttcctcctcgcgttccaaagtcatttccctggaacacaagcgtggtgtacaagaagacgctcttcgtcgaattcaccgatcacctgttcaatatcgccaaacccagaccaccatggatgggtcttttggggcctaccatacaagcggaggtgtatgacacagttgttatcactctcaagaacatggcttctcatccggtaagtcttcacgcagtgggcgtgtcctactggaaagcttcagaaggagccgagtatgatgatcagacatcccagagggagaaagaagacgacaaggtatttccaggtgggtctcatacctatgtgtggcaagtgctcaaagagaatggccctatggcaagcgatccgctctgtttgacttacagctacctttcacacgttgacctcgtcaaggacctcaactccgggttgattggagccttgttggtatgcagggaaggatctcttgccaaagagaagacacagaccctccacaagtttatccttctctttgctgtgttcgatgagggcaaaagttggcatagcgaaacgaagaattccctcatgcaggatcgcgacgcagccagcgccagagcttggcccaagatgcacactgtgaacggatatgtcaataggtcacttcctggcttgattgggtgtcatcggaaaagtgtctactggcacgtgatcggaatggggacaacaccagaggtccactccatatttctcgaaggccataccttccttgttcgaaaccacagacaggcatccttggagatctctcccattacctttctcactgcccaaacgctccttatggacttgggtcagttccttctcttctgccatatcagctcacaccagcatgatggtatggaagcttatgtgaaagtcgacagttgtcctgaggagccacagttgcgcatgaagaataatgaagaagccgaggattacgacgacgatctcaccgattctgagatggacgtggtgaggtttgatgacgacaactctccctccttcattcaaatccggagcgtggcgaagaaacaccccaagacttgggtccactatatagcggcggaagaggaggattgggattacgctcctcttgtattggcaccagatgaccgctcatacaaaagccagtacctcaacaacggaccgcagagaattggccggaagtataagaaagtgcgatttatggcctatacagacgaaacctttaagacaagggaggccatccagcatgagagtgggattttgggacctcttctttacggcgaagttggtgataccctcctcatcatcttcaagaatcaagcttctcgcccctataacatttacccacacgggatcactgacgttaggcctttgtatagcagaagacttcccaaaggcgtgaagcatctcaaagacttccccattttgccaggcgagatctttaagtacaaatggaccgtcacagtggaagatggaccgactaaatcagaccctcgatgccttacgcggtactattcctccttcgtgaatatggagagagatttggcaagcggactcataggaccactcctcatctgttacaaggaatctgtagaccagaggggtaaccagattatgagtgataaacgcaatgtgatcctttttagcgtcttcgacgagaaccggtcctggtacttgaccgagaatatacaaaggttccttcccaaccccgcaggcgttcagttggaagaccctgagtttcaggccagcaatattatgcactcaatcaacggctatgtgtttgatagtctccagctttctgtttgcctccatgaagtagcctattggtacatcttgtcaattggtgctcaaacagacttcctctccgtcttcttctccggctacacctttaagcacaagatggtgtatgaggacactctcacactctttccattttctggagaaaccgtgttcatgagcatggagaatccaggcctttggatcttgggttgccacaacagtgattttcgcaatcggggaatgactgctctcctcaaagtcagcagctgtgataagaacacaggcgactattacgaagattcttacgaggacataagtgcctacttgttgtccaagaataacgccattgagcccagatcattctcccagaatcctcccgtgcttaaaaggcatcagcgcgaaatcaccagaactactcttcagtctgatcaagaggagattgactatgacgacaccataagcgtggaaatgaagaaggaggatttcgatatctatgacgaagatgagaaccagtctccgcggagctttcagaagaagacgcgacactacttcattgcagcagtcgaaaggctttgggactacggtatgtcatcatcccctcatgtgttgcgcaatagagctcagagtggaagtgttccacagttcaagaaagtcgtctttcaagagtttacagatggcagcttcacacagcctctctatcggggcgagcttaacgaacatttgggactccttggtccctatatccgagccgaagtggaggacaacattatggttacctttaggaatcaagcctctcgcccctacagcttctactcctccctcatcagttatgaggaggatcagagacaaggcgctgaaccacggaagaactttgtgaaaccgaatgagacgaagacctacttctggaaagtacagcaccacatggcccccacaaaagacgaattcgattgcaaagcatgggcgtatttttcagacgttgacttggagaaagatgtacattcaggacttattggtcctttgttggtgtgtcacactaacactctcaatccagcccatggcaggcaggtgacagtccaggaattcgctcttttctttaccatctttgatgagaccaagtcctggtacttcacggaaaacatggagcgcaattgcagagccccctgtaacatacagatggaggaccctacctttaaggaaaattatcggttccacgcaatcaacggatacattatggatacactccctggccttgtgatggctcaggaccaacgaatcaggtggtacctcctcagcatgggttctaatgagaacatacactccattcacttttcaggacatgtgttcactgtccggaagaaagaagagtataagatggccctctacaatttgtatccaggcgtgtttgagaccgttgaaatgcttccctctaaagctggcatctggagagtagagtgcttgatcggagaacatcttcacgcaggtatgagcaccttgttcctcgtgtacagcaacaaatgtcagaccccacttggcatggccagtggacacattcgcgactttcagatcacagcatctggccagtatggacaatgggccccaaagttggctcgcctccattactccggtagcataaatgcgtggtccactaaagaacctttcagctggattaaggtcgatcttcttgcccccatgatcatccacggcattaagacacagggagcgaggcagaaattctcctccctctacatctcacagttcattattatgtatagtttggacggcaagaagtggcaaacttatagaggtaacagtactggaacactcatggtgttcttcggcaacgttgatagctctggcatcaaacacaacatctttaatcctcccataatagctcggtacatcagattgcatccgacccactacagcattaggagtacactccgaatggagcttatgggttgcgacttgaattcctgttcaatgccactcggaatggagtctaaagccatctctgatgcacagataaccgccagtagctactttacgaacatgtttgctacgtggtcaccctctaaggcaaggcttcatttgcaaggccggtctaatgcctggagacctcaggtgaacaacccgaaagaatggctccaggtggactttcagaagaccatgaaagtaacaggtgtcactactcagggagttaagtccttgctcaccagcatgtatgtgaaggagttccttatttcctcatcacaagatggccaccagtggaccctcttctttcagaatggtaaggtcaaagtgtttcagggcaatcaagacagcttcacacccgtggtgaacagtcttgatcctccactcttgacacgataccttcgaatccatccacagtcttgggttcaccagattgcattgcgcatggaagtacttggatgcgaggctcaggacctctac

SEQ ID NO: 74 - protein, 1457 aa, synthetic construct
  REGION 1..1457: note = Variant of human B-domain deleted Factor VIII
MQIELSTCFFLCLLRFCFSATRRYYLGAVELSWDYMQSDLGELPVDARFPPRVPKSFPWNTSVVYKKTLFVEFTDHLFNIAKPRPPWMGLLGPTIQAEVYDTVVITLKNMASHPVSLHAVGVSYWKASEGAEYDDQTSQREKEDDKVFPGGSHTYVWQVLKENGPMASDPLCLTYSYLSHVDLVKDLNSGLIGALLVCREGSLAKEKTQTLHKFILLFAVFDEGKSWHSETKNSLMQDRDAASARAWPKMHTVNGYVNRSLPGLIGCHRKSVYWHVIGMGTTPEVHSIFLEGHTFLVRNHRQASLEISPITFLTAQTLLMDLGQFLLFCHISSHQHDGMEAYVKVDSCPEEPQLRMKNNEEAEDYDDDLTDSEMDVVRFDDDNSPSFIQIRSVAKKHPKTWVHYIAAEEEDWDYAPLVLAPDDRSYKSQYLNNGPQRIGRKYKKVRFMAYTDETFKTREAIQHESGILGPLLYGEVGDTLLIIFKNQASRPYNIYPHGITDVRPLYSRRLPKGVKHLKDFPILPGEIFKYKWTVTVEDGPTKSDPRCLTRYYSSFVNMERDLASGLIGPLLICYKESVDQRGNQIMSDKRNVILFSVFDENRSWYLTENIQRFLPNPAGVQLEDPEFQASNIMHSINGYVFDSLQLSVCLHEVAYWYILSIGAQTDFLSVFFSGYTFKHKMVYEDTLTLFPFSGETVFMSMENPGLWILGCHNSDFRNRGMTALLKVSSCDKNTGDYYEDSYEDISAYLLSKNNAIEPRSFSQNPPVLKRHQREITRTTLQSDQEEIDYDDTISVEMKKEDFDIYDEDENQSPRSFQKKTRHYFIAAVERLWDYGMSSSPHVLRNRAQSGSVPQFKKVVFQEFTDGSFTQPLYRGELNEHLGLLGPYIRAEVEDNIMVTFRNQASRPYSFYSSLISYEEDQRQGAEPRKNFVKPNETKTYFWKVQHHMAPTKDEFDCKAWAYFSDVDLEKDVHSGLIGPLLVCHTNTLNPAHGRQVTVQEFALFFTIFDETKSWYFTENMERNCRAPCNIQMEDPTFKENYRFHAINGYIMDTLPGLVMAQDQRIRWYLLSMGSNENIHSIHFSGHVFTVRKKEEYKMALYNLYPGVFETVEMLPSKAGIWRVECLIGEHLHAGMSTLFLVYSNKCQTPLGMASGHIRDFQITASGQYGQWAPKLARLHYSGSINAWSTKEPFSWIKVDLLAPMIIHGIKTQGARQKFSSLYISQFIIMYSLDGKKWQTYRGNSTGTLMVFFGNVDSSGIKHNIFNPPIIARYIRLHPTHYSIRSTLRMELMGCDLNSCSMPLGMESKAISDAQITASSYFTNMFATWSPSKARLHLQGRSNAWRPQVNNPKEWLQVDFQKTMKVTGVTTQGVKSLLTSMYVKEFLISSSQDGHQWTLFFQNGKVKVFQGNQDSFTPVVNSLDPPLLTRYLRIHPQSWVHQIALRMEVLGCEAQDLY

SEQ ID NO: 75 - DNA, 4371 bp, synthetic construct
  misc_feature 1..4371: note = Variant of human B-domain deleted Factor VIII
  source 1..4371: mol_type = other DNA
atgcagattgaactgtctacctgcttcttcctctgtttgctgaggttctgctttagcgccactagacggtactaccttggcgctgtggagctgtcctgggactatatgcagagtgatttgggagagcttcccgtcgacgcacgatttcctcctcgcgttccaaagtcatttcccttcaacacaagcgtggtgtacaagaagacgctcttcgtcgaattcaccgatcacctgttcaatatcgccaaacccagaccaccatggatgggtcttttggggcctaccatacaagcggaggtgtatgacacagttgttatcactctcaagaacatggcttctcatccggtaagtcttcacgcagtgggcgtgtcctactggaaagcttcagaaggagccgagtatgatgatcagacatcccagagggagaaagaagacgacaaggtatttccaggtgggtctcatacctatgtgtggcaagtgctcaaagagaatggccctatggcaagcgatccgctctgtttgacttacagctacctttcacacgttgacctcgtcaaggacctcaactccgggttgattggagccttgttggtatgcagggaaggatctcttgccaaagagaagacacagaccctccacaagtttatccttctctttgctgtgttcgatgagggcaaaagttggcatagcgaaacgaagaattccctcatgcaggatcgcgacgcagccagcgccagagcttggcccaagatgcacactgtgaacggatatgtcaataggtcacttcctggcttgattgggtgtcatcggaaaagtgtctactggcacgtgatcggaatggggacaacaccagaggtccactccatatttctcgaaggccataccttccttgttcgaaaccacagacaggcatccttggagatctctcccattacctttctcactgcccaaacgctccttatggacttgggtcagttccttctcttctgccatatcagctcacaccagcatgatggtatggaagcttatgtgaaagtcgacagttgtcctgaggagccacagttgcgcatgaagaataatgaagaagccgaggattacgacgacgatctcaccgattctgagatggacgtggtgaggtttgatgacgacaactctccctccttcattcaaatccggagcgtggcgaagaaacaccccaagacttgggtccactatatagcggcggaagaggaggattgggattacgctcctcttgtattggcaccagatgaccgctcatacaaaagccagtacctcaacaacggaccgcagagaattggccggaagtataagaaagtgcgatttatggcctatacagacgaaacctttaagacaagggaggccatccagcatgagagtgggattttgggacctcttctttacggcgaagttggtgataccctcctcatcatcttcaagaatcaagcttctcgcccctataacatttacccacacgggatcactgacgttaggcctttgtatagcagaagacttcccaaaggcgtgaagcatctcaaagacttccccattttgccaggcgagatctttaagtacaaatggaccgtcacagtggaagatggaccgactaaatcagaccctcgatgccttacgcggtactattcctccttcgtgaatatggagagagatttggcaagcggactcataggaccactcctcatctgttacaaggaatctgtagaccagaggggtaaccagattatgagtgataaacgcaatgtgatcctttttagcgtcttcgacgagaaccggtcctggtacttgaccgagaatatacaaaggttccttcccaaccccgcaggcgttcagttggaagaccctgagtttcaggccagcaatattatgcactcaatcaacggctatgtgtttgatagtctccagctttctgtttgcctccatgaagtagcctattggtacatcttgtcaattggtgctcaaacagacttcctctccgtcttcttctccggctacacctttaagcacaagatggtgtatgaggacactctcacactctttccattttctggagaaaccgtgttcatgagcatggagaatccaggcctttggatcttgggttgccacaacagtgattttcgcaatcggggaatgactgctctcctcaaagtcagcagctgtgataagaacacaggcgactattacgaagattcttacgaggacataagtgcctacttgttgtccaagaataacgccattgagcccagatcattctcccagaatcctcccgtgcttaaaaggcatcagcgcgaaatcaccagaactactcttcagtctgatcaagaggagattgactatgacgacaccataagcgtggaaatgaagaaggaggatttcgatatctatgacgaagatgagaaccagtctccgcggagctttcagaagaagacgcgacactacttcattgcagcagtcgaaaggctttgggactacggtatgtcatcatcccctcatgtgttgcgcaatagagctcagagtggaagtgttccacagttcaagaaagtcgtctttcaagagtttacagatggcagcttcacacagcctctccagcggggcgagcttaacgaacatttgggactccttggtccctatatccgagccgaagtggaggacaacattatggttacctttaggaatcaagcctctcgcccctacagcttctactcctccctcatcagttatgaggaggatcagagacaaggcgctgaaccacggaagaactttgtgaaaccgaatgagacgaagacctacttctggaaagtacagcaccacatggcccccacaaaagacgaattcgattgcaaagcatgggcgtatttttcagacgttgacttggagaaagatgtacattcaggacttattggtcctttgttggtgtgtcacactaacactctcaatccagcccatggcaggcaggtgacagtccaggaattcgctcttttctttaccatctttgatgagaccaagtcctggtacttcacggaaaacatggagcgcaattgcagagccccctgtaacatacagatggaggaccctacctttaaggaaaattatcggttccacgcaatcaacggatacattatggatacactccctggccttgtgatggctcaggaccaacgaatcaggtggtacctcctcagcatgggttctaatgagaacatacactccattcacttttcaggacatgtgttcactgtccggaagaaagaagagtataagatggccctctacaatttgtatccaggcgtgtttgagaccgttgaaatgcttccctctaaagctggcatctggagagtagagtgcttgatcggagaacatcttcacgcaggtatgagcaccttgttcctcgtgtacagcaacaaatgtcagaccccacttggcatggccagtggacacattcgcgactttcagatcacagcatctggccagtatggacaatgggccccaaagttggctcgcctccattactccggtagcataaatgcgtggtccactaaagaacctttcagctggattaaggtcgatcttcttgcccccatgatcatccacggcattaagacacagggagcgaggcagaaattctcctccctctacatctcacagttcattattatgtatagtttggacggcaagaagtggcaaacttatagaggtaacagtactggaacactcatggtgttcttcggcaacgttgatagctctggcatcaaacacaacatctttaatcctcccataatagctcggtacatcagattgcatccgacccactacagcattaggagtacactccgaatggagcttatgggttgcgacttgaattcctgttcaatgccactcggaatggagtctaaagccatctctgatgcacagataaccgccagtagctactttacgaacatgtttgctacgtggtcaccctctaaggcaaggcttcatttgcaaggccggtctaatgcctggagacctcaggtgaacaacccgaaagaatggctccaggtggactttcagaagaccatgaaagtaacaggtgtcactactcagggagttaagtccttgctcaccagcatgtatgtgaaggagttccttatttcctcatcacaagatggccaccagtggaccctcttctttcagaatggtaaggtcaaagtgtttcagggcaatcaagacagcttcacacccgtggtgaacagtcttgatcctccactcttgacacgataccttcgaatccatccacagtcttgggttcaccagattgcattgcgcatggaagtacttggatgcgaggctcaggacctctac

SEQ ID NO: 76 - protein, 1457 aa, synthetic construct
  REGION 1..1457: note = Variant of human B-domain deleted Factor VIII
MQIELSTCFFLCLLRFCFSATRRYYLGAVELSWDYMQSDLGELPVDARFPPRVPKSFPFNTSVVYKKTLFVEFTDHLFNIAKPRPPWMGLLGPTIQAEVYDTVVITLKNMASHPVSLHAVGVSYWKASEGAEYDDQTSQREKEDDKVFPGGSHTYVWQVLKENGPMASDPLCLTYSYLSHVDLVKDLNSGLIGALLVCREGSLAKEKTQTLHKFILLFAVFDEGKSWHSETKNSLMQDRDAASARAWPKMHTVNGYVNRSLPGLIGCHRKSVYWHVIGMGTTPEVHSIFLEGHTFLVRNHRQASLEISPITFLTAQTLLMDLGQFLLFCHISSHQHDGMEAYVKVDSCPEEPQLRMKNNEEAEDYDDDLTDSEMDVVRFDDDNSPSFIQIRSVAKKHPKTWVHYIAAEEEDWDYAPLVLAPDDRSYKSQYLNNGPQRIGRKYKKVRFMAYTDETFKTREAIQHESGILGPLLYGEVGDTLLIIFKNQASRPYNIYPHGITDVRPLYSRRLPKGVKHLKDFPILPGEIFKYKWTVTVEDGPTKSDPRCLTRYYSSFVNMERDLASGLIGPLLICYKESVDQRGNQIMSDKRNVILFSVFDENRSWYLTENIQRFLPNPAGVQLEDPEFQASNIMHSINGYVFDSLQLSVCLHEVAYWYILSIGAQTDFLSVFFSGYTFKHKMVYEDTLTLFPFSGETVFMSMENPGLWILGCHNSDFRNRGMTALLKVSSCDKNTGDYYEDSYEDISAYLLSKNNAIEPRSFSQNPPVLKRHQREITRTTLQSDQEEIDYDDTISVEMKKEDFDIYDEDENQSPRSFQKKTRHYFIAAVERLWDYGMSSSPHVLRNRAQSGSVPQFKKVVFQEFTDGSFTQPLQRGELNEHLGLLGPYIRAEVEDNIMVTFRNQASRPYSFYSSLISYEEDQRQGAEPRKNFVKPNETKTYFWKVQHHMAPTKDEFDCKAWAYFSDVDLEKDVHSGLIGPLLVCHTNTLNPAHGRQVTVQEFALFFTIFDETKSWYFTENMERNCRAPCNIQMEDPTFKENYRFHAINGYIMDTLPGLVMAQDQRIRWYLLSMGSNENIHSIHFSGHVFTVRKKEEYKMALYNLYPGVFETVEMLPSKAGIWRVECLIGEHLHAGMSTLFLVYSNKCQTPLGMASGHIRDFQITASGQYGQWAPKLARLHYSGSINAWSTKEPFSWIKVDLLAPMIIHGIKTQGARQKFSSLYISQFIIMYSLDGKKWQTYRGNSTGTLMVFFGNVDSSGIKHNIFNPPIIARYIRLHPTHYSIRSTLRMELMGCDLNSCSMPLGMESKAISDAQITASSYFTNMFATWSPSKARLHLQGRSNAWRPQVNNPKEWLQVDFQKTMKVTGVTTQGVKSLLTSMYVKEFLISSSQDGHQWTLFFQNGKVKVFQGNQDSFTPVVNSLDPPLLTRYLRIHPQSWVHQIALRMEVLGCEAQDLY

SEQ ID NO: 77 - DNA, 4371 bp, synthetic construct
  misc_feature 1..4371: note = Variant of human B-domain deleted Factor VIII
  source 1..4371: mol_type = other DNA
atgcagattgaactgtctacctgcttcttcctctgtttgctgaggttctgctttagcgccactagacggtactaccttggcgctgtggagctgtcctgggactatatgcagagtgatttgggagagcttcccgtcgacgcacgatttcctcctcgcgttccaaagtcatttcccttcaacacaagcgtggtgtacaagaagacgctcttcgtcgaattcaccgatcacctgttcaatatcgccaaacccagaccaccatggatgggtcttttggggcctaccatacaagcggaggtgtatgacacagttgttatcactctcaagaacatggcttctcatccggtaagtcttcacgcagtgggcgtgtcctactggaaagcttcagaaggagccgagtatgatgatcagacatcccagagggagaaagaagacgacaaggtatttccaggtgggtctcatacctatgtgtggcaagtgctcaaagagaatggccctatggcaagcgatccgctctgtttgacttacagctacctttcacacgttgacctcgtcaaggacctcaactccgggttgattggagccttgttggtatgcagggaaggatctcttgccaaagagaagacacagaccctccacaagtttatccttctctttgctgtgttcgatgagggcaaaagttggcatagcgaaacgaagaattccctcatgcaggatcgcgacgcagccagcgccagagcttggcccaagatgcacactgtgaacggatatgtcaataggtcacttcctggcttgattgggtgtcatcggaaaagtgtctactggcacgtgatcggaatggggacaacaccagaggtccactccatatttctcgaaggccataccttccttgttcgaaaccacagacaggcatccttggagatctctcccattacctttctcactgcccaaacgctccttatggacttgggtcagttccttctcttctgccatatcagctcacaccagcatgatggtatggaagcttatgtgaaagtcgacagttgtcctgaggagccacagttgcgcatgaagaataatgaagaagccgaggattacgacgacgatctcaccgattctgagatggacgtggtgaggtttgatgacgacaactctccctccttcattcaaatccggagcgtggcgaagaaacaccccaagacttgggtccactatatagcggcggaagaggaggattgggattacgctcctcttgtattggcaccagatgaccgctcatacaaaagccagtacctcaacaacggaccgcagagaattggccggaagtataagaaagtgcgatttatggcctatacagacgaaacctttaagacaagggaggccatccagcatgagagtgggattttgggacctcttctttacggcgaagttggtgataccctcctcatcatcttcaagaatcaagcttctcgcccctataacatttacccacacgggatcactgacgttaggcctttgtatagcagaagacttcccaaaggcgtgaagcatctcaaagacttccccattttgccaggcgagatctttaagtacaaatggaccgtcacagtggaagatggaccgactaaatcagaccctcgatgccttacgcggtactattcctccttcgtgaatatggagagagatttggcaagcggactcataggaccactcctcatctgttacaaggaatctgtagaccagaggggtaaccagattatgagtgataaacgcaatgtgatcctttttagcgtcttcgacgagaaccggtcctggtacttgaccgagaatatacaaaggttccttcccaaccccgcaggcgttcagttggaagaccctgagtttcaggccagcaatattatgcactcaatcaacggctatgtgtttgatagtctccagctttctgtttgcctccatgaagtagcctattggtacatcttgtcaattggtgctcaaacagacttcctctccgtcttcttctccggctacacctttaagcacaagatggtgtatgaggacactctcacactctttccattttctggagaaaccgtgttcatgagcatggagaatccaggcctttggatcttgggttgccacaacagtgattttcgcaatcggggaatgactgctctcctcaaagtcagcagctgtgataagaacacaggcgactattacgaagattcttacgaggacataagtgcctacttgttgtccaagaataacgccattgagcccagatcattctcccagaatcctcccgtgcttaaaaggcatcagcgcgaaatcaccagaactactcttcagtctgatcaagaggagattgactatgacgacaccataagctgtgaaatgaagaaggaggatttcgatatctatgacgaagatgagaaccagtctccgcggagctttcagaagaagacgcgacactacttcattgcagcagtcgaaaggctttgggactacggtatgtcatcatcccctcatgtgttgcgcaatagagctcagagtggaagtgttccacagttcaagaaagtcgtctttcaagagtttacagatggcagcttcacacagcctctctatcggggcgagcttaacgaacatttgggactccttggtccctatatccgagccgaagtggaggacaacattatggttacctttaggaatcaagcctctcgcccctacagcttctactcctccctcatcagttatgaggaggatcagagacaaggcgctgaaccacggaagaactttgtgaaaccgaatgagacgaagacctacttctggaaagtacagcaccacatggcccccacaaaagacgaattcgattgcaaagcatgggcgtatttttcagacgttgacttggagaaagatgtacattcaggacttattggtcctttgttggtgtgtcacactaacactctcaatccagcccatggcaggcaggtgacagtccaggaattcgctcttttctttaccatctttgatgagaccaagtcctggtacttcacggaaaacatggagcgcaattgcagagccccctgtaacatacagatggaggaccctacctttaaggaaaattatcggttccacgcaatcaacggatacattatggatacactccctggccttgtgatggctcaggaccaacgaatcaggtggtacctcctcagcatgggttctaatgagaacatacactccattcacttttcaggacatgtgttcactgtccggaagaaagaagagtataagatggccctctacaatttgtatccaggcgtgtttgagaccgttgaaatgcttccctctaaagctggcatctggagagtagagtgcttgatcggagaacatcttcacgcaggtatgagcaccttgttcctcgtgtacagcaacaaatgtcagaccccacttggcatggccagtggacacattcgcgactttcagatcacagcatctggccagtatggacaatgggccccaaagttggctcgcctccattactccggtagcataaatgcgtggtccactaaagaacctttcagctggattaaggtcgatcttcttgcccccatgatcatccacggcattaagacacagggagcgaggcagaaattctcctccctctacatctcacagttcattattatgtatagtttggacggcaagaagtggcaaacttatagaggtaacagtactggaacactcatggtgttcttcggcaacgttgatagctctggcatcaaacacaacatctttaatcctcccataatagctcggtacatcagattgcatccgacccactacagcattaggagtacactccgaatggagcttatgggttgcgacttgaattcctgttcaatgccactcggaatggagtctaaagccatctctgatgcacagataaccgccagtagctactttacgaacatgtttgctacgtggtcaccctctaaggcaaggcttcatttgcaaggccggtctaatgcctggagacctcaggtgaacaacccgaaagaatggctccaggtggactttcagaagaccatgaaagtaacaggtgtcactactcagggagttaagtccttgctcaccagcatgtatgtgaaggagttccttatttcctcatcacaagatggccaccagtggaccctcttctttcagaatggtaaggtcaaagtgtttcagggcaatcaagacagcttcacacccgtggtgaacagtcttgatcctccactcttgacacgataccttcgaatccatccacagtcttgggttcaccagattgcattgcgcatggaagtacttggatgcgaggctcaggacctctac

SEQ ID NO: 78 - protein, 1457 aa, synthetic construct
  REGION 1..1457: note = Variant of human B-domain deleted Factor VIII
MQIELSTCFFLCLLRFCFSATRRYYLGAVELSWDYMQSDLGELPVDARFPPRVPKSFPFNTSVVYKKTLFVEFTDHLFNIAKPRPPWMGLLGPTIQAEVYDTVVITLKNMASHPVSLHAVGVSYWKASEGAEYDDQTSQREKEDDKVFPGGSHTYVWQVLKENGPMASDPLCLTYSYLSHVDLVKDLNSGLIGALLVCREGSLAKEKTQTLHKFILLFAVFDEGKSWHSETKNSLMQDRDAASARAWPKMHTVNGYVNRSLPGLIGCHRKSVYWHVIGMGTTPEVHSIFLEGHTFLVRNHRQASLEISPITFLTAQTLLMDLGQFLLFCHISSHQHDGMEAYVKVDSCPEEPQLRMKNNEEAEDYDDDLTDSEMDVVRFDDDNSPSFIQIRSVAKKHPKTWVHYIAAEEEDWDYAPLVLAPDDRSYKSQYLNNGPQRIGRKYKKVRFMAYTDETFKTREAIQHESGILGPLLYGEVGDTLLIIFKNQASRPYNIYPHGITDVRPLYSRRLPKGVKHLKDFPILPGEIFKYKWTVTVEDGPTKSDPRCLTRYYSSFVNMERDLASGLIGPLLICYKESVDQRGNQIMSDKRNVILFSVFDENRSWYLTENIQRFLPNPAGVQLEDPEFQASNIMHSINGYVFDSLQLSVCLHEVAYWYILSIGAQTDFLSVFFSGYTFKHKMVYEDTLTLFPFSGETVFMSMENPGLWILGCHNSDFRNRGMTALLKVSSCDKNTGDYYEDSYEDISAYLLSKNNAIEPRSFSQNPPVLKRHQREITRTTLQSDQEEIDYDDTISCEMKKEDFDIYDEDENQSPRSFQKKTRHYFIAAVERLWDYGMSSSPHVLRNRAQSGSVPQFKKVVFQEFTDGSFTQPLYRGELNEHLGLLGPYIRAEVEDNIMVTFRNQASRPYSFYSSLISYEEDQRQGAEPRKNFVKPNETKTYFWKVQHHMAPTKDEFDCKAWAYFSDVDLEKDVHSGLIGPLLVCHTNTLNPAHGRQVTVQEFALFFTIFDETKSWYFTENMERNCRAPCNIQMEDPTFKENYRFHAINGYIMDTLPGLVMAQDQRIRWYLLSMGSNENIHSIHFSGHVFTVRKKEEYKMALYNLYPGVFETVEMLPSKAGIWRVECLIGEHLHAGMSTLFLVYSNKCQTPLGMASGHIRDFQITASGQYGQWAPKLARLHYSGSINAWSTKEPFSWIKVDLLAPMIIHGIKTQGARQKFSSLYISQFIIMYSLDGKKWQTYRGNSTGTLMVFFGNVDSSGIKHNIFNPPIIARYIRLHPTHYSIRSTLRMELMGCDLNSCSMPLGMESKAISDAQITASSYFTNMFATWSPSKARLHLQGRSNAWRPQVNNPKEWLQVDFQKTMKVTGVTTQGVKSLLTSMYVKEFLISSSQDGHQWTLFFQNGKVKVFQGNQDSFTPVVNSLDPPLLTRYLRIHPQSWVHQIALRMEVLGCEAQDLY

SEQ ID NO: 79 - DNA, 4371 bp, synthetic construct
  misc_feature 1..4371: note = Variant of human B-domain deleted Factor VIII
  source 1..4371: mol_type = other DNA
atgcagattgaactgtctacctgcttcttcctctgtttgctgaggttctgctttagcgccactagacggtactaccttggcgctgtggagctgtcctgggactatatgcagagtgatttgggagagcttcccgtcgacgcacgatttcctcctcgcgttccaaagtcatttcccttcaacacaagcgtggtgtacaagaagacgctcttcgtcgaattcaccgatcacctgttcaatatcgccaaacccagaccaccatggatgggtcttttggggcctaccatacaagcggaggtgtatgacacagttgttatcactctcaagaacatggcttctcatccggtaagtcttcacgcagtgggcgtgtcctactggaaagcttcagaaggagccgagtatgatgatcagacatcccagagggagaaagaagacgacaaggtatttccaggtgggtctcatacctatgtgtggcaagtgctcaaagagaatggccctatggcaagcgatccgctctgtttgacttacagctacctttcacacgttgacctcgtcaaggacctcaactccgggttgattggagccttgttggtatgcagggaaggatctcttgccaaagagaagacacagaccctccacaagtttatccttctctttgctgtgttcgatgagggcaaaagttggcatagcgaaacgaagaattccctcatgcaggatcgcgacgcagccagcgccagagcttggcccaagatgcacactgtgaacggatatgtcaataggtcacttcctggcttgattgggtgtcatcggaaaagtgtctactggcacgtgatcggaatggggacaacaccagaggtccactccatatttctcgaaggccataccttccttgttcgaaaccacagacaggcatccttggagatctctcccattacctttctcactgcccaaacgctccttatggacttgggtcagttccttctcttctgccatatcagctcacaccagcatgatggtatggaagcttatgtgaaagtcgacagttgtcctgaggagccacagttgcgcatgaagaataatgaagaagccgaggattacgacgacgatctcaccgattctgagatggacgtggtgaggtttgatgacgacaactctccctccttcattcaaatccggagcgtggcgaagaaacaccccaagacttgggtccactatatagcggcggaagaggaggattgggattacgctcctcttgtattggcaccagatgaccgctcatacaaaagccagtacctcaacaacggaccgcagagaattggccggaagtataagaaagtgcgatttatggcctatacagacgaaacctttaagacaagggaggccatccagcatgagagtgggattttgggacctcttctttacggcgaagttggtgataccctcctcatcatcttcaagaatcaagcttctcgcccctataacatttacccacacgggatcactgacgttaggcctttgtatagcagaagacttcccaaaggcgtgaagcatctcaaagacttccccattttgccaggcgagatctttaagtacaaatggaccgtcacagtggaagatggaccgactaaatcagaccctcgatgccttacgcggtactattcctccttcgtgaatatggagagagatttggcaagcggactcataggaccactcctcatctgttacaaggaatctgtagaccagaggggtaaccagattatgagtgataaacgcaatgtgatcctttttagcgtcttcgacgagaaccggtcctggtacttgaccgagaatatacaaaggttccttcccaaccccgcaggcgttcagttggaagaccctgagtttcaggccagcaatattatgcactcaatcaacggctatgtgtttgatagtctccagctttctgtttgcctccatgaagtagcctattggtacatcttgtcaattggtgctcaaacagacttcctctccgtcttcttctccggctacacctttaagcacaagatggtgtataaggacactctcacactctttccattttctggagaaaccgtgttcatgagcatggagaatccaggcctttggatcttgggttgccacaacagtgattttcgcaatcggggaatgactgctctcctcaaagtcagcagctgtgataagaacacaggcgactattacgaagattcttacgaggacataagtgcctacttgttgtccaagaataacgccattgagcccagatcattctcccagaatcctcccgtgcttaaaaggcatcagcgcgaaatcaccagaactactcttcagtctgatcaagaggagattgactatgacgacaccataagcgtggaaatgaggaaggaggatttcgatatctatgacgaagatgagaaccagtctccgcggagctttcagaagaagacgcgacactacttcattgcagcagtcgaaaggctttgggactacggtatgtcatcatcccctcatgtgttgcgcaatagagctcagagtggaagtgttccacagttcaagaaagtcgtctttcaagagtttacagatggcagcttcacacagcctctctatcggggcgagcttaacgaacatttgggactccttggtccctatatccgagccgaagtggaggacaacattatggttacctttaggaatcaagcctctcgcccctacagcttctactcctccctcatcagttatgaggaggatcagagacaaggcgctgaaccacggaagaactttgtgaaaccgaatgagacgaagacctacttctggaaagtacagcaccacatggcccccacaaaagacgaattcgattgcaaagcatgggcgtatttttcagacgttgacttggagaaagatgtacattcaggacttattggtcctttgttggtgtgtcacactaacactctcaatccagcccatggcaggcaggtgacagtccaggaattcgctcttttctttaccatctttgatgagaccaagtcctggtacttcacggaaaacatggagcgcaattgcagagccccctgtaacatacagatggaggaccctacctttaaggaaaattatcggttccacgcaatcaacggatacattatggatacactccctggccttgtgatggctcaggaccaacgaatcaggtggtacctcctcagcatgggttctaatgagaacatacactccattcacttttcaggacatgtgttcactgtccggaagaaagaagagtataagatggccctctacaatttgtatccaggcgtgtttgagaccgttgaaatgcttccctctaaagctggcatctggagagtagagtgcttgatcggagaacatcttcacgcaggtatgagcaccttgttcctcgtgtacagcaacaaatgtcagaccccacttggcatggccagtggacacattcgcgactttcagatcacagcatctggccagtatggacaatgggccccaaagttggctcgcctccattactccggtagcataaatgcgtggtccactaaagaacctttcagctggattaaggtcgatcttcttgcccccatgatcatccacggcattaagacacagggagcgaggcagaaattctcctccctctacatctcacagttcattattatgtatagtttggacggcaagaagtggcaaacttatagaggtaacagtactggaacactcatggtgttcttcggcaacgttgatagctctggcatcaaacacaacatctttaatcctcccataatagctcggtacatcagattgcatccgacccactacagcattaggagtacactccgaatggagcttatgggttgcgacttgaattcctgttcaatgccactcggaatggagtctaaagccatctctgatgcacagataaccgccagtagctactttacgaacatgtttgctacgtggtcaccctctaaggcaaggcttcatttgcaaggccggtctaatgcctggagacctcaggtgaacaacccgaaagaatggctccaggtggactttcagaagaccatgaaagtaacaggtgtcactactcagggagttaagtccttgctcaccagcatgtatgtgaaggagttccttatttcctcatcacaagatggccaccagtggaccctcttctttcagaatggtaaggtcaaagtgtttcagggcaatcaagacagcttcacacccgtggtgaacagtcttgatcctccactcttgacacgataccttcgaatccatccacagtcttgggttcaccagattgcattgcgcatggaagtacttggatgcgaggctcaggacctctac

SEQ ID NO: 80 - protein, 1457 aa, synthetic construct
  REGION 1..1457: note = Variant of human B-domain deleted Factor VIII
MQIELSTCFFLCLLRFCFSATRRYYLGAVELSWDYMQSDLGELPVDARFPPRVPKSFPFNTSVVYKKTLFVEFTDHLFNIAKPRPPWMGLLGPTIQAEVYDTVVITLKNMASHPVSLHAVGVSYWKASEGAEYDDQTSQREKEDDKVFPGGSHTYVWQVLKENGPMASDPLCLTYSYLSHVDLVKDLNSGLIGALLVCREGSLAKEKTQTLHKFILLFAVFDEGKSWHSETKNSLMQDRDAASARAWPKMHTVNGYVNRSLPGLIGCHRKSVYWHVIGMGTTPEVHSIFLEGHTFLVRNHRQASLEISPITFLTAQTLLMDLGQFLLFCHISSHQHDGMEAYVKVDSCPEEPQLRMKNNEEAEDYDDDLTDSEMDVVRFDDDNSPSFIQIRSVAKKHPKTWVHYIAAEEEDWDYAPLVLAPDDRSYKSQYLNNGPQRIGRKYKKVRFMAYTDETFKTREAIQHESGILGPLLYGEVGDTLLIIFKNQASRPYNIYPHGITDVRPLYSRRLPKGVKHLKDFPILPGEIFKYKWTVTVEDGPTKSDPRCLTRYYSSFVNMERDLASGLIGPLLICYKESVDQRGNQIMSDKRNVILFSVFDENRSWYLTENIQRFLPNPAGVQLEDPEFQASNIMHSINGYVFDSLQLSVCLHEVAYWYILSIGAQTDFLSVFFSGYTFKHKMVYKDTLTLFPFSGETVFMSMENPGLWILGCHNSDFRNRGMTALLKVSSCDKNTGDYYEDSYEDISAYLLSKNNAIEPRSFSQNPPVLKRHQREITRTTLQSDQEEIDYDDTISVEMRKEDFDIYDEDENQSPRSFQKKTRHYFIAAVERLWDYGMSSSPHVLRNRAQSGSVPQFKKVVFQEFTDGSFTQPLYRGELNEHLGLLGPYIRAEVEDNIMVTFRNQASRPYSFYSSLISYEEDQRQGAEPRKNFVKPNETKTYFWKVQHHMAPTKDEFDCKAWAYFSDVDLEKDVHSGLIGPLLVCHTNTLNPAHGRQVTVQEFALFFTIFDETKSWYFTENMERNCRAPCNIQMEDPTFKENYRFHAINGYIMDTLPGLVMAQDQRIRWYLLSMGSNENIHSIHFSGHVFTVRKKEEYKMALYNLYPGVFETVEMLPSKAGIWRVECLIGEHLHAGMSTLFLVYSNKCQTPLGMASGHIRDFQITASGQYGQWAPKLARLHYSGSINAWSTKEPFSWIKVDLLAPMIIHGIKTQGARQKFSSLYISQFIIMYSLDGKKWQTYRGNSTGTLMVFFGNVDSSGIKHNIFNPPIIARYIRLHPTHYSIRSTLRMELMGCDLNSCSMPLGMESKAISDAQITASSYFTNMFATWSPSKARLHLQGRSNAWRPQVNNPKEWLQVDFQKTMKVTGVTTQGVKSLLTSMYVKEFLISSSQDGHQWTLFFQNGKVKVFQGNQDSFTPVVNSLDPPLLTRYLRIHPQSWVHQIALRMEVLGCEAQDLY

SEQ ID NO: 81 - DNA, 4371 bp, synthetic construct
  misc_feature 1..4371: note = Variant of human B-domain deleted Factor VIII
  source 1..4371: mol_type = other DNA
atgcagattgaactgtctacctgcttcttcctctgtttgctgaggttctgctttagcgccactagacggtactaccttggcgctgtggagctgtcctgggactatatgcagagtgatttgggagagcttcccgtcgacgcacgatttcctcctcgcgttccaaagtcacttcccttcaacacaagcgtggtgtacaagaagacgctcttcgtcgaattcaccgatcacctgttcaatatcgccaaacccagaccaccatggatgggtcttttggggcctaccatacaagcggaggtgtatgacacagttgttatcactctcaagaacatggcttctcatccggtaagtcttcacgcagtgggcgtgtcctactggaaagcttcagaaggagccgagtatgatgatcagacatcccagagggagaaagaagacgacaaggtatttccaggtgggtctcatacctatgtgtggcaagtgctcaaagagaatggccctatggcaagcgatccgctctgtttgacttacagctacctttcacacgttgacctcgtcaaggacctcaactccgggttgattggagccttgttggtatgcagggaaggatctcttgccaaagagaagacacagaccctccacaagtttatccttctctttgctgtgttcgatgagggcaaaagttggcatagcgaaacgaagaattccctcatgcaggatcgcgacgcagccagcgccagagcttggcccaagatgcacactgtgaacggatatgtcaataggtcacttcctggcttgattgggtgtcatcggaaaagtgtctactggcacgtgatcggaatggggacaacaccagaggtccactccatatttctcgaaggccataccttccttgttcgaaaccacagacaggcatccttggagatctctcccattacctttctcactgcccaaacgctccttatggacttgggtcagttccttctcttctgccatatcagctcacaccagcatgatggtatggaagcttatgtgaaagtcgacagttgtcctgaggagccacagttgcgcatgaagaataatgaagaagccgaggattacgacgacgatctcaccgattctgagatggacgtggtgaggtttgatgacgacaactctccctccttcattcaaatccggagcgtggcgaagaaacaccccaagacttgggtccactatatagcggcggaagaggaggattgggattacgctcctcttgtattggcaccagatgaccgctcatacaaaagccagtacctcaacaacggaccgcagagaattggccggaagtataagaaagtgcgatttatggcctatacagacgaaacctttaagacaagggaggccatccagcatgagagtgggattttgggacctcttctttacggcgaagttggtgataccctcctcatcatcttcaagaatcaagcttctcgcccctataacatttacccacacgggatcactgacgttaggcctttgtatagcagaagacttcccaaaggcgtgaagcatctcaaagacttccccattttgccaggcgagatctttaagtacaaatggaccgtcacagtggaagatggaccgactaaatcagaccctcgatgccttacgcggtactattcctccttcgtgaatatggagagagatttggcaagcggactcataggaccactcctcatctgttacaaggaatctgtagaccagaggggtaaccagattatgagtgataaacgcaatgtgatcctttttagcgtcttcgacgagaaccggtcctggtacttgaccgagaatatacaaaggttccttcccaaccccgcaggcgttcagttggaagaccctgagtttcaggccagcaatattatgcactcaatcaacggctatgtgtttgatagtctccagctttctgtttgcctccatgaagtagcctattggtacatcttgtcaattggtgctcaaacagacttcctctccgtcttcttctccggctacacctttaagcacaagatggtgtatgaggacactctcacactctttccattttctggagaaaccgtgttcatgagcatggagaatccaggcctttggatcttgggttgccacaacagtgattttcgcaatcggggaatgactgctctcctcaaagtcagcagctgtgataagaacacaggcgactattacgaagattcttacgaggacataagtgcctacttgttgtccaagaataacgccattgagcccagatcattctcccagaatcctcccgtgcttaaaaggcatcagcgcgaaatcaccagaactactcttcagtctgatcaagaggagattgactatgacgacaccataagcgtggaaatgaagaaggaggatttcgatatctatgacgaagatgagaaccagtctccgcggagctttcagaagaagacgcgacactacttcattgcagcagtcgaaaggctttgggactacggtatgtcatcatcccctcatgtgttgcgcaatagagctcagagtggaagtgttccacagttcaagaaagtcgtctttcaagagtttacagatggcagcttcacacagcctctctatcggggcgagcttaacgaacatttgggactccttggtccctatatccgagccgaagtggaggacaacattatggttacctttaggaatcaagcctctcgcccctacagcttctactcctccctcatcagttatgaggaggatcagagacaaggcgctgaaccacggaagaactttgtgaaaccgaatgagacgaagacctacttctggaaagtacagcaccacatggcccccacaaaagacgaattcgattgcaaagcatgggcgtatttttcagacgttgacttggagaaagatgtacattcaggacttattggtcctttgttggtgtgtcacactaacactctcaatccagcccatggcaggcaggtgacagtccaggaattcgctcttttctttaccatctttgatgagaccaagtcctggtacttcacggaaaacatggagcgcaattgcagagccccctgtaacatacagatggaggaccctacctttaaggaaaattatcggttccacgcaatcaacggatacattatggatacactccctggccttgtgatggctcaggaccaacgaatcaggtggtacctcctcagcatgggttctaatgagaacatacactccattcacttttcaggacatgtgttcactgtccggaagaaagaagagtataagatggccctctacaatttgtatccaggcgtgtttgagaccgttgaaatgcttccctctaaagctggcatctggagagtagagtgcttgatcggagaacatcttcacgcaggtatgagcaccttgttcctcgtgtacagcaacaaatgtcagaccccacttggcatggccagtggacacattcgcgactttcagatcacagcatctggccagtatggacaatgggccccaaagttggctcgcctccattactccggtagcataaatgcgtggtccactaaagaacctttcagctggattaaggtcgatcttcttgcccccatgatcatccacggcattaagacacagggagcgaggcagaaattctcctccctctacatctcacagttcattattatgtatagtttggacggcaagaagtggcaaacttatagaggtaacagtactggaacactcatggtgttcttcggcaacgttgatagctctggcatcaaacacaacatctttaatcctcccataatagctcggtacatcagattgcatccgacccactacagcattaggagtacactccgaatggagcttatgggttgcgacttgaattcctgttcaatgccactcggaatggagtctaaagccatctctgatgcacagataaccgccagtagctactttacgaacatgtttgctacgtggtcaccctctaaggcaaggcttcatttgcaaggccggtctaatgcctggagacctcaggtgaacaacccgaaagaatggctccaggtggactttcagaagaccatgaaagtaacaggtgtcactactcagggagttaagtccttgctcaccagcatgtatgtgaaggagttccttatttcctcatcacaagatggccaccagtggaccctcttctttcagaatggtaaggtcaaagtgtttcagggcaatcaagacagcttcacacccgtggtgaacagtcttgatcctccactcttgacacgataccttcgaatccatccacagtcttgggttcaccagattgcattgcgcatggaagtacttggatgcgaggctcaggacctctac

SEQ ID NO: 82 - protein, 1457 aa, synthetic construct
  REGION 1..1457: note = Variant of human B-domain deleted Factor VIII
MQIELSTCFFLCLLRFCFSATRRYYLGAVELSWDYMQSDLGELPVDARFPPRVPKSLPFNTSVVYKKTLFVEFTDHLFNIAKPRPPWMGLLGPTIQAEVYDTVVITLKNMASHPVSLHAVGVSYWKASEGAEYDDQTSQREKEDDKVFPGGSHTYVWQVLKENGPMASDPLCLTYSYLSHVDLVKDLNSGLIGALLVCREGSLAKEKTQTLHKFILLFAVFDEGKSWHSETKNSLMQDRDAASARAWPKMHTVNGYVNRSLPGLIGCHRKSVYWHVIGMGTTPEVHSIFLEGHTFLVRNHRQASLEISPITFLTAQTLLMDLGQFLLFCHISSHQHDGMEAYVKVDSCPEEPQLRMKNNEEAEDYDDDLTDSEMDVVRFDDDNSPSFIQIRSVAKKHPKTWVHYIAAEEEDWDYAPLVLAPDDRSYKSQYLNNGPQRIGRKYKKVRFMAYTDETFKTREAIQHESGILGPLLYGEVGDTLLIIFKNQASRPYNIYPHGITDVRPLYSRRLPKGVKHLKDFPILPGEIFKYKWTVTVEDGPTKSDPRCLTRYYSSFVNMERDLASGLIGPLLICYKESVDQRGNQIMSDKRNVILFSVFDENRSWYLTENIQRFLPNPAGVQLEDPEFQASNIMHSINGYVFDSLQLSVCLHEVAYWYILSIGAQTDFLSVFFSGYTFKHKMVYEDTLTLFPFSGETVFMSMENPGLWILGCHNSDFRNRGMTALLKVSSCDKNTGDYYEDSYEDISAYLLSKNNAIEPRSFSQNPPVLKRHQREITRTTLQSDQEEIDYDDTISVEMKKEDFDIYDEDENQSPRSFQKKTRHYFIAAVERLWDYGMSSSPHVLRNRAQSGSVPQFKKVVFQEFTDGSFTQPLYRGELNEHLGLLGPYIRAEVEDNIMVTFRNQASRPYSFYSSLISYEEDQRQGAEPRKNFVKPNETKTYFWKVQHHMAPTKDEFDCKAWAYFSDVDLEKDVHSGLIGPLLVCHTNTLNPAHGRQVTVQEFALFFTIFDETKSWYFTENMERNCRAPCNIQMEDPTFKENYRFHAINGYIMDTLPGLVMAQDQRIRWYLLSMGSNENIHSIHFSGHVFTVRKKEEYKMALYNLYPGVFETVEMLPSKAGIWRVECLIGEHLHAGMSTLFLVYSNKCQTPLGMASGHIRDFQITASGQYGQWAPKLARLHYSGSINAWSTKEPFSWIKVDLLAPMIIHGIKTQGARQKFSSLYISQFIIMYSLDGKKWQTYRGNSTGTLMVFFGNVDSSGIKHNIFNPPIIARYIRLHPTHYSIRSTLRMELMGCDLNSCSMPLGMESKAISDAQITASSYFTNMFATWSPSKARLHLQGRSNAWRPQVNNPKEWLQVDFQKTMKVTGVTTQGVKSLLTSMYVKEFLISSSQDGHQWTLFFQNGKVKVFQGNQDSFTPVVNSLDPPLLTRYLRIHPQSWVHQIALRMEVLGCEAQDLY

SEQ ID NO: 83 - DNA, 4371 bp, synthetic construct
  misc_feature 1..4371: note = Variant of human B-domain deleted Factor VIII
  source 1..4371: mol_type = other DNA
atgcagattgaactgtctacctgcttcttcctctgtttgctgaggttctgctttagcgccactagacggtactaccttggcgctgtggagctgtcctgggactatatgcagagtgatttgggagagcttcccgtcgacgcacgatttcctcctcgcgttccaaagtcatttcccttcaacacaagcgtggtgtacaagaagacgctcttcgtcgaattcaccgatcacctgttcaatatcgccaaacccagaccaccatggatgggtcttttggggcctaccatacaagcggaggtgtatgacacagttgttatcactctcaagaacatggcttctcatccggtaagtcttcacgcagtgggcgtgtcctactggaaagcttcagaaggagccgagtatgatgatcagacatcccagagggagaaagaagacgacaaggtatttccaggtgggtctcatacctatgtgtggcaagtgctcaaagagaatggccctatggcaagcgatccgctctgtttgacttacagctacctttcacacgttgacctcgtcaaggacctcaactccgggttgattggagccttgttggtatgcagggaaggatctcttgccaaagagaagacacagaccctccacaagtttatccttctctttgctgtgttcgatgagggcaaaagttggcatagcgaaacgaagaattccctcatgcaggatcgcgacgcagccagcgccagagcttggcccaagatgcacactgtgaacggatatgtcaataggtcacttcctggcttgattgggtgtcatcggaaaagtgtctactggcacgtgatcggaatggggacaacaccagaggtccactccatatttctcgaaggccataccttccttgttcgaaaccacagacaggcatccttggagatctctcccattacctttctcactgcccaaacgctccttatggacttgggtcagttccttctcttctgccatatcagctcacaccagcatgatggtatggaagcttatgtgaaagtcgacagttgtcctgaggagccaagtttgcgcatgaagaataatgaagaagccgaggattacgacgacgatctcaccgattctgagatggacgtggtgaggtttgatgacgacaactctccctccttcattcaaatccggagcgtggcgaagaaacaccccaagacttgggtccactatatagcggcggaagaggaggattgggattacgctcctcttgtattggcaccagatgaccgctcatacaaaagccagtacctcaacaacggaccgcagagaattggccggaagtataagaaagtgcgatttatggcctatacagacgaaacctttaagacaagggaggccatccagcatgagagtgggattttgggacctcttctttacggcgaagttggtgataccctcctcatcatcttcaagaatcaagcttctcgcccctataacatttacccacacgggatcactgacgttaggcctttgtatagcagaagacttcccaaaggcgtgaagcatctcaaagacttccccattttgccaggcgagatctttaagtacaaatggaccgtcacagtggaagatggaccgactaaatcagaccctcgatgccttacgcggtactattcctccttcgtgaatatggagagagatttggcaagcggactcataggaccactcctcatctgttacaaggaatctgtagaccagaggggtaaccagattatgagtgataaacgcaatgtgatcctttttagcgtcttcgacgagaaccggtcctggtacttgaccgagaatatacaaaggttccttcccaaccccgcaggcgttcagttggaagaccctgagtttcaggccagcaatattatgcactcaatcaacggctatgtgtttgatagtctccagctttctgtttgcctccatgaagtagcctattggtacatcttgtcaattggtgctcaaacagacttcctctccgtcttcttctccggctacacctttaagcacaagatggtgtatgaggacactctcacactctttccattttctggagaaaccgtgttcatgagcatggagaatccaggcctttggatcttgggttgccacaacagtgattttcgcaatcggggaatgactgctctcctcaaagtcagcagctgtgataagaacacaggcgactattacgaagattcttacgaggacataagtgcctacttgttgtccaagaataacgccattgagcccagatcattctcccagaatcctcccgtgcttaaaaggcatcagcgcgaaatcaccagaactactcttcagtctgatcaagaggagattgactatgacgacaccataagcgtggaaatgaagaaggaggatttcgatatctatgacgaagatgagaaccagtctccgcggagctttcagaagaagacgcgacactacttcattgcagcagtcgaaaggctttgggactacggtatgtcatcatcccctcatgtgttgcgcaatagagctcagagtggaagtgttccacagttcaagaaagtcgtctttcaagagtttacagatggcagcttcacacagcctctctatcggggcgagcttaacgaacatttgggactccttggtccctatatccgagccgaagtggaggacaacattatggttacctttaggaatcaagcctctcgcccctacagcttctactcctccctcatcagttatgaggaggatcagagacaaggcgctgaaccacggaagaactttgtgaaaccgaatgagacgaagacctacttctggaaagtacagcaccacatggcccccacaaaagacgaattcgattgcaaagcatgggcgtatttttcagacgttgacttggagaaagatgtacattcaggacttattggtcctttgttggtgtgtcacactaacactctcaatccagcccatggcaggcaggtgacagtccaggaattcgctcttttctttaccatctttgatgagaccaagtcctggtacttcacggaaaacatggagcgcaattgcagagccccctgtaacatacagatggaggaccctacctttaaggaaaattatcggttccacgcaatcaacggatacattatggatacactccctggccttgtgatggctcaggaccaacgaatcaggtggtacctcctcagcatgggttctaatgagaacatacactccattcacttttcaggacatgtgttcactgtccggaagaaagaagagtataagatggccctctacaatttgtatccaggcgtgtttgagaccgttgaaatgcttccctctaaagctggcatctggagagtagagtgcttgatcggagaacatcttcacgcaggtatgagcaccttgttcctcgtgtacagcaacaaatgtcagaccccacttggcatggccagtggacacattcgcgactttcagatcacagcatctggccagtatggacaatgggccccaaagttggctcgcctccattactccggtagcataaatgcgtggtccactaaagaacctttcagctggattaaggtcgatcttcttgcccccatgatcatccacggcattaagacacagggagcgaggcagaaattctcctccctctacatctcacagttcattattatgtatagtttggacggcaagaagtggcaaacttatagaggtaacagtactggaacactcatggtgttcttcggcaacgttgatagctctggcatcaaacacaacatctttaatcctcccataatagctcggtacatcagattgcatccgacccactacagcattaggagtacactccgaatggagcttatgggttgcgacttgaattcctgttcaatgccactcggaatggagtctaaagccatctctgatgcacagataaccgccagtagctactttacgaacatgtttgctacgtggtcaccctctaaggcaaggcttcatttgcaaggccggtctaatgcctggagacctcaggtgaacaacccgaaagaatggctccaggtggactttcagaagaccatgaaagtaacaggtgtcactactcagggagttaagtccttgctcaccagcatgtatgtgaaggagttccttatttcctcatcacaagatggccaccagtggaccctcttctttcagaatggtaaggtcaaagtgtttcagggcaatcaagacagcttcacacccgtggtgaacagtcttgatcctccactcttgacacgataccttcgaatccatccacagtcttgggttcaccagattgcattgcgcatggaagtacttggatgcgaggctcaggacctctac

SEQ ID NO: 84 - protein, 1457 aa, synthetic construct
  REGION 1..1457: note = Variant of human B-domain deleted Factor VIII
MQIELSTCFFLCLLRFCFSATRRYYLGAVELSWDYMQSDLGELPVDARFPPRVPKSFPFNTSVVYKKTLFVEFTDHLFNIAKPRPPWMGLLGPTIQAEVYDTVVITLKNMASHPVSLHAVGVSYWKASEGAEYDDQTSQREKEDDKVFPGGSHTYVWQVLKENGPMASDPLCLTYSYLSHVDLVKDLNSGLIGALLVCREGSLAKEKTQTLHKFILLFAVFDEGKSWHSETKNSLMQDRDAASARAWPKMHTVNGYVNRSLPGLIGCHRKSVYWHVIGMGTTPEVHSIFLEGHTFLVRNHRQASLEISPITFLTAQTLLMDLGQFLLFCHISSHQHDGMEAYVKVDSCPEEPSLRMKNNEEAEDYDDDLTDSEMDVVRFDDDNSPSFIQIRSVAKKHPKTWVHYIAAEEEDWDYAPLVLAPDDRSYKSQYLNNGPQRIGRKYKKVRFMAYTDETFKTREAIQHESGILGPLLYGEVGDTLLIIFKNQASRPYNIYPHGITDVRPLYSRRLPKGVKHLKDFPILPGEIFKYKWTVTVEDGPTKSDPRCLTRYYSSFVNMERDLASGLIGPLLICYKESVDQRGNQIMSDKRNVILFSVFDENRSWYLTENIQRFLPNPAGVQLEDPEFQASNIMHSINGYVFDSLQLSVCLHEVAYWYILSIGAQTDFLSVFFSGYTFKHKMVYEDTLTLFPFSGETVFMSMENPGLWILGCHNSDFRNRGMTALLKVSSCDKNTGDYYEDSYEDISAYLLSKNNAIEPRSFSQNPPVLKRHQREITRTTLQSDQEEIDYDDTISVEMKKEDFDIYDEDENQSPRSFQKKTRHYFIAAVERLWDYGMSSSPHVLRNRAQSGSVPQFKKVVFQEFTDGSFTQPLYRGELNEHLGLLGPYIRAEVEDNIMVTFRNQASRPYSFYSSLISYEEDQRQGAEPRKNFVKPNETKTYFWKVQHHMAPTKDEFDCKAWAYFSDVDLEKDVHSGLIGPLLVCHTNTLNPAHGRQVTVQEFALFFTIFDETKSWYFTENMERNCRAPCNIQMEDPTFKENYRFHAINGYIMDTLPGLVMAQDQRIRWYLLSMGSNENIHSIHFSGHVFTVRKKEEYKMALYNLYPGVFETVEMLPSKAGIWRVECLIGEHLHAGMSTLFLVYSNKCQTPLGMASGHIRDFQITASGQYGQWAPKLARLHYSGSINAWSTKEPFSWIKVDLLAPMIIHGIKTQGARQKFSSLYISQFIIMYSLDGKKWQTYRGNSTGTLMVFFGNVDSSGIKHNIFNPPIIARYIRLHPTHYSIRSTLRMELMGCDLNSCSMPLGMESKAISDAQITASSYFTNMFATWSPSKARLHLQGRSNAWRPQVNNPKEWLQVDFQKTMKVTGVTTQGVKSLLTSMYVKEFLISSSQDGHQWTLFFQNGKVKVFQGNQDSFTPVVNSLDPPLLTRYLRIHPQSWVHQIALRMEVLGCEAQDLY

SEQ ID NO: 85 - DNA, 4371 bp, synthetic construct
  misc_feature 1..4371: note = Variant of human B-domain deleted Factor VIII
  source 1..4371: mol_type = other DNA
atgcagattgaactgtctacctgcttcttcctctgtttgctgaggttctgctttagcgccactagacggtactaccttggcgctgtggagctgtcctgggactatatgcagagtgatttgggagagcttcccgtcgacgcacgatttcctcctcgcgttccaaagtcatttcccttcaacacaagcgtggtgtacaagaagacgctcttcgtcgaattcaccgatcacctgttcaatatcgccaaacccagaccaccatggatgggtcttttggggcctaccatacaagcggaggtgtatgacacagttgttatcactctcaagaacatggcttctcatccggtaagtcttcacgcagtgggcgtgtcctactggaaagcttcagaaggagccgagtatgatgatcagacatcccagagggagaaagaagacgacaaggtatttccaggtgggtctcatacctatgtgtggcaagtgctcaaagagaatggccctatggcaagcgatccgctctgtttgacttacagctacctttcacacgttgacctcgtcaaggacctcaactccgggttgattggagccttgttggtatgcagggaaggatctcttgccaaagagaagacacagaccctccacaagtttatccttctctttgctgtgttcgatgagggcaaaagttggcatagcgaaacgaagaattccctcatgcaggatcgcgacgcagccagcgccagagcttggcccaagatgcacactgtgaacggatatgtcaataggtcacttcctggcttgattgggtgtcatcggaaaagtgtctactggcacgtgatcggaatggggacaacaccagaggtccactccatatttctcgaaggccataccttccttgttcgaaaccacagacaggcatccttggagatctctcccattacctttctcactgcccaaacgctccttatggacttgggtcagttccttctcttctgccatatccagtcacaccagcatgatggtatggaagcttatgtgaaagtcgacagttgtcctgaggagccacagttgcgcatgaagaataatgaagaagccgaggattacgacgacgatctcaccgattctgagatggacgtggtgaggtttgatgacgacaactctccctccttcattcaaatccggagcgtggcgaagaaacaccccaagacttgggtccactatatagcggcggaagaggaggattgggattacgctcctcttgtattggcaccagatgaccgctcatacaaaagccagtacctcaacaacggaccgcagagaattggccggaagtataagaaagtgcgatttatggcctatacagacgaaacctttaagacaagggaggccatccagcatgagagtgggattttgggacctcttctttacggcgaagttggtgataccctcctcatcatcttcaagaatcaagcttctcgcccctataacatttacccacacgggatcactgacgttaggcctttgtatagcagaagacttcccaaaggcgtgaagcatctcaaagacttccccattttgccaggcgagatctttaagtacaaatggaccgtcacagtggaagatggaccgactaaatcagaccctcgatgccttacgcggtactattcctccttcgtgaatatggagagagatttggcaagcggactcataggaccactcctcatctgttacaaggaatctgtagaccagaggggtaaccagattatgagtgataaacgcaatgtgatcctttttagcgtcttcgacgagaaccggtcctggtacttgaccgagaatatacaaaggttccttcccaaccccgcaggcgttcagttggaagaccctgagtttcaggccagcaatattatgcactcaatcaacggctatgtgtttgatagtctccagctttctgtttgcctccatgaagtagcctattggtacatcttgtcaattggtgctcaaacagacttcctctccgtcttcttctccggctacacctttaagcacaagatggtgtatgaggacactctcacactctttccattttctggagaaaccgtgttcatgagcatggagaatccaggcctttggatcttgggttgccacaacagtgattttcgcaatcggggaatgactgctctcctcaaagtcagcagctgtgataagaacacaggcgactattacgaagattcttacgaggacataagtgcctacttgttgtccaagaataacgccattgagcccagatcattctcccagaatcctcccgtgcttaaaaggcatcagcgcgaaatcaccagaactactcttcagtctgatcaagaggagattgactatgacgacaccataagcgtggaaatgaagaaggaggatttcgatatctatgacgaagatgagaaccagtctccgcggagctttcagaagaagacgcgacactacttcattgcagcagtcgaaaggctttgggactacggtatgtcatcatcccctcatgtgttgcgcaatagagctcagagtggaagtgttccacagttcaagaaagtcgtctttcaagagtttacagatggcagcttcacacagcctctctatcggggcgagcttaacgaacatttgggactccttggtccctatatccgagccgaagtggaggacaacattatggttacctttaggaatcaagcctctcgcccctacagcttctactcctccctcatcagttatgaggaggatcagagacaaggcgctgaaccacggaagaactttgtgaaaccgaatgagacgaagacctacttctggaaagtacagcaccacatggcccccacaaaagacgaattcgattgcaaagcatgggcgtatttttcagacgttgacttggagaaagatgtacattcaggacttattggtcctttgttggtgtgtcacactaacactctcaatccagcccatggcaggcaggtgacagtccaggaattcgctcttttctttaccatctttgatgagaccaagtcctggtacttcacggaaaacatggagcgcaattgcagagccccctgtaacatacagatggaggaccctacctttaaggaaaattatcggttccacgcaatcaacggatacattatggatacactccctggccttgtgatggctcaggaccaacgaatcaggtggtacctcctcagcatgggttctaatgagaacatacactccattcacttttcaggacatgtgttcactgtccggaagaaagaagagtataagatggccctctacaatttgtatccaggcgtgtttgagaccgttgaaatgcttccctctaaagctggcatctggagagtagagtgcttgatcggagaacatcttcacgcaggtatgagcaccttgttcctcgtgtacagcaacaaatgtcagaccccacttggcatggccagtggacacattcgcgactttcagatcacagcatctggccagtatggacaatgggccccaaagttggctcgcctccattactccggtagcataaatgcgtggtccactaaagaacctttcagctggattaaggtcgatcttcttgcccccatgatcatccacggcattaagacacagggagcgaggcagaaattctcctccctctacatctcacagttcattattatgtatagtttggacggcaagaagtggcaaacttatagaggtaacagtactggaacactcatggtgttcttcggcaacgttgatagctctggcatcaaacacaacatctttaatcctcccataatagctcggtacatcagattgcatccgacccactacagcattaggagtacactccgaatggagcttatgggttgcgacttgaattcctgttcaatgccactcggaatggagtctaaagccatctctgatgcacagataaccgccagtagctactttacgaacatgtttgctacgtggtcaccctctaaggcaaggcttcatttgcaaggccggtctaatgcctggagacctcaggtgaacaacccgaaagaatggctccaggtggactttcagaagaccatgaaagtaacaggtgtcactactcagggagttaagtccttgctcaccagcatgtatgtgaaggagttccttatttcctcatcacaagatggccaccagtggaccctcttctttcagaatggtaaggtcaaagtgtttcagggcaatcaagacagcttcacacccgtggtgaacagtcttgatcctccactcttgacacgataccttcgaatccatccacagtcttgggttcaccagattgcattgcgcatggaagtacttggatgcgaggctcaggacctctac

SEQ ID NO: 86 - protein, 1457 aa, synthetic construct
  REGION 1..1457: note = Variant of human B-domain deleted Factor VIII
MQIELSTCFFLCLLRFCFSATRRYYLGAVELSWDYMQSDLGELPVDARFPPRVPKSFPFNTSVVYKKTLFVEFTDHLFNIAKPRPPWMGLLGPTIQAEVYDTVVITLKNMASHPVSLHAVGVSYWKASEGAEYDDQTSQREKEDDKVFPGGSHTYVWQVLKENGPMASDPLCLTYSYLSHVDLVKDLNSGLIGALLVCREGSLAKEKTQTLHKFILLFAVFDEGKSWHSETKNSLMQDRDAASARAWPKMHTVNGYVNRSLPGLIGCHRKSVYWHVIGMGTTPEVHSIFLEGHTFLVRNHRQASLEISPITFLTAQTLLMDLGQFLLFCHIQSHQHDGMEAYVKVDSCPEEPQLRMKNNEEAEDYDDDLTDSEMDVVRFDDDNSPSFIQIRSVAKKHPKTWVHYIAAEEEDWDYAPLVLAPDDRSYKSQYLNNGPQRIGRKYKKVRFMAYTDETFKTREAIQHESGILGPLLYGEVGDTLLIIFKNQASRPYNIYPHGITDVRPLYSRRLPKGVKHLKDFPILPGEIFKYKWTVTVEDGPTKSDPRCLTRYYSSFVNMERDLASGLIGPLLICYKESVDQRGNQIMSDKRNVILFSVFDENRSWYLTENIQRFLPNPAGVQLEDPEFQASNIMHSINGYVFDSLQLSVCLHEVAYWYILSIGAQTDFLSVFFSGYTFKHKMVYEDTLTLFPFSGETVFMSMENPGLWILGCHNSDFRNRGMTALLKVSSCDKNTGDYYEDSYEDISAYLLSKNNAIEPRSFSQNPPVLKRHQREITRTTLQSDQEEIDYDDTISVEMKKEDFDIYDEDENQSPRSFQKKTRHYFIAAVERLWDYGMSSSPHVLRNRAQSGSVPQFKKVVFQEFTDGSFTQPLYRGELNEHLGLLGPYIRAEVEDNIMVTFRNQASRPYSFYSSLISYEEDQRQGAEPRKNFVKPNETKTYFWKVQHHMAPTKDEFDCKAWAYFSDVDLEKDVHSGLIGPLLVCHTNTLNPAHGRQVTVQEFALFFTIFDETKSWYFTENMERNCRAPCNIQMEDPTFKENYRFHAINGYIMDTLPGLVMAQDQRIRWYLLSMGSNENIHSIHFSGHVFTVRKKEEYKMALYNLYPGVFETVEMLPSKAGIWRVECLIGEHLHAGMSTLFLVYSNKCQTPLGMASGHIRDFQITASGQYGQWAPKLARLHYSGSINAWSTKEPFSWIKVDLLAPMIIHGIKTQGARQKFSSLYISQFIIMYSLDGKKWQTYRGNSTGTLMVFFGNVDSSGIKHNIFNPPIIARYIRLHPTHYSIRSTLRMELMGCDLNSCSMPLGMESKAISDAQITASSYFTNMFATWSPSKARLHLQGRSNAWRPQVNNPKEWLQVDFQKTMKVTGVTTQGVKSLLTSMYVKEFLISSSQDGHQWTLFFQNGKVKVFQGNQDSFTPVVNSLDPPLLTRYLRIHPQSWVHQIALRMEVLGCEAQDLY

SEQ ID NO: 87 - DNA, 4371 bp, synthetic construct
  misc_feature 1..4371: note = Variant of human B-domain deleted Factor VIII
  source 1..4371: mol_type = other DNA
atgcagattgaactgtctacctgcttcttcctctgtttgctgaggttctgctttagcgccactagacggtactaccttggcgctgtggagctgtcctgggactatatgcagagtgatttgggagagcttcccgtcgacgcacgatttcctcctcgcgttccaaagtcatttcccttcaacacaagcgtggtgtacaagaagacgctcttcgtcgaattcaccgatcacctgttcaatatcgccaaacccagaccaccatggatgggtcttttggggcctaccatacaagcggaggtgtatgacacagttgttatcactctcaagaacatggcttctcatccggtaagtcttcacgcagtgggcgtgtcctactggaaagcttcagaaggagccgagtatgatgatcagacatcccagagggagaaagaagacgacaaggtatttccaggtgggtctcatacctatgtgtggcaagtgctcaaagagaatggccctatggcaagcgatccgctctgtttgacttacagctacctttcacacgttgacctcgtcaaggacctcaactccgggttgattggagccttgttggtatgcagggaaggatctcttgccaaagagaagacacagaccctccacaagtttatccttctctttgctgtgttcgatgagggcaaaagttggcatagcgaaacgaagaattccctcatgcaggatcgcgacgcagccagcgccagagcttggcccaagatgcacactgtgaacggatatgtcaataggtcacttcctggcttgattgggtgtcatcggaaaagtgtctactggcacgtgatcggaatggggacaacaccagaggtccactccatatttctcgaaggccataccttccttgttcgaaaccacagacaggcatccttggagatctctcccattacctttctcactgcccaaacgctccttatggacttgggtcagttccttctcttctgccatatcagctcacaccagcatgatggtatggaagcttatgtgaaagtcgacagttgtcctgaggagccacagttgcgcatgaagaataatgaagaagccgaggattacgacgacgatctcaccgattctgagatggacgtggtgaggtttgatgacgacaactctccctccttcattcaaatccggagcgtggcgaagaaacaccccaagacttgggtccactatatagcggcggaagaggaggattgggattacgctcctcttgtattggcaccagatgaccgctcatacaaaagccagtacctcaacaacggaccgcagagaattggccggaagtataagaaagtgcgatttatggcctatacagacgaaacctttaagacaagggaggccatccagcatgagagtgggattttgggacctcttctttacggcgaagttggtgataccctcctcatcatcttcaagaatcaagcttctcgcccctataacatttacccacacgggatcactgacgttaggcctttgtatagcagaagacttcccaaaggcgtgaagcatctcaaagacttccccattttgccaggcgagatctttaagtacaaatggaccgtcacagtggaagatggaccgactaaatcagaccctcgatgccttacgcggtactattcctccttcgtgaatatggagagagatttggcaagcggactcataggaccactcctcatctgttacaaggaatctgtagaccagaggggtaaccagattatgagtgataaacgcaatgtgatcctttttagcgtcttcgacgagaaccggtcctggtacttgaccgagaatatacaaaggttccttcccaaccccgcaggcgttcagttggaagaccctgagtttcaggccagcaatattatgcactcaatcaacggctatgtgtttgatagtctccagctttctgtttgcctccatgaagtagcctattggtacatcttgtcaattggtgctcaaacagacttcctctccgtcttcttctccggctacacctttaagcacaagatggtgtatgaggacactctcacactctttccattttctggagaaaccgtgttcatgagcatggagaatccaggcctttgggcgttgggttgccacaacagtgattttcgcaatcggggaatgactgctctcctcaaagtcagcagctgtgataagaacacaggcgactattacgaagattcttacgaggacataagtgcctacttgttgtccaagaataacgccattgagcccagatcattctcccagaatcctcccgtgcttaaaaggcatcagcgcgaaatcaccagaactactcttcagtctgatcaagaggagattgactatgacgacaccataagcgtggaaatgaagaaggaggatttcgatatctatgacgaagatgagaaccagtctccgcggagctttcagaagaagacgcgacactacttcattgcagcagtcgaaaggctttgggactacggtatgtcatcatcccctcatgtgttgcgcaatagagctcagagtggaagtgttccacagttcaagaaagtcgtctttcaagagtttacagatggcagcttcacacagcctctctatcggggcgagcttaacgaacatttgggactccttggtccctatatccgagccgaagtggaggacaacattatggttacctttaggaatcaagcctctcgcccctacagcttctactcctccctcatcagttatgaggaggatcagagacaaggcgctgaaccacggaagaactttgtgaaaccgaatgagacgaagacctacttctggaaagtacagcaccacatggcccccacaaaagacgaattcgattgcaaagcatgggcgtatttttcagacgttgacttggagaaagatgtacattcaggacttattggtcctttgttggtgtgtcacactaacactctcaatccagcccatggcaggcaggtgacagtccaggaattcgctcttttctttaccatctttgatgagaccaagtcctggtacttcacggaaaacatggagcgcaattgcagagccccctgtaacatacagatggaggaccctacctttaaggaaaattatcggttccacgcaatcaacggatacattatggatacactccctggccttgtgatggctcaggaccaacgaatcaggtggtacctcctcagcatgggttctaatgagaacatacactccattcacttttcaggacatgtgttcactgtccggaagaaagaagagtataagatggccctctacaatttgtatccaggcgtgtttgagaccgttgaaatgcttccctctaaagctggcatctggagagtagagtgcttgatcggagaacatcttcacgcaggtatgagcaccttgttcctcgtgtacagcaacaaatgtcagaccccacttggcatggccagtggacacattcgcgactttcagatcacagcatctggccagtatggacaatgggccccaaagttggctcgcctccattactccggtagcataaatgcgtggtccactaaagaacctttcagctggattaaggtcgatcttcttgcccccatgatcatccacggcattaagacacagggagcgaggcagaaattctcctccctctacatctcacagttcattattatgtatagtttggacggcaagaagtggcaaacttatagaggtaacagtactggaacactcatggtgttcttcggcaacgttgatagctctggcatcaaacacaacatctttaatcctcccataatagctcggtacatcagattgcatccgacccactacagcattaggagtacactccgaatggagcttatgggttgcgacttgaattcctgttcaatgccactcggaatggagtctaaagccatctctgatgcacagataaccgccagtagctactttacgaacatgtttgctacgtggtcaccctctaaggcaaggcttcatttgcaaggccggtctaatgcctggagacctcaggtgaacaacccgaaagaatggctccaggtggactttcagaagaccatgaaagtaacaggtgtcactactcagggagttaagtccttgctcaccagcatgtatgtgaaggagttccttatttcctcatcacaagatggccaccagtggaccctcttctttcagaatggtaaggtcaaagtgtttcagggcaatcaagacagcttcacacccgtggtgaacagtcttgatcctccactcttgacacgataccttcgaatccatccacagtcttgggttcaccagattgcattgcgcatggaagtacttggatgcgaggctcaggacctctac

SEQ ID NO: 88 - protein, 1457 aa, synthetic construct
  REGION 1..1457: note = Variant of human B-domain deleted Factor VIII
MQIELSTCFFLCLLRFCFSATRRYYLGAVELSWDYMQSDLGELPVDARFPPRVPKSFPFNTSVVYKKTLFVEFTDHLFNIAKPRPPWMGLLGPTIQAEVYDTVVITLKNMASHPVSLHAVGVSYWKASEGAEYDDQTSQREKEDDKVFPGGSHTYVWQVLKENGPMASDPLCLTYSYLSHVDLVKDLNSGLIGALLVCREGSLAKEKTQTLHKFILLFAVFDEGKSWHSETKNSLMQDRDAASARAWPKMHTVNGYVNRSLPGLIGCHRKSVYWHVIGMGTTPEVHSIFLEGHTFLVRNHRQASLEISPITFLTAQTLLMDLGQFLLFCHISSHQHDGMEAYVKVDSCPEEPQLRMKNNEEAEDYDDDLTDSEMDVVRFDDDNSPSFIQIRSVAKKHPKTWVHYIAAEEEDWDYAPLVLAPDDRSYKSQYLNNGPQRIGRKYKKVRFMAYTDETFKTREAIQHESGILGPLLYGEVGDTLLIIFKNQASRPYNIYPHGITDVRPLYSRRLPKGVKHLKDFPILPGEIFKYKWTVTVEDGPTKSDPRCLTRYYSSFVNMERDLASGLIGPLLICYKESVDQRGNQIMSDKRNVILFSVFDENRSWYLTENIQRFLPNPAGVQLEDPEFQASNIMHSINGYVFDSLQLSVCLHEVAYWYILSIGAQTDFLSVFFSGYTFKHKMVYEDTLTLFPFSGETVFMSMENPGLWALGCHNSDFRNRGMTALLKVSSCDKNTGDYYEDSYEDISAYLLSKNNAIEPRSFSQNPPVLKRHQREITRTTLQSDQEEIDYDDTISVEMKKEDFDIYDEDENQSPRSFQKKTRHYFIAAVERLWDYGMSSSPHVLRNRAQSGSVPQFKKVVFQEFTDGSFTQPLYRGELNEHLGLLGPYIRAEVEDNIMVTFRNQASRPYSFYSSLISYEEDQRQGAEPRKNFVKPNETKTYFWKVQHHMAPTKDEFDCKAWAYFSDVDLEKDVHSGLIGPLLVCHTNTLNPAHGRQVTVQEFALFFTIFDETKSWYFTENMERNCRAPCNIQMEDPTFKENYRFHAINGYIMDTLPGLVMAQDQRIRWYLLSMGSNENIHSIHFSGHVFTVRKKEEYKMALYNLYPGVFETVEMLPSKAGIWRVECLIGEHLHAGMSTLFLVYSNKCQTPLGMASGHIRDFQITASGQYGQWAPKLARLHYSGSINAWSTKEPFSWIKVDLLAPMIIHGIKTQGARQKFSSLYISQFIIMYSLDGKKWQTYRGNSTGTLMVFFGNVDSSGIKHNIFNPPIIARYIRLHPTHYSIRSTLRMELMGCDLNSCSMPLGMESKAISDAQITASSYFTNMFATWSPSKARLHLQGRSNAWRPQVNNPKEWLQVDFQKTMKVTGVTTQGVKSLLTSMYVKEFLISSSQDGHQWTLFFQNGKVKVFQGNQDSFTPVVNSLDPPLLTRYLRIHPQSWVHQIALRMEVLGCEAQDLY

SEQ ID NO: 89 - DNA, 4371 bp, synthetic construct
  misc_feature 1..4371: note = Variant of human B-domain deleted Factor VIII
  source 1..4371: mol_type = other DNA
atgcagattgaactgtctacctgcttcttcctctgtttgctgaggttctgctttagcgccactagacggtactaccttggcgctgtggagctgtcctgggactatatgcagagtgatttgggagagcttcccgtcgacgcacgatttcctcctcgcgttccaaagtcatttcccttcaacacaagcgtggtgtacaagaagacgctcttcgtcgaattcaccgatcacctgttcaatatcgccaaacccagaccaccatggatgggtcttttggggcctaccatacaagcggaggtgtatgacacagttgttatcactctcaagaacatggcttctcatccggtaagtcttcacgcagtgggcgtgtcctactggaaagcttcagaaggagccgagtatgatgatcagacatcccagagggagaaagaagacgacaaggtatttccaggtgggtctcatacctatgtgtggcaagtgctcaaagagaatggccctatggcaagcgatccgctctgtttgacttacagctacctttcacacgttgacctcgtcaaggacctcaactccgggttgattggagccttgttggtatgcagggaaggatctcttgccaaagagaagacacagaccctccacaagtttatccttctctttgctgtgttcgatgagggcaaaagttggcatagcgaaacgaagaattccctcatgcaggatcgcgacgcagccagcgccagagcttggcccaagatgcacactgtgaacggatatgtcaataggtcacttcctggcttgattgggtgtcatcggaaaagtgtctactggcacgtgatcggaatggggacaacaccagaggtccactccatatttctcgaaggccataccttccttgttcgaaaccacagacaggcatccttggagatctctcccattacctttctcactgcccaaacgctccttatggacttgggtcagttccttctcttctgccatatcagctcacaccagcatgatggtatggaagcttatgtgaaagtcgacagttgtcctgaggagccacagttgcgcatgaagaataatgaagaagccgaggattacgacgacgatctcaccgattctgagatggacgtggtgaggtttgatgacgacaactctccctccttcattcaaatccggagcgtggcgaagaaacaccccaagacttgggtccactatatagcggcggaagaggaggattgggattacgctcctcttgtattggcaccagatgaccgctcatacaaaagccagtacctcaacaacggaccgcagagaattggccggaagtataagaaagtgcgatttatggcctatacagacgaaacctttaagacaagggaggccatccagcatgagagtgggattttgggacctcttctttacggcgaagttggtgataccctcctcatcatcttcaagaatcaagcttctcgcccctataacatttacccacacgggatcactgacgttaggcctttgtatagcagaagacttcccaaaggcgtgaagcatctcaaagacttccccattttgccaggcgagatctttaagtacaaatggaccgtcacagtggaagatggaccgactaaatcagaccctcgatgccttacgcggtactattcctccttcgtgaatatggagagagatttggcaagcggactcataggaccactcctcatctgttacaaggaatctgtagaccagaggggtaaccagattatgagtgataaacgcaatgtgatcctttttagcgtcttcgacgagaaccggtcctggtacttgaccgagaatatacaaaggttccttcccaaccccgcaggcgttcagttggaagaccctgagtttcaggccagcaatattatgcactcaatcaacggctatgtgtttgatagtctccagctttctgtttgcctccatgaagtagcctattggtacatcttgtcaattggtgctcaaacagacttcctctccgtcttcttctccggctacacctttaagcacaagatggtgtatgaggacactctcacactctttccattttctggagaaaccgtgttcatgagcatggagaatccaggcctttggatcttgggttgccacaacagtgattttcgcaatcggggaatgactgctctcctcaaagtcagcagctgtgataagaacacaggcgactattacgaagattcttacgaggacataagtgcctacttgttgtccaagaataacgccattgagcccagatcattctcccagaatcctcccgtgcttaaaaggcatcagcgcgaaatcaccagaactactcttcagtctgatcaagaggagattgactatgacgacaccataagcgtggaaatgaagaaggaggatttcgatatctatgacgaagatgagaaccagtctccgcggagctttcagaagaagacgcgacactacttcattgcagcagtcgaaaggctttgggactacggtatgtcatcatcccctcatgtgttgcgcaatagagctcagagtggaagtgttccacagttcaagaaagtcgtctttcaagagtttacagatggcagcttcacacagcctctctatcggggcgagcttaacgaacatttgggactccttggtccctatatccgagccgaagtggaggacaacattatggttacctttaggaatcaagcctctcgcccctacagcttctactcctccctcatcagttatgaggaggatcagagacaaggcgctgaaccacggaagaactttgtgaaaccgaatgagacgaagacctacttctggaaagtacagcaccacatggcccccacaaaagacgaattcgattgcaaagcatgggcgtatttttcagacgttgacttggagaaagatgtacattcaggacttattggtcctttgttggtgtgtcacactaacactctcaatccagcccatggcaggcaggtgacagtccaggaattcgctcttttctttaccatctttgatgagaccaagtcctggtacttcacggaaaacatggagcgcaattgcagagccccctgtaacatacagatggaggaccctacctttaaggaaaattatcggttccacgcaatcaacggatacattatggatacactccctggccttgtgatggctcaggaccaacgaatcaggtggtacctcctcagcatgggttctaatgagaacatacactccattcacttttcaggacatgtgttcactgtccggaagaaagaagagtataagatggccctctacaatttgtatccaggcgtgtttgagaccgttgaaatgcttccctctaaagctggcatctggagagtagagtgcttgatcggagaacatcttcacgcaggtatgagcaccttgttcctcgtgtacagcaacaaatgtcagaccccacttggcatggccagtggacacattcgcgactttcagatcacagcatctggccagtatggacaatgggccccaaagttggctcgcctccattactccggtagcataaatgcgtggtccactaaagaacctttcagctggattaaggtcgatcttcttgcccccatgatcatccacggcattaagacacagggagcgaggcagaaattctcctccctctacatctcacagttcattattatgtatagtttggacggcaagaagtggcaaacttatagaggtaacagtactggaacactcatggtgttcttcggcaacgttgatagctctacgatcaaacacaacatctttaatcctcccataatagctcggtacatcagattgcatccgacccactacagcattaggagtacactccgaatggagcttatgggttgcgacttgaattcctgttcaatgccactcggaatggagtctaaagccatctctgatgcacagataaccgccagtagctactttacgaacatgtttgctacgtggtcaccctctaaggcaaggcttcatttgcaaggccggtctaatgcctggagacctcaggtgaacaacccgaaagaatggctccaggtggactttcagaagaccatgaaagtaacaggtgtcactactcagggagttaagtccttgctcaccagcatgtatgtgaaggagttccttatttcctcatcacaagatggccaccagtggaccctcttctttcagaatggtaaggtcaaagtgtttcagggcaatcaagacagcttcacacccgtggtgaacagtcttgatcctccactcttgacacgataccttcgaatccatccacagtcttgggttcaccagattgcattgcgcatggaagtacttggatgcgaggctcaggacctctac

SEQ ID NO: 90 - protein, 1457 aa, synthetic construct
  REGION 1..1457: note = Variant of human B-domain deleted Factor VIII
MQIELSTCFFLCLLRFCFSATRRYYLGAVELSWDYMQSDLGELPVDARFPPRVPKSFPFNTSVVYKKTLFVEFTDHLFNIAKPRPPWMGLLGPTIQAEVYDTVVITLKNMASHPVSLHAVGVSYWKASEGAEYDDQTSQREKEDDKVFPGGSHTYVWQVLKENGPMASDPLCLTYSYLSHVDLVKDLNSGLIGALLVCREGSLAKEKTQTLHKFILLFAVFDEGKSWHSETKNSLMQDRDAASARAWPKMHTVNGYVNRSLPGLIGCHRKSVYWHVIGMGTTPEVHSIFLEGHTFLVRNHRQASLEISPITFLTAQTLLMDLGQFLLFCHISSHQHDGMEAYVKVDSCPEEPQLRMKNNEEAEDYDDDLTDSEMDVVRFDDDNSPSFIQIRSVAKKHPKTWVHYIAAEEEDWDYAPLVLAPDDRSYKSQYLNNGPQRIGRKYKKVRFMAYTDETFKTREAIQHESGILGPLLYGEVGDTLLIIFKNQASRPYNIYPHGITDVRPLYSRRLPKGVKHLKDFPILPGEIFKYKWTVTVEDGPTKSDPRCLTRYYSSFVNMERDLASGLIGPLLICYKESVDQRGNQIMSDKRNVILFSVFDENRSWYLTENIQRFLPNPAGVQLEDPEFQASNIMHSINGYVFDSLQLSVCLHEVAYWYILSIGAQTDFLSVFFSGYTFKHKMVYEDTLTLFPFSGETVFMSMENPGLWILGCHNSDFRNRGMTALLKVSSCDKNTGDYYEDSYEDISAYLLSKNNAIEPRSFSQNPPVLKRHQREITRTTLQSDQEEIDYDDTISVEMKKEDFDIYDEDENQSPRSFQKKTRHYFIAAVERLWDYGMSSSPHVLRNRAQSGSVPQFKKVVFQEFTDGSFTQPLYRGELNEHLGLLGPYIRAEVEDNIMVTFRNQASRPYSFYSSLISYEEDQRQGAEPRKNFVKPNETKTYFWKVQHHMAPTKDEFDCKAWAYFSDVDLEKDVHSGLIGPLLVCHTNTLNPAHGRQVTVQEFALFFTIFDETKSWYFTENMERNCRAPCNIQMEDPTFKENYRFHAINGYIMDTLPGLVMAQDQRIRWYLLSMGSNENIHSIHFSGHVFTVRKKEEYKMALYNLYPGVFETVEMLPSKAGIWRVECLIGEHLHAGMSTLFLVYSNKCQTPLGMASGHIRDFQITASGQYGQWAPKLARLHYSGSINAWSTKEPFSWIKVDLLAPMIIHGIKTQGARQKFSSLYISQFIIMYSLDGKKWQTYRGNSTGTLMVFFGNVDSSTIKHNIFNPPIIARYIRLHPTHYSIRSTLRMELMGCDLNSCSMPLGMESKAISDAQITASSYFTNMFATWSPSKARLHLQGRSNAWRPQVNNPKEWLQVDFQKTMKVTGVTTQGVKSLLTSMYVKEFLISSSQDGHQWTLFFQNGKVKVFQGNQDSFTPVVNSLDPPLLTRYLRIHPQSWVHQIALRMEVLGCEAQDLY

SEQ ID NO: 91 - DNA, 4371 bp, synthetic construct
  misc_feature 1..4371: note = Variant of human B-domain deleted Factor VIII
  source 1..4371: mol_type = other DNA
atgcagattgaactgtctacctgcttcttcctctgtttgctgaggttctgctttagcgccactagacggtactaccttggcgctgtggagctgtcctgggactatatgcagagtgatttgggagagcttcccgtcgacgcacgatttcctcctcgcgttccaaagtcatttcccttcaacacaagcatggtgtacaagaagacgctcttcgtcgaattcaccgatcacctgttcaatatcgccaaacccagaccaccatggatgggtcttttggggcctaccatacaagcggaggtgtatgacacagttgttatcactctcaagaacatggcttctcatccggtaagtcttcacgcagtgggcgtgtcctactggaaagcttcagaaggagccgagtatgatgatcagacatcccagagggagaaagaagacgacaaggtatttccaggtgggtctcatacctatgtgtggcaagtgctcaaagagaatggccctatggcaagcgatccgctctgtttgacttacagctacctttcacacgttgacctcgtcaaggacctcaactccgggttgattggagccttgttggtatgcagggaaggatctcttgccaaagagaagacacagaccctccacaagtttatccttctctttgctgtgttcgatgagggcaaaagttggcatagcgaaacgaagaattccctcatgcaggatcgcgacgcagccagcgccagagcttggcccaagatgcacactgtgaacggatatgtcaataggtcacttcctggcttgattgggtgtcatcggaaaagtgtctactggcacgtgatcggaatggggacaacaccagaggtccactccatatttctcgaaggccataccttccttgttcgaaaccacagacaggcatccttggagatctctcccattacctttctcactgcccaaacgctccttatggacttgggtcagttccttctcttctgccatatcagctcacaccagcatgatggtatggaagcttatgtgaaagtcgacagttgtcctgaggagccacagttgcgcatgaagaataatgaagaagccgaggattacgacgacgatctcaccgattctgagatggacgtggtgaggtttgatgacgacaactctccctccttcattcaaatccggagcgtggcgaagaaacaccccaagacttgggtccactatatagcggcggaagaggaggattgggattacgctcctcttgtattggcaccagatgaccgctcatacaaaagccagtacctcaacaacggaccgcagagaattggccggaagtataagaaagtgcgatttatggcctatacagacgaaacctttaagacaagggaggccatccagcatgagagtgggattttgggacctcttctttacggcgaagttggtgataccctcctcatcatcttcaagaatcaagcttctcgcccctataacatttacccacacgggatcactgacgttaggcctttgtatagcagaagacttcccaaaggcgtgaagcatctcaaagacttccccattttgccaggcgagatctttaagtacaaatggaccgtcacagtggaagatggaccgactaaatcagaccctcgatgccttacgcggtactattcctccttcgtgaatatggagagagatttggcaagcggactcataggaccactcctcatctgttacaaggaatctgtagaccagaggggtaaccagattatgagtgataaacgcaatgtgatcctttttagcgtcttcgacgagaaccggtcctggtacttgaccgagaatatacaaaggttccttcccaaccccgcaggcgttcagttggaagaccctgagtttcaggccagcaatattatgcactcaatcaacggctatgtgtttgatagtctccagctttctgtttgcctccatgaagtagcctattggtacatcttgtcaattggtgctcaaacagacttcctctccgtcttcttctccggctacacctttaagcacaagatggtgtatgaggacactctcacactctttccattttctggagaaaccgtgttcatgagcatggagaatccaggcctttggatcttgggttgccacaacagtgattttcgcaatcggggaatgactgctctcctcaaagtcagcagctgtgataagaacacaggcgactattacgaagattcttacgaggacataagtgcctacttgttgtccaagaataacgccattgagcccagatcattctcccagaatcctcccgtgcttaaaaggcatcagcgcgaaatcaccagaactactcttcagtctgatcaagaggagattgactatgacgacaccataagcgtggaaatgaagaaggaggatttcgatatctatgacgaagatgagaaccagtctccgcggagctttcagaagaagacgcgacactacttcattgcagcagtcgaaaggctttgggactacggtatgtcatcatcccctcatgtgttgcgcaatagagctcagagtggaagtgttccacagttcaagaaagtcgtctttcaagagtttacagatggcagcttcacacagcctctctatcggggcgagcttaacgaacatttgggactccttggtccctatatccgagccgaagtggaggacaacattatggttacctttaggaatcaagcctctcgcccctacagcttctactcctccctcatcagttatgaggaggatcagagacaaggcgctgaaccacggaagaactttgtgaaaccgaatgagacgaagacctacttctggaaagtacagcaccacatggcccccacaaaagacgaattcgattgcaaagcatgggcgtatttttcagacgttgacttggagaaagatgtacattcaggacttattggtcctttgttggtgtgtcacactaacactctcaatccagcccatggcaggcaggtgacagtccaggaattcgctcttttctttaccatctttgatgagaccaagtcctggtacttcacggaaaacatggagcgcaattgcagagccccctgtaacatacagatggaggaccctacctttaaggaaaattatcggttccacgcaatcaacggatacattatggatacactccctggccttgtgatggctcaggaccaacgaatcaggtggtacctcctcagcatgggttctaatgagaacatacactccattcacttttcaggacatgtgttcactgtccggaagaaagaagagtataagatggccctctacaatttgtatccaggcgtgtttgagaccgttgaaatgcttccctctaaagctggcatctggagagtagagtgcttgatcggagaacatcttcacgcaggtatgagcaccttgttcctcgtgtacagcaacaaatgtcagaccccacttggcatggccagtggacacattcgcgactttcagatcacagcatctggccagtatggacaatgggccccaaagttggctcgcctccattactccggtagcataaatgcgtggtccactaaagaacctttcagctggattaaggtcgatcttcttgcccccatgatcatccacggcattaagacacagggagcgaggcagaaattctcctccctctacatctcacagttcattattatgtatagtttggacggcaagaagtggcaaacttatagaggtaacagtactggaacactcatggtgttcttcggcaacgttgatagctctggcatcaaacacaacatctttaatcctcccataatagctcggtacatcagattgcatccgacccactacagcattaggagtacactccgaatggagcttatgggttgcgacttgaattcctgttcaatgccactcggaatggagtctaaagccatctctgatgcacagataaccgccagtagctactttacgaacatgtttgctacgtggtcaccctctaaggcaaggcttcatttgcaaggccggtctaatgcctggagacctcaggtgaacaacccgaaagaatggctccaggtggactttcagaagaccatgaaagtaacaggtgtcactactcagggagttaagtccttgctcaccagcatgtatgtgaaggagttccttatttcctcatcacaagatggccaccagtggaccctcttctttcagaatggtaaggtcaaagtgtttcagggcaatcaagacagcttcacacccgtggtgaacagtcttgatcctccactcttgacacgataccttcgaatccatccacagtcttgggttcaccagattgcattgcgcatggaagtacttggatgcgaggctcaggacctctac

SEQ ID NO: 92 - protein, 1457 aa, synthetic construct
  REGION 1..1457: note = Variant of human B-domain deleted Factor VIII
MQIELSTCFFLCLLRFCFSATRRYYLGAVELSWDYMQSDLGELPVDARFPPRVPKSFPFNTSMVYKKTLFVEFTDHLFNIAKPRPPWMGLLGPTIQAEVYDTVVITLKNMASHPVSLHAVGVSYWKASEGAEYDDQTSQREKEDDKVFPGGSHTYVWQVLKENGPMASDPLCLTYSYLSHVDLVKDLNSGLIGALLVCREGSLAKEKTQTLHKFILLFAVFDEGKSWHSETKNSLMQDRDAASARAWPKMHTVNGYVNRSLPGLIGCHRKSVYWHVIGMGTTPEVHSIFLEGHTFLVRNHRQASLEISPITFLTAQTLLMDLGQFLLFCHISSHQHDGMEAYVKVDSCPEEPQLRMKNNEEAEDYDDDLTDSEMDVVRFDDDNSPSFIQIRSVAKKHPKTWVHYIAAEEEDWDYAPLVLAPDDRSYKSQYLNNGPQRIGRKYKKVRFMAYTDETFKTREAIQHESGILGPLLYGEVGDTLLIIFKNQASRPYNIYPHGITDVRPLYSRRLPKGVKHLKDFPILPGEIFKYKWTVTVEDGPTKSDPRCLTRYYSSFVNMERDLASGLIGPLLICYKESVDQRGNQIMSDKRNVILFSVFDENRSWYLTENIQRFLPNPAGVQLEDPEFQASNIMHSINGYVFDSLQLSVCLHEVAYWYILSIGAQTDFLSVFFSGYTFKHKMVYEDTLTLFPFSGETVFMSMENPGLWILGCHNSDFRNRGMTALLKVSSCDKNTGDYYEDSYEDISAYLLSKNNAIEPRSFSQNPPVLKRHQREITRTTLQSDQEEIDYDDTISVEMKKEDFDIYDEDENQSPRSFQKKTRHYFIAAVERLWDYGMSSSPHVLRNRAQSGSVPQFKKVVFQEFTDGSFTQPLYRGELNEHLGLLGPYIRAEVEDNIMVTFRNQASRPYSFYSSLISYEEDQRQGAEPRKNFVKPNETKTYFWKVQHHMAPTKDEFDCKAWAYFSDVDLEKDVHSGLIGPLLVCHTNTLNPAHGRQVTVQEFALFFTIFDETKSWYFTENMERNCRAPCNIQMEDPTFKENYRFHAINGYIMDTLPGLVMAQDQRIRWYLLSMGSNENIHSIHFSGHVFTVRKKEEYKMALYNLYPGVFETVEMLPSKAGIWRVECLIGEHLHAGMSTLFLVYSNKCQTPLGMASGHIRDFQITASGQYGQWAPKLARLHYSGSINAWSTKEPFSWIKVDLLAPMIIHGIKTQGARQKFSSLYISQFIIMYSLDGKKWQTYRGNSTGTLMVFFGNVDSSGIKHNIFNPPIIARYIRLHPTHYSIRSTLRMELMGCDLNSCSMPLGMESKAISDAQITASSYFTNMFATWSPSKARLHLQGRSNAWRPQVNNPKEWLQVDFQKTMKVTGVTTQGVKSLLTSMYVKEFLISSSQDGHQWTLFFQNGKVKVFQGNQDSFTPVVNSLDPPLLTRYLRIHPQSWVHQIALRMEVLGCEAQDLY

SEQ ID NO: 93 - DNA, 4371 bp, synthetic construct
  misc_feature 1..4371: note = Variant of human B-domain deleted Factor VIII
  source 1..4371: mol_type = other DNA
atgcagattgaactgtctacctgcttcttcctctgtttgctgaggttctgctttagcgccactagacggtactaccttggcgctgtggagctgtcctgggactatatgcagagtgatttgggagagcttcccgtcgacgcacgatttcctcctcgcgttccaaagtcatttcccttcaacacaagcgtggtgtacaagaagacgctcttcgtcgaattcaccgatcacctgttcaatatcgccaaacccagaccaccatggatgggtcttttggggcctaccatacaagcggaggtgtatgacacagttgttatcactctcaagaacatggcttctcatccggtaagtcttcacgcagtgggcgtgtcctactggaaagcttcagaaggagccgagtatgatgatcagacatcccagagggagaaagaagacgacaaggtatttccaggtgggtctcatacctatgtgtggcaagtgctcaaagagaatggccctatggcaagcgatccgctctgtttgacttacagctacctttcacacgttgacctcgtcaaggacctcaactccgggttgattggagccttgttggtatgcagggaaggatctcttgccaaagagaagacacagaccctccacaagtttatccttctctttgctgtgttcgatgagggcaaaagttggcatagcgaaacgaagaattccctcatgcaggatcgcgacgcagccagcgccagagcttggcccaagatgcacactgtgaacggatatgtcaataggtcacttcctggcttgattgggtgtcatcggaaaagtgtctactggcacgtgatcggaatggggacaacaccagaggtccactccatatttctcgaaggccataccttccttgttcgaaaccacagacaggcatccttggagatctctcccattacctttctcactgcccaaacgctccttatggacttgggtcagttccttctcttctgccatatcagctcacaccagcatgatggtatggaagcttatgtgaaagtcgacagttgtcctgaggagccacagttgcgcctgaagaataatgaagaagccgaggattacgacgacgatctcaccgattctgagatggacgtggtgaggtttgatgacgacaactctccctccttcattcaaatccggagcgtggcgaagaaacaccccaagacttgggtccactatatagcggcggaagaggaggattgggattacgctcctcttgtattggcaccagatgaccgctcatacaaaagccagtacctcaacaacggaccgcagagaattggccggaagtataagaaagtgcgatttatggcctatacagacgaaacctttaagacaagggaggccatccagcatgagagtgggattttgggacctcttctttacggcgaagttggtgataccctcctcatcatcttcaagaatcaagcttctcgcccctataacatttacccacacgggatcactgacgttaggcctttgtatagcagaagacttcccaaaggcgtgaagcatctcaaagacttccccattttgccaggcgagatctttaagtacaaatggaccgtcacagtggaagatggaccgactaaatcagaccctcgatgccttacgcggtactattcctccttcgtgaatatggagagagatttggcaagcggactcataggaccactcctcatctgttacaaggaatctgtagaccagaggggtaaccagattatgagtgataaacgcaatgtgatcctttttagcgtcttcgacgagaaccggtcctggtacttgaccgagaatatacaaaggttccttcccaaccccgcaggcgttcagttggaagaccctgagtttcaggccagcaatattatgcactcaatcaacggctatgtgtttgatagtctccagctttctgtttgcctccatgaagtagcctattggtacatcttgtcaattggtgctcaaacagacttcctctccgtcttcttctccggctacacctttaagcacaagatggtgtatgaggacactctcacactctttccattttctggagaaaccgtgttcatgagcatggagaatccaggcctttggatcttgggttgccacaacagtgattttcgcaatcggggaatgactgctctcctcaaagtcagcagctgtgataagaacacaggcgactattacgaagattcttacgaggacataagtgcctacttgttgtccaagaataacgccattgagcccagatcattctcccagaatcctcccgtgcttaaaaggcatcagcgcgaaatcaccagaactactcttcagtctgatcaagaggagattgactatgacgacaccataagcgtggaaatgaagaaggaggatttcgatatctatgacgaagatgagaaccagtctccgcggagctttcagaagaagacgcgacactacttcattgcagcagtcgaaaggctttgggactacggtatgtcatcatcccctcatgtgttgcgcaatagagctcagagtggaagtgttccacagttcaagaaagtcgtctttcaagagtttacagatggcagcttcacacagcctctctatcggggcgagcttaacgaacatttgggactccttggtccctatatccgagccgaagtggaggacaacattatggttacctttaggaatcaagcctctcgcccctacagcttctactcctccctcatcagttatgaggaggatcagagacaaggcgctgaaccacggaagaactttgtgaaaccgaatgagacgaagacctacttctggaaagtacagcaccacatggcccccacaaaagacgaattcgattgcaaagcatgggcgtatttttcagacgttgacttggagaaagatgtacattcaggacttattggtcctttgttggtgtgtcacactaacactctcaatccagcccatggcaggcaggtgacagtccaggaattcgctcttttctttaccatctttgatgagaccaagtcctggtacttcacggaaaacatggagcgcaattgcagagccccctgtaacatacagatggaggaccctacctttaaggaaaattatcggttccacgcaatcaacggatacattatggatacactccctggccttgtgatggctcaggaccaacgaatcaggtggtacctcctcagcatgggttctaatgagaacatacactccattcacttttcaggacatgtgttcactgtccggaagaaagaagagtataagatggccctctacaatttgtatccaggcgtgtttgagaccgttgaaatgcttccctctaaagctggcatctggagagtagagtgcttgatcggagaacatcttcacgcaggtatgagcaccttgttcctcgtgtacagcaacaaatgtcagaccccacttggcatggccagtggacacattcgcgactttcagatcacagcatctggccagtatggacaatgggccccaaagttggctcgcctccattactccggtagcataaatgcgtggtccactaaagaacctttcagctggattaaggtcgatcttcttgcccccatgatcatccacggcattaagacacagggagcgaggcagaaattctcctccctctacatctcacagttcattattatgtatagtttggacggcaagaagtggcaaacttatagaggtaacagtactggaacactcatggtgttcttcggcaacgttgatagctctggcatcaaacacaacatctttaatcctcccataatagctcggtacatcagattgcatccgacccactacagcattaggagtacactccgaatggagcttatgggttgcgacttgaattcctgttcaatgccactcggaatggagtctaaagccatctctgatgcacagataaccgccagtagctactttacgaacatgtttgctacgtggtcaccctctaaggcaaggcttcatttgcaaggccggtctaatgcctggagacctcaggtgaacaacccgaaagaatggctccaggtggactttcagaagaccatgaaagtaacaggtgtcactactcagggagttaagtccttgctcaccagcatgtatgtgaaggagttccttatttcctcatcacaagatggccaccagtggaccctcttctttcagaatggtaaggtcaaagtgtttcagggcaatcaagacagcttcacacccgtggtgaacagtcttgatcctccactcttgacacgataccttcgaatccatccacagtcttgggttcaccagattgcattgcgcatggaagtacttggatgcgaggctcaggacctctac

SEQ ID NO: 94 - protein, 1457 aa, synthetic construct
  REGION 1..1457: note = Variant of human B-domain deleted Factor VIII
MQIELSTCFFLCLLRFCFSATRRYYLGAVELSWDYMQSDLGELPVDARFPPRVPKSFPFNTSVVYKKTLFVEFTDHLFNIAKPRPPWMGLLGPTIQAEVYDTVVITLKNMASHPVSLHAVGVSYWKASEGAEYDDQTSQREKEDDKVFPGGSHTYVWQVLKENGPMASDPLCLTYSYLSHVDLVKDLNSGLIGALLVCREGSLAKEKTQTLHKFILLFAVFDEGKSWHSETKNSLMQDRDAASARAWPKMHTVNGYVNRSLPGLIGCHRKSVYWHVIGMGTTPEVHSIFLEGHTFLVRNHRQASLEISPITFLTAQTLLMDLGQFLLFCHISSHQHDGMEAYVKVDSCPEEPQLRLKNNEEAEDYDDDLTDSEMDVVRFDDDNSPSFIQIRSVAKKHPKTWVHYIAAEEEDWDYAPLVLAPDDRSYKSQYLNNGPQRIGRKYKKVRFMAYTDETFKTREAIQHESGILGPLLYGEVGDTLLIIFKNQASRPYNIYPHGITDVRPLYSRRLPKGVKHLKDFPILPGEIFKYKWTVTVEDGPTKSDPRCLTRYYSSFVNMERDLASGLIGPLLICYKESVDQRGNQIMSDKRNVILFSVFDENRSWYLTENIQRFLPNPAGVQLEDPEFQASNIMHSINGYVFDSLQLSVCLHEVAYWYILSIGAQTDFLSVFFSGYTFKHKMVYEDTLTLFPFSGETVFMSMENPGLWILGCHNSDFRNRGMTALLKVSSCDKNTGDYYEDSYEDISAYLLSKNNAIEPRSFSQNPPVLKRHQREITRTTLQSDQEEIDYDDTISVEMKKEDFDIYDEDENQSPRSFQKKTRHYFIAAVERLWDYGMSSSPHVLRNRAQSGSVPQFKKVVFQEFTDGSFTQPLYRGELNEHLGLLGPYIRAEVEDNIMVTFRNQASRPYSFYSSLISYEEDQRQGAEPRKNFVKPNETKTYFWKVQHHMAPTKDEFDCKAWAYFSDVDLEKDVHSGLIGPLLVCHTNTLNPAHGRQVTVQEFALFFTIFDETKSWYFTENMERNCRAPCNIQMEDPTFKENYRFHAINGYIMDTLPGLVMAQDQRIRWYLLSMGSNENIHSIHFSGHVFTVRKKEEYKMALYNLYPGVFETVEMLPSKAGIWRVECLIGEHLHAGMSTLFLVYSNKCQTPLGMASGHIRDFQITASGQYGQWAPKLARLHYSGSINAWSTKEPFSWIKVDLLAPMIIHGIKTQGARQKFSSLYISQFIIMYSLDGKKWQTYRGNSTGTLMVFFGNVDSSGIKHNIFNPPIIARYIRLHPTHYSIRSTLRMELMGCDLNSCSMPLGMESKAISDAQITASSYFTNMFATWSPSKARLHLQGRSNAWRPQVNNPKEWLQVDFQKTMKVTGVTTQGVKSLLTSMYVKEFLISSSQDGHQWTLFFQNGKVKVFQGNQDSFTPVVNSLDPPLLTRYLRIHPQSWVHQIALRMEVLGCEAQDLY

SEQ ID NO: 95 - DNA, 4371 bp, synthetic construct
  misc_feature 1..4371: note = Variant of human B-domain deleted Factor VIII
  source 1..4371: mol_type = other DNA
atgcagattgaactgtctacctgcttcttcctctgtttgctgaggttctgctttagcgccactagacggtactaccttggcgctgtggagctgtcctgggactatatgcagagtgatttgggagagcttcccgtcgacgcacgatttcctcctcgcgttccaaagtcatttcccttcaacacaagcgtggtgtacaagaagacgctcttcgtcgaattcaccgatcacctgttcaatatcgccaaacccagaccaccatggatgggtcttttggggcctaccatacaagcggaggtgtatgacacagttgttatcactctcaagaacatggcttctcatccggtaagtcttcacgcagtgggcgtgtcctactggaaagcttcagaaggagccgagtatgatgatcagacatcccagagggagaaagaagacgacaaggtatttccaggtgggtctcatacctatgtgtggcaagtgctcaaagagaatggccctatggcaagcgatccgctctgtttgacttacagctacctttcacacgttgacctcgtcaaggacctcaactccgggttgattggagccttgttggtatgcagggaaggatctcttgccaaagagaagacacagaccctccacaagtttatccttctctttgctgtgttcgatgagggcaaaagttggcatagcgaaacgaagaattccctcatgcaggatcgcgacgcagccagcgccagagcttggcccaagatgcacactgtgaacggatatgtcaataggtcacttcctggcttgattgggtgtcatcggaaaagtgtctactggcacgtgatcggaatggggacaacaccagaggtccactccatatttctcgaaggccataccttccttgttcgaaaccacagacaggcatccttggagatctctcccattacctttctcactgcccaaacgctccttatggacttgggtcagttccttctcttctgccatatcagctcacaccagcatgatggtatggaagcttatgtgaaagtcgacagttgtcctgaggagccacagttgcgcatgaagaataatgaagaagccgaggattacgacgacgatctcaccgattctgagatggacgtggtgaggtttgatgacgacaactctccctccttcattcaaatccggagcgtggcgaagaaacaccccaagacttgggtccactatatagcggcggaagaggaggattgggattacgctcctcttgtattggcaccagatgaccgctcatacaaaagccagtacctcaacaacggaccgcagagaattggccggaagtataagaaagtgcgatttatggcctatacagacgaaacctttaagacaagggaggccatccagcatgagagtgggattttgggacctcttctttacggcgaagttggtgataccctcctcatcatcttcaagaatcaagcttctcgcccctataacatttacccacacgggatcactgacgttaggcctttgtatagcagaagacttcccaaaggcgtgaagcatctcaaagacttccccattttgccaggcgagatctttaagtacaaatggaccgtcacagtggaagatggaccgactaaatcagaccctcgatgccttacgcggtactattcctccttcgtgaatatggagagagatttggcaagcggactcataggaccactcctcatctgttacaaggaatctgtagaccagaggggtaaccagattatgagtgataaacgcaatgtgatcctttttagcgtcttcgacgagaaccggtcctggtacttgaccgagaatatacaaaggttccttcccaaccccgcaggcgttcagttggaagaccctgagtttcaggccagcaatattatgcactcaatcaacggctatgtgtttgatagtctccagctttctgtttgcctccatgaagtagcctattggtacatcttgtcaattggtgctcaaacagacttcctctccgtcttcttctccggctacacctttaagcacaagatggtgtatgaggacactctcacactctttccattttctggagaaaccgtgttcatgagcatggagaatccaggcctttggatcttgggttgccacaacagtgattttcgcaatcggggaatgactgctctcctcaaagtcagcagctgtgataagaacacaggcgactattacgaagattcttacgaggacataagtgcctacttgttgtccaagaataacgccattgagcccagatcattctcccagaatcctcccgtgcttaaaaggcatcagcgcgaaatcaccagaactactcttcagtctgatcaagaggagattgactatgacgacaccataagcgtggaaatgaagaaggaggatttcgatatctatgacgaagatgagaaccagtctccgcggagctttcagaagaagacgcgacactacttcattgcagcagtcgaaaggctttgggactacggtatgtcatcatcccctcatgtgttgcgcaatagagctcagagtggaagtgttccacagttcaagaaagtcgtctttcaagagtttacagatggcagcttcacacagcctctctatcggggcgagcttaacgaacatttgggactccttggtccctatatccgagccgaagtggaggacaacattatggttacctttaggaatcaagcctctcgcccctacagcttctactcctccctcatcagttatgaggaggatcagagacaaggcgctgaaccacggaagaactttgtgaaaccgaatgagacgaagacctacttctggaaagtacagcaccacatggcccccacaaaagacgaattcgattgcaaagcatgggcgtatttttcagacgttgacttggagaaagatgtacattcaggacttattggtcctttgttggtgtgtcacactaacactctcaatccagcccatggcaggcaggtgacagtccaggaattcgctcttttctttaccatctttgatgagaccaagtcctggtacttcacggaaaacatggagcgcaattgcagagccccctgtaacatacagatggaggaccctacctttaaggaaaattatcggttccacgcaatcaacggatacattatggatacactccctggccttgtgatggctcaggaccaacgaatcaggtggtacctcctcagcatgggttctaatgagaacatacactccattcacttttcaggacatgtgttcactgtccggaagaaagaagagtataagatggccctctacaatttgtatccaggcgtgtttgagaccgttgaaatgcttccctctaaagctggcatctggagagtagagtgcttgatcggagaacatcttcacgcaggtatgagcaccttgttcctcgtgtacagcaacaaatgtcagaccccacttggcatggccagtggacacattcgcgactttcagatcacagcatctggccagtatggacaatgggccccaaagttggctcgcctccattactccggtagcataaatgcgtggtccactaaagaacctttcagctggattaaggtcgatcttcttgcccccatgatcatccacggcattaagacacagggagcgaggcagaaattctcctccctctacatctcacagttcattattatgtatagtttggacggcaagaagtggcaaacttatagaggtaacagtactggaacaggtatggtgttcttcggcaacgttgatagctctggcatcaaacacaacatctttaatcctcccataatagctcggtacatcagattgcatccgacccactacagcattaggagtacactccgaatggagcttatgggttgcgacttgaattcctgttcaatgccactcggaatggagtctaaagccatctctgatgcacagataaccgccagtagctactttacgaacatgtttgctacgtggtcaccctctaaggcaaggcttcatttgcaaggccggtctaatgcctggagacctcaggtgaacaacccgaaagaatggctccaggtggactttcagaagaccatgaaagtaacaggtgtcactactcagggagttaagtccttgctcaccagcatgtatgtgaaggagttccttatttcctcatcacaagatggccaccagtggaccctcttctttcagaatggtaaggtcaaagtgtttcagggcaatcaagacagcttcacacccgtggtgaacagtcttgatcctccactcttgacacgataccttcgaatccatccacagtcttgggttcaccagattgcattgcgcatggaagtacttggatgcgaggctcaggacctctac

SEQ ID NO: 96 - protein, 1457 aa, synthetic construct
  REGION 1..1457: note = Variant of human B-domain deleted Factor VIII
MQIELSTCFFLCLLRFCFSATRRYYLGAVELSWDYMQSDLGELPVDARFPPRVPKSFPFNTSVVYKKTLFVEFTDHLFNIAKPRPPWMGLLGPTIQAEVYDTVVITLKNMASHPVSLHAVGVSYWKASEGAEYDDQTSQREKEDDKVFPGGSHTYVWQVLKENGPMASDPLCLTYSYLSHVDLVKDLNSGLIGALLVCREGSLAKEKTQTLHKFILLFAVFDEGKSWHSETKNSLMQDRDAASARAWPKMHTVNGYVNRSLPGLIGCHRKSVYWHVIGMGTTPEVHSIFLEGHTFLVRNHRQASLEISPITFLTAQTLLMDLGQFLLFCHISSHQHDGMEAYVKVDSCPEEPQLRMKNNEEAEDYDDDLTDSEMDVVRFDDDNSPSFIQIRSVAKKHPKTWVHYIAAEEEDWDYAPLVLAPDDRSYKSQYLNNGPQRIGRKYKKVRFMAYTDETFKTREAIQHESGILGPLLYGEVGDTLLIIFKNQASRPYNIYPHGITDVRPLYSRRLPKGVKHLKDFPILPGEIFKYKWTVTVEDGPTKSDPRCLTRYYSSFVNMERDLASGLIGPLLICYKESVDQRGNQIMSDKRNVILFSVFDENRSWYLTENIQRFLPNPAGVQLEDPEFQASNIMHSINGYVFDSLQLSVCLHEVAYWYILSIGAQTDFLSVFFSGYTFKHKMVYEDTLTLFPFSGETVFMSMENPGLWILGCHNSDFRNRGMTALLKVSSCDKNTGDYYEDSYEDISAYLLSKNNAIEPRSFSQNPPVLKRHQREITRTTLQSDQEEIDYDDTISVEMKKEDFDIYDEDENQSPRSFQKKTRHYFIAAVERLWDYGMSSSPHVLRNRAQSGSVPQFKKVVFQEFTDGSFTQPLYRGELNEHLGLLGPYIRAEVEDNIMVTFRNQASRPYSFYSSLISYEEDQRQGAEPRKNFVKPNETKTYFWKVQHHMAPTKDEFDCKAWAYFSDVDLEKDVHSGLIGPLLVCHTNTLNPAHGRQVTVQEFALFFTIFDETKSWYFTENMERNCRAPCNIQMEDPTFKENYRFHAINGYIMDTLPGLVMAQDQRIRWYLLSMGSNENIHSIHFSGHVFTVRKKEEYKMALYNLYPGVFETVEMLPSKAGIWRVECLIGEHLHAGMSTLFLVYSNKCQTPLGMASGHIRDFQITASGQYGQWAPKLARLHYSGSINAWSTKEPFSWIKVDLLAPMIIHGIKTQGARQKFSSLYISQFIIMYSLDGKKWQTYRGNSTGTGMVFFGNVDSSGIKHNIFNPPIIARYIRLHPTHYSIRSTLRMELMGCDLNSCSMPLGMESKAISDAQITASSYFTNMFATWSPSKARLHLQGRSNAWRPQVNNPKEWLQVDFQKTMKVTGVTTQGVKSLLTSMYVKEFLISSSQDGHQWTLFFQNGKVKVFQGNQDSFTPVVNSLDPPLLTRYLRIHPQSWVHQIALRMEVLGCEAQDLY

SEQ ID NO: 97 - DNA, 4371 bp, synthetic construct
  misc_feature 1..4371: note = Variant of human B-domain deleted Factor VIII
  source 1..4371: mol_type = other DNA
atgcagattgaactgtctacctgcttcttcctctgtttgctgaggttctgctttagcgccactagacggtactaccttggcgctgtggagctgtcctgggactatatgcagagtgatttgggagagcttcccgtcgacgcacgatttcctcctcgcgttccaaagtcatttcccttcaacacaagcgtggtgtacaagaagacgctcttcgtcgaattcaccgatcacctgttcaatatcgccaaacccagaccaccatggatgggtcttttggggcctaccatacaagcggaggtgtatgacacagttgttatcactctcaagaacatggcttctcatccggtaagtcttcacgcagtgggcgtgtcctactggaaagcttcagaaggagccgagtatgatgatcagacatcccagagggagaaagaagacgacaaggtatttccaggtgggtctcatacctatgtgtggcaagtgctcaaagagaatggccctatggcaagcgatccgctctgtttgacttacagctacctttcacacgttgacctcgtcaaggacctcaactccgggttgattggagccttgttggtatgcagggaaggatctcttgccaaagagaagacacagaccctccacaagtttatccttctctttgctgtgttcgatgagggcaaaagttggcatagcgaaacgaagaattccctcatgcaggatcgcgacgcagccagcgccagagcttggcccaagatgcacactgtgaacggatatgtcaataggtcacttcctggcttgattgggtgtcatcggaaaagtgtctactggcacgtgatcggaatggggacaacaccagaggtccactccatatttctcgaaggccataccttccttgttcgaaaccacagacaggcatccttggagatctctcccattacctttctcactgcccaaacgctccttatggacttgggtcagttccttctcttctgccatatcagctcacaccagcatgatggtatggaagcttatgtgaaagtcgacagttgtcctgaggagccacagttgcgcatgaagaataatgaagaagccgaggattacgacgacgatctcaccgattctgagatggacgtggtgaggtttgatgacgacaactctccctccttcattcaaatccggagcgtggcgaagaaacaccccaagacttgggtccactatatagcggcggaagaggaggattgggattacgctcctcttgtattggcaccagatgaccgctcatacaaaagccagtacctcaacaacggaccgcagagaattggccggaagtataagaaagtgcgatttatggcctatacagacgaaacctttaagacaagggaggccatccagcatgagagtgggattttgggacctcttctttacggcgaagttggtgataccctcctcatcatcttcaagaatcaagcttctcgcccctataacatttacccacacgggatcactgacgttaggcctttgtatagcagaagacttcccaaaggcgtgaagcatctcaaagacttccccattttgccaggcgagatctttaagtacaaatggaccgtcacagtggaagatggaccgactaaatcagaccctcgatgccttacgcggtactattcctccttcgtgaatatggagagagatttggcaagcggactcataggaccactcctcatctgttacaaggaatctgtagaccagaggggtaaccagattatgagtgataaacgcaatgtgatcctttttagcgtcttcgacgagaaccggtcctggtacttgaccgagaatatacaaaggttccttcccaaccccgcaggcgttcagttggaagaccctgagtttcaggccagcaatattatgcactcaatcaacggctatgtgtttgatagtctccagctttctgtttgcctccatgaagtagcctattggtacatcttgtcaattggtgctcaaacagacttcctctccgtcttcttctccggctacacctttaagcacaagatggtgtatgaggacactctcacactctttccattttctggagaaaccgtgttcatgagcatggagaatccaggcctttggatcttgggttgccacaacagtgattttcgcaatcggggaatgactgctctcctcaaagtcagcagctgtgataagaacacaggcgactattacgaagattcttacgaggacataagtgcctacttgttgtccaagaataacgccattgagcccagatcattctcccagaatcctcccgtgcttaaaaggcatcagcgcgaaatcaccagaactactcttcagtctgatcaagaggagattgactatgacgacaccataagcgtggaaatgaagaaggaggatttcgatatctatgacgaagatgagaaccagtctccgcggagctttcagaagaagacgcgacactacttcattgcagcagtcgaaaggctttgggactacggtatgtcatcatcccctcatgtgttgcgcaatagagctcagagtggaagtgttccacagttcaagaaagtcgtctttcaagagtttacagatggcagcttcacacagcctctctatcggggcgagcttaacgaacatttgggactccttggtccctatatccgagccgaagtggaggacaacattatggttacctttaggaatcaagcctctcgcccctacagcttctactcctccctcatcagttatgaggaggatcagagacaaggcgctgaaccacggaagaactttgtgaaaccgaatgagacgaagacctacttctggaaagtacagcaccacatggcccccacaaaagacgaattcgattgcaaagcatgggcgtatttttcagacgttgacttggagaaagatgtacattcaggacttattggtcctttgttggtgtgtcacactaacactctcaatccagcccatggcaggcaggtgacagtccaggaattcgctcttttctttaccatctttgatgagaccaagtcctggtacttcacggaaaacatggagcgcaattgcagagccccctgtaacatacagatggaggaccctacctttaaggaaaattatcggttccacgcaatcaacggatacattatggatacactccctggccttgtgatggctcaggaccaacgaatcaggtggtacctcctcagcatgggttctaatgagaacatacactccattcacttttcaggacatgtgttcactgtccggaagaaagaagagtataagatggccctctacaatttgtatccaggcgtgtttgagaccgttgaaatgcttccctctaaagctggcatctggagagtagagtgcttgatcggagaacatcttcacgcaggtatgagcaccttgttcctcgtgtacagcaacaaatgtcagaccccacttggcatggccagtggacacattcgcgactttcagatcacagcatctggccagtatggacaatgggccccaaagttggctcgcctccattactccggtagcataaatgcgtggtccactaaagaacctttcagctggattaaggtcgatcttcttgcccccatgatcatccacggcattaagacacagggagcgaggcagaaattctcctccctctacatctcacagttcattattatgtatagtttggacggcaagaagtggcaaacttatagaggtaacagtactggaacacctatggtgttcttcggcaacgttgatagctctggcatcaaacacaacatctttaatcctcccataatagctcggtacatcagattgcatccgacccactacagcattaggagtacactccgaatggagcttatgggttgcgacttgaattcctgttcaatgccactcggaatggagtctaaagccatctctgatgcacagataaccgccagtagctactttacgaacatgtttgctacgtggtcaccctctaaggcaaggcttcatttgcaaggccggtctaatgcctggagacctcaggtgaacaacccgaaagaatggctccaggtggactttcagaagaccatgaaagtaacaggtgtcactactcagggagttaagtccttgctcaccagcatgtatgtgaaggagttccttatttcctcatcacaagatggccaccagtggaccctcttctttcagaatggtaaggtcaaagtgtttcagggcaatcaagacagcttcacacccgtggtgaacagtcttgatcctccactcttgacacgataccttcgaatccatccacagtcttgggttcaccagattgcattgcgcatggaagtacttggatgcgaggctcaggacctctac

SEQ ID NO: 98 - protein, 1457 aa, synthetic construct
  REGION 1..1457: note = Variant of human B-domain deleted Factor VIII
MQIELSTCFFLCLLRFCFSATRRYYLGAVELSWDYMQSDLGELPVDARFPPRVPKSFPFNTSVVYKKTLFVEFTDHLFNIAKPRPPWMGLLGPTIQAEVYDTVVITLKNMASHPVSLHAVGVSYWKASEGAEYDDQTSQREKEDDKVFPGGSHTYVWQVLKENGPMASDPLCLTYSYLSHVDLVKDLNSGLIGALLVCREGSLAKEKTQTLHKFILLFAVFDEGKSWHSETKNSLMQDRDAASARAWPKMHTVNGYVNRSLPGLIGCHRKSVYWHVIGMGTTPEVHSIFLEGHTFLVRNHRQASLEISPITFLTAQTLLMDLGQFLLFCHISSHQHDGMEAYVKVDSCPEEPQLRMKNNEEAEDYDDDLTDSEMDVVRFDDDNSPSFIQIRSVAKKHPKTWVHYIAAEEEDWDYAPLVLAPDDRSYKSQYLNNGPQRIGRKYKKVRFMAYTDETFKTREAIQHESGILGPLLYGEVGDTLLIIFKNQASRPYNIYPHGITDVRPLYSRRLPKGVKHLKDFPILPGEIFKYKWTVTVEDGPTKSDPRCLTRYYSSFVNMERDLASGLIGPLLICYKESVDQRGNQIMSDKRNVILFSVFDENRSWYLTENIQRFLPNPAGVQLEDPEFQASNIMHSINGYVFDSLQLSVCLHEVAYWYILSIGAQTDFLSVFFSGYTFKHKMVYEDTLTLFPFSGETVFMSMENPGLWILGCHNSDFRNRGMTALLKVSSCDKNTGDYYEDSYEDISAYLLSKNNAIEPRSFSQNPPVLKRHQREITRTTLQSDQEEIDYDDTISVEMKKEDFDIYDEDENQSPRSFQKKTRHYFIAAVERLWDYGMSSSPHVLRNRAQSGSVPQFKKVVFQEFTDGSFTQPLYRGELNEHLGLLGPYIRAEVEDNIMVTFRNQASRPYSFYSSLISYEEDQRQGAEPRKNFVKPNETKTYFWKVQHHMAPTKDEFDCKAWAYFSDVDLEKDVHSGLIGPLLVCHTNTLNPAHGRQVTVQEFALFFTIFDETKSWYFTENMERNCRAPCNIQMEDPTFKENYRFHAINGYIMDTLPGLVMAQDQRIRWYLLSMGSNENIHSIHFSGHVFTVRKKEEYKMALYNLYPGVFETVEMLPSKAGIWRVECLIGEHLHAGMSTLFLVYSNKCQTPLGMASGHIRDFQITASGQYGQWAPKLARLHYSGSINAWSTKEPFSWIKVDLLAPMIIHGIKTQGARQKFSSLYISQFIIMYSLDGKKWQTYRGNSTGTPMVFFGNVDSSGIKHNIFNPPIIARYIRLHPTHYSIRSTLRMELMGCDLNSCSMPLGMESKAISDAQITASSYFTNMFATWSPSKARLHLQGRSNAWRPQVNNPKEWLQVDFQKTMKVTGVTTQGVKSLLTSMYVKEFLISSSQDGHQWTLFFQNGKVKVFQGNQDSFTPVVNSLDPPLLTRYLRIHPQSWVHQIALRMEVLGCEAQDLY

SEQ ID NO: 99 - DNA, 4371 bp, synthetic construct
  misc_feature 1..4371: note = Variant of human B-domain deleted Factor VIII
  source 1..4371: mol_type = other DNA
atgcagattgaactgtctacctgcttcttcctctgtttgctgaggttctgctttagcgccactagacggtactaccttggcgctgtggagctgtcctgggactatatgcagagtgatttgggagagcttcccgtcgacgcacgatttcctcctcgcgttccaaagtcatttcccttcaacacaagcgtggtgtacaagaagacgctcttcgtcgaattcaccgatcacctgttcaatatcgccaaacccagaccaccatggatgggtcttttggggcctaccatacaagcggaggtgtatgacacagttgttatcactctcaagaacatggcttctcatccggtaagtcttcacgcagtgggcgtgtcctactggaaagcttcagaaggagccgagtatgatgatcagacatcccagagggagaaagaagacgacaaggtatttccaggtgggtctcatacctatgtgtggcaagtgctcaaagagaatggccctatggcaagcgatccgctctgtttgacttacagctacctttcacacgttgacctcgtcaaggacctcaactccgggttgattggagccttgttggtatgcagggaaggatctcttgccaaagagaagacacagaccctccacaagtttatccttctctttgctgtgttcgatgagggcaaaagttggcatagcgaaacgaagaattccctcatgcaggatcgcgacgcagccagcgccagagcttggcccaagatgcacactgtgaacggatatgtcaataggtcacttcctggcttgattgggtgtcatcggaaaagtgtctactggcacgtgatcggaatggggacaacaccagaggtccactccatatttctcgaaggccataccttccttgttcgaaaccacagacaggcatccttggagatctctcccattacctttctcactgcccaaacgctccttatggacttgggtcagttccttctcttctgccatatcagctcacaccagcatgatggtatggaagcttatgtgaaagtcgacagttgtcctgaggagccacagttgcgcatgaagaataatgaagaagccgaggattacgacgacgatctcaccgattctgagatggacgtggtgaggtttgatgacgacaactctccctccttcattcaaatccggagcgtggcgaagaaacaccccaagacttgggtccactatatagcggcggaagaggaggattgggattacgctcctcttgtattggcaccagatgaccgctcatacaaaagccagtacctcaacaacggaccgggtagaattggccggaagtataagaaagtgcgatttatggcctatacagacgaaacctttaagacaagggaggccatccagcatgagagtgggattttgggacctcttctttacggcgaagttggtgataccctcctcatcatcttcaagaatcaagcttctcgcccctataacatttacccacacgggatcactgacgttaggcctttgtatagcagaagacttcccaaaggcgtgaagcatctcaaagacttccccattttgccaggcgagatctttaagtacaaatggaccgtcacagtggaagatggaccgactaaatcagaccctcgatgccttacgcggtactattcctccttcgtgaatatggagagagatttggcaagcggactcataggaccactcctcatctgttacaaggaatctgtagaccagaggggtaaccagattatgagtgataaacgcaatgtgatcctttttagcgtcttcgacgagaaccggtcctggtacttgaccgagaatatacaaaggttccttcccaaccccgcaggcgttcagttggaagaccctgagtttcaggccagcaatattatgcactcaatcaacggctatgtgtttgatagtctccagctttctgtttgcctccatgaagtagcctattggtacatcttgtcaattggtgctcaaacagacttcctctccgtcttcttctccggctacacctttaagcacaagatggtgtatgaggacactctcacactctttccattttctggagaaaccgtgttcatgagcatggagaatccaggcctttggatcttgggttgccacaacagtgattttcgcaatcggggaatgactgctctcctcaaagtcagcagctgtgataagaacacaggcgactattacgaagattcttacgaggacataagtgcctacttgttgtccaagaataacgccattgagcccagatcattctcccagaatcctcccgtgcttaaaaggcatcagcgcgaaatcaccagaactactcttcagtctgatcaagaggagattgactatgacgacaccataagcgtggaaatgaagaaggaggatttcgatatctatgacgaagatgagaaccagtctccgcggagctttcagaagaagacgcgacactacttcattgcagcagtcgaaaggctttgggactacggtatgtcatcatcccctcatgtgttgcgcaatagagctcagagtggaagtgttccacagttcaagaaagtcgtctttcaagagtttacagatggcagcttcacacagcctctctatcggggcgagcttaacgaacatttgggactccttggtccctatatccgagccgaagtggaggacaacattatggttacctttaggaatcaagcctctcgcccctacagcttctactcctccctcatcagttatgaggaggatcagagacaaggcgctgaaccacggaagaactttgtgaaaccgaatgagacgaagacctacttctggaaagtacagcaccacatggcccccacaaaagacgaattcgattgcaaagcatgggcgtatttttcagacgttgacttggagaaagatgtacattcaggacttattggtcctttgttggtgtgtcacactaacactctcaatccagcccatggcaggcaggtgacagtccaggaattcgctcttttctttaccatctttgatgagaccaagtcctggtacttcacggaaaacatggagcgcaattgcagagccccctgtaacatacagatggaggaccctacctttaaggaaaattatcggttccacgcaatcaacggatacattatggatacactccctggccttgtgatggctcaggaccaacgaatcaggtggtacctcctcagcatgggttctaatgagaacatacactccattcacttttcaggacatgtgttcactgtccggaagaaagaagagtataagatggccctctacaatttgtatccaggcgtgtttgagaccgttgaaatgcttccctctaaagctggcatctggagagtagagtgcttgatcggagaacatcttcacgcaggtatgagcaccttgttcctcgtgtacagcaacaaatgtcagaccccacttggcatggccagtggacacattcgcgactttcagatcacagcatctggccagtatggacaatgggccccaaagttggctcgcctccattactccggtagcataaatgcgtggtccactaaagaacctttcagctggattaaggtcgatcttcttgcccccatgatcatccacggcattaagacacagggagcgaggcagaaattctcctccctctacatctcacagttcattattatgtatagtttggacggcaagaagtggcaaacttatagaggtaacagtactggaacactcatggtgttcttcggcaacgttgatagctctggcatcaaacacaacatctttaatcctcccataatagctcggtacatcagattgcatccgacccactacagcattaggagtacactccgaatggagcttatgggttgcgacttgaattcctgttcaatgccactcggaatggagtctaaagccatctctgatgcacagataaccgccagtagctactttacgaacatgtttgctacgtggtcaccctctaaggcaaggcttcatttgcaaggccggtctaatgcctggagacctcaggtgaacaacccgaaagaatggctccaggtggactttcagaagaccatgaaagtaacaggtgtcactactcagggagttaagtccttgctcaccagcatgtatgtgaaggagttccttatttcctcatcacaagatggccaccagtggaccctcttctttcagaatggtaaggtcaaagtgtttcagggcaatcaagacagcttcacacccgtggtgaacagtcttgatcctccactcttgacacgataccttcgaatccatccacagtcttgggttcaccagattgcattgcgcatggaagtacttggatgcgaggctcaggacctctac

SEQ ID NO: 100 - protein, 1457 aa, synthetic construct
  REGION 1..1457: note = Variant of human B-domain deleted Factor VIII
MQIELSTCFFLCLLRFCFSATRRYYLGAVELSWDYMQSDLGELPVDARFPPRVPKSFPFNTSVVYKKTLFVEFTDHLFNIAKPRPPWMGLLGPTIQAEVYDTVVITLKNMASHPVSLHAVGVSYWKASEGAEYDDQTSQREKEDDKVFPGGSHTYVWQVLKENGPMASDPLCLTYSYLSHVDLVKDLNSGLIGALLVCREGSLAKEKTQTLHKFILLFAVFDEGKSWHSETKNSLMQDRDAASARAWPKMHTVNGYVNRSLPGLIGCHRKSVYWHVIGMGTTPEVHSIFLEGHTFLVRNHRQASLEISPITFLTAQTLLMDLGQFLLFCHISSHQHDGMEAYVKVDSCPEEPQLRMKNNEEAEDYDDDLTDSEMDVVRFDDDNSPSFIQIRSVAKKHPKTWVHYIAAEEEDWDYAPLVLAPDDRSYKSQYLNNGPGRIGRKYKKVRFMAYTDETFKTREAIQHESGILGPLLYGEVGDTLLIIFKNQASRPYNIYPHGITDVRPLYSRRLPKGVKHLKDFPILPGEIFKYKWTVTVEDGPTKSDPRCLTRYYSSFVNMERDLASGLIGPLLICYKESVDQRGNQIMSDKRNVILFSVFDENRSWYLTENIQRFLPNPAGVQLEDPEFQASNIMHSINGYVFDSLQLSVCLHEVAYWYILSIGAQTDFLSVFFSGYTFKHKMVYEDTLTLFPFSGETVFMSMENPGLWILGCHNSDFRNRGMTALLKVSSCDKNTGDYYEDSYEDISAYLLSKNNAIEPRSFSQNPPVLKRHQREITRTTLQSDQEEIDYDDTISVEMKKEDFDIYDEDENQSPRSFQKKTRHYFIAAVERLWDYGMSSSPHVLRNRAQSGSVPQFKKVVFQEFTDGSFTQPLYRGELNEHLGLLGPYIRAEVEDNIMVTFRNQASRPYSFYSSLISYEEDQRQGAEPRKNFVKPNETKTYFWKVQHHMAPTKDEFDCKAWAYFSDVDLEKDVHSGLIGPLLVCHTNTLNPAHGRQVTVQEFALFFTIFDETKSWYFTENMERNCRAPCNIQMEDPTFKENYRFHAINGYIMDTLPGLVMAQDQRIRWYLLSMGSNENIHSIHFSGHVFTVRKKEEYKMALYNLYPGVFETVEMLPSKAGIWRVECLIGEHLHAGMSTLFLVYSNKCQTPLGMASGHIRDFQITASGQYGQWAPKLARLHYSGSINAWSTKEPFSWIKVDLLAPMIIHGIKTQGARQKFSSLYISQFIIMYSLDGKKWQTYRGNSTGTLMVFFGNVDSSGIKHNIFNPPIIARYIRLHPTHYSIRSTLRMELMGCDLNSCSMPLGMESKAISDAQITASSYFTNMFATWSPSKARLHLQGRSNAWRPQVNNPKEWLQVDFQKTMKVTGVTTQGVKSLLTSMYVKEFLISSSQDGHQWTLFFQNGKVKVFQGNQDSFTPVVNSLDPPLLTRYLRIHPQSWVHQIALRMEVLGCEAQDLY

SEQ ID NO: 101 - DNA, 4371 bp, synthetic construct
  misc_feature 1..4371: note = Variant of human B-domain deleted Factor VIII
  source 1..4371: mol_type = other DNA
atgcagattgaactgtctacctgcttcttcctctgtttgctgaggttctgctttagcgccactagacggtactaccttggcgctgtggagctgtcctgggactatatgcagagtgatttgggagagcttcccgtcgacgcacgatttcctcctcgcgttccaaagtcagcgcccttcaacacaagcgtggtgtacaagaagacgctcttcgtcgaattcaccgatcacctgttcaatatcgccaaacccagaccaccatggatgggtcttttggggcctaccatacaagcggaggtgtatgacacagttgttatcactctcaagaacatggcttctcatccggtaagtcttcacgcagtgggcgtgtcctactggaaagcttcagaaggagccgagtatgatgatcagacatcccagagggagaaagaagacgacaaggtatttccaggtgggtctcatacctatgtgtggcaagtgctcaaagagaatggccctatggcaagcgatccgctctgtttgacttacagctacctttcacacgttgacctcgtcaaggacctcaactccgggttgattggagccttgttggtatgcagggaaggatctcttgccaaagagaagacacagaccctccacaagtttatccttctctttgctgtgttcgatgagggcaaaagttggcatagcgaaacgaagaattccctcatgcaggatcgcgacgcagccagcgccagagcttggcccaagatgcacactgtgaacggatatgtcaataggtcacttcctggcttgattgggtgtcatcggaaaagtgtctactggcacgtgatcggaatggggacaacaccagaggtccactccatatttctcgaaggccataccttccttgttcgaaaccacagacaggcatccttggagatctctcccattacctttctcactgcccaaacgctccttatggacttgggtcagttccttctcttctgccatatcagctcacaccagcatgatggtatggaagcttatgtgaaagtcgacagttgtcctgaggagccacagttgcgcatgaagaataatgaagaagccgaggattacgacgacgatctcaccgattctgagatggacgtggtgaggtttgatgacgacaactctccctccttcattcaaatccggagcgtggcgaagaaacaccccaagacttgggtccactatatagcggcggaagaggaggattgggattacgctcctcttgtattggcaccagatgaccgctcatacaaaagccagtacctcaacaacggaccgcagagaattggccggaagtataagaaagtgcgatttatggcctatacagacgaaacctttaagacaagggaggccatccagcatgagagtgggattttgggacctcttctttacggcgaagttggtgataccctcctcatcatcttcaagaatcaagcttctcgcccctataacatttacccacacgggatcactgacgttaggcctttgtatagcagaagacttcccaaaggcgtgaagcatctcaaagacttccccattttgccaggcgagatctttaagtacaaatggaccgtcacagtggaagatggaccgactaaatcagaccctcgatgccttacgcggtactattcctccttcgtgaatatggagagagatttggcaagcggactcataggaccactcctcatctgttacaaggaatctgtagaccagaggggtaaccagattatgagtgataaacgcaatgtgatcctttttagcgtcttcgacgagaaccggtcctggtacttgaccgagaatatacaaaggttccttcccaaccccgcaggcgttcagttggaagaccctgagtttcaggccagcaatattatgcactcaatcaacggctatgtgtttgatagtctccagctttctgtttgcctccatgaagtagcctattggtacatcttgtcaattggtgctcaaacagacttcctctccgtcttcttctccggctacacctttaagcacaagatggtgtatgaggacactctcacactctttccattttctggagaaaccgtgttcatgagcatggagaatccaggcctttggatcttgggttgccacaacagtgattttcgcaatcggggaatgactgctctcctcaaagtcagcagctgtgataagaacacaggcgactattacgaagattcttacgaggacataagtgcctacttgttgtccaagaataacgccattgagcccagatcattctcccagaatcctcccgtgcttaaaaggcatcagcgcgaaatcaccagaactactcttcagtctgatcaagaggagattgactatgacgacaccataagcgtggaaatgaagaaggaggatttcgatatctatgacgaagatgagaaccagtctccgcggagctttcagaagaagacgcgacactacttcattgcagcagtcgaaaggctttgggactacggtatgtcatcatcccctcatgtgttgcgcaatagagctcagagtggaagtgttccacagttcaagaaagtcgtctttcaagagtttacagatggcagcttcacacagcctctctatcggggcgagcttaacgaacatttgggactccttggtccctatatccgagccgaagtggaggacaacattatggttacctttaggaatcaagcctctcgcccctacagcttctactcctccctcatcagttatgaggaggatcagagacaaggcgctgaaccacggaagaactttgtgaaaccgaatgagacgaagacctacttctggaaagtacagcaccacatggcccccacaaaagacgaattcgattgcaaagcatgggcgtatttttcagacgttgacttggagaaagatgtacattcaggacttattggtcctttgttggtgtgtcacactaacactctcaatccagcccatggcaggcaggtgacagtccaggaattcgctcttttctttaccatctttgatgagaccaagtcctggtacttcacggaaaacatggagcgcaattgcagagccccctgtaacatacagatggaggaccctacctttaaggaaaattatcggttccacgcaatcaacggatacattatggatacactccctggccttgtgatggctcaggaccaacgaatcaggtggtacctcctcagcatgggttctaatgagaacatacactccattcacttttcaggacatgtgttcactgtccggaagaaagaagagtataagatggccctctacaatttgtatccaggcgtgtttgagaccgttgaaatgcttccctctaaagctggcatctggagagtagagtgcttgatcggagaacatcttcacgcaggtatgagcaccttgttcctcgtgtacagcaacaaatgtcagaccccacttggcatggccagtggacacattcgcgactttcagatcacagcatctggccagtatggacaatgggccccaaagttggctcgcctccattactccggtagcataaatgcgtggtccactaaagaacctttcagctggattaaggtcgatcttcttgcccccatgatcatccacggcattaagacacagggagcgaggcagaaattctcctccctctacatctcacagttcattattatgtatagtttggacggcaagaagtggcaaacttatagaggtaacagtactggaacactcatggtgttcttcggcaacgttgatagctctggcatcaaacacaacatctttaatcctcccataatagctcggtacatcagattgcatccgacccactacagcattaggagtacactccgaatggagcttatgggttgcgacttgaattcctgttcaatgccactcggaatggagtctaaagccatctctgatgcacagataaccgccagtagctactttacgaacatgtttgctacgtggtcaccctctaaggcaaggcttcatttgcaaggccggtctaatgcctggagacctcaggtgaacaacccgaaagaatggctccaggtggactttcagaagaccatgaaagtaacaggtgtcactactcagggagttaagtccttgctcaccagcatgtatgtgaaggagttccttatttcctcatcacaagatggccaccagtggaccctcttctttcagaatggtaaggtcaaagtgtttcagggcaatcaagacagcttcacacccgtggtgaacagtcttgatcctccactcttgacacgataccttcgaatccatccacagtcttgggttcaccagattgcattgcgcatggaagtacttggatgcgaggctcaggacctctac

SEQ ID NO: 102 - protein, 1457 aa, synthetic construct
  REGION 1..1457: note = Variant of human B-domain deleted Factor VIII
MQIELSTCFFLCLLRFCFSATRRYYLGAVELSWDYMQSDLGELPVDARFPPRVPKSAPFNTSVVYKKTLFVEFTDHLFNIAKPRPPWMGLLGPTIQAEVYDTVVITLKNMASHPVSLHAVGVSYWKASEGAEYDDQTSQREKEDDKVFPGGSHTYVWQVLKENGPMASDPLCLTYSYLSHVDLVKDLNSGLIGALLVCREGSLAKEKTQTLHKFILLFAVFDEGKSWHSETKNSLMQDRDAASARAWPKMHTVNGYVNRSLPGLIGCHRKSVYWHVIGMGTTPEVHSIFLEGHTFLVRNHRQASLEISPITFLTAQTLLMDLGQFLLFCHISSHQHDGMEAYVKVDSCPEEPQLRMKNNEEAEDYDDDLTDSEMDVVRFDDDNSPSFIQIRSVAKKHPKTWVHYIAAEEEDWDYAPLVLAPDDRSYKSQYLNNGPQRIGRKYKKVRFMAYTDETFKTREAIQHESGILGPLLYGEVGDTLLIIFKNQASRPYNIYPHGITDVRPLYSRRLPKGVKHLKDFPILPGEIFKYKWTVTVEDGPTKSDPRCLTRYYSSFVNMERDLASGLIGPLLICYKESVDQRGNQIMSDKRNVILFSVFDENRSWYLTENIQRFLPNPAGVQLEDPEFQASNIMHSINGYVFDSLQLSVCLHEVAYWYILSIGAQTDFLSVFFSGYTFKHKMVYEDTLTLFPFSGETVFMSMENPGLWILGCHNSDFRNRGMTALLKVSSCDKNTGDYYEDSYEDISAYLLSKNNAIEPRSFSQNPPVLKRHQREITRTTLQSDQEEIDYDDTISVEMKKEDFDIYDEDENQSPRSFQKKTRHYFIAAVERLWDYGMSSSPHVLRNRAQSGSVPQFKKVVFQEFTDGSFTQPLYRGELNEHLGLLGPYIRAEVEDNIMVTFRNQASRPYSFYSSLISYEEDQRQGAEPRKNFVKPNETKTYFWKVQHHMAPTKDEFDCKAWAYFSDVDLEKDVHSGLIGPLLVCHTNTLNPAHGRQVTVQEFALFFTIFDETKSWYFTENMERNCRAPCNIQMEDPTFKENYRFHAINGYIMDTLPGLVMAQDQRIRWYLLSMGSNENIHSIHFSGHVFTVRKKEEYKMALYNLYPGVFETVEMLPSKAGIWRVECLIGEHLHAGMSTLFLVYSNKCQTPLGMASGHIRDFQITASGQYGQWAPKLARLHYSGSINAWSTKEPFSWIKVDLLAPMIIHGIKTQGARQKFSSLYISQFIIMYSLDGKKWQTYRGNSTGTLMVFFGNVDSSGIKHNIFNPPIIARYIRLHPTHYSIRSTLRMELMGCDLNSCSMPLGMESKAISDAQITASSYFTNMFATWSPSKARLHLQGRSNAWRPQVNNPKEWLQVDFQKTMKVTGVTTQGVKSLLTSMYVKEFLISSSQDGHQWTLFFQNGKVKVFQGNQDSFTPVVNSLDPPLLTRYLRIHPQSWVHQIALRMEVLGCEAQDLY

SEQ ID NO: 103 - DNA, 4371 bp, synthetic construct
  misc_feature 1..4371: note = Variant of human B-domain deleted Factor VIII
  source 1..4371: mol_type = other DNA
atgcagattgaactgtctacctgcttcttcctctgtttgctgaggttctgctttagcgccactagacggtactaccttggcgctgtggagctgtcctgggactatatgcagagtgatttgggagagcttcccgtcgacgcacgatttcctcctcgcgttccaaagtcatttccctcgaacacaagcgtggtgtacaagaagacgctcttcgtcgaattcaccgatcacctgttcaatatcgccaaacccagaccaccatggatgggtcttttggggcctaccatacaagcggaggtgtatgacacagttgttatcactctcaagaacatggcttctcatccggtaagtcttcacgcagtgggcgtgtcctactggaaagcttcagaaggagccgagtatgatgatcagacatcccagagggagaaagaagacgacaaggtatttccaggtgggtctcatacctatgtgtggcaagtgctcaaagagaatggccctatggcaagcgatccgctctgtttgacttacagctacctttcacacgttgacctcgtcaaggacctcaactccgggttgattggagccttgttggtatgcagggaaggatctcttgccaaagagaagacacagaccctccacaagtttatccttctctttgctgtgttcgatgagggcaaaagttggcatagcgaaacgaagaattccctcatgcaggatcgcgacgcagccagcgccagagcttggcccaagatgcacactgtgaacggatatgtcaataggtcacttcctggcttgattgggtgtcatcggaaaagtgtctactggcacgtgatcggaatggggacaacaccagaggtccactccatatttctcgaaggccataccttccttgttcgaaaccacagacaggcatccttggagatctctcccattacctttctcactgcccaaacgctccttatggacttgggtcagttccttctcttctgccatatcagctcacaccagcatgatggtatggaagcttatgtgaaagtcgacagttgtcctgaggagccacagttgcgcatgaagaataatgaagaagccgaggattacgacgacgatctcaccgattctgagatggacgtggtgaggtttgatgacgacaactctccctccttcattcaaatccggagcgtggcgaagaaacaccccaagacttgggtccactatatagcggcggaagaggaggattgggattacgctcctcttgtattggcaccagatgaccgctcatacaaaagccagtacctcaacaacggaccgcagagaattggccggaagtataagaaagtgcgatttatggcctatacagacgaaacctttaagacaagggaggccatccagcatgagagtgggattttgggacctcttctttacggcgaagttggtgataccctcctcatcatcttcaagaatcaagcttctcgcccctataacatttacccacacgggatcactgacgttaggcctttgtatagcagaagacttcccaaaggcgtgaagcatctcaaagacttccccattttgccaggcgagatctttaagtacaaatggaccgtcacagtggaagatggaccgactaaatcagaccctcgatgccttacgcggtactattcctccttcgtgaatatggagagagatttggcaagcggactcataggaccactcctcatctgttacaaggaatctgtagaccagaggggtaaccagattatgagtgataaacgcaatgtgatcctttttagcgtcttcgacgagaaccggtcctggtacttgaccgagaatatacaaaggttccttcccaaccccgcaggcgttcagttggaagaccctgagtttcaggccagcaatattatgcactcaatcaacggctatgtgtttgatagtctccagctttctgtttgcctccatgaagtagcctattggtacatcttgtcaattggtgctcaaacagacttcctctccgtcttcttctccggctacacctttaagcacaagatggtgtatgaggacactctcacactctttccattttctggagaaaccgtgttcatgagcatggagaatccaggcctttggatcttgggttgccacaacagtgattttcgcaatcggggaatgactgctctcctcaaagtcagcagctgtgataagaacacaggcgactattacgaagattcttacgaggacataagtgcctacttgttgtccaagaataacgccattgagcccagatcattctcccagaatcctcccgtgcttaaaaggcatcagcgcgaaatcaccagaactactcttcagtctgatcaagaggagattgactatgacgacaccataagcgtggaaatgaagaaggaggatttcgatatctatgacgaagatgagaaccagtctccgcggagctttcagaagaagacgcgacactacttcattgcagcagtcgaaaggctttgggactacggtatgtcatcatcccctcatgtgttgcgcaatagagctcagagtggaagtgttccacagttcaagaaagtcgtctttcaagagtttacagatggcagcttcacacagcctctctatcggggcgagcttaacgaacatttgggactccttggtccctatatccgagccgaagtggaggacaacattatggttacctttaggaatcaagcctctcgcccctacagcttctactcctccctcatcagttatgaggaggatcagagacaaggcgctgaaccacggaagaactttgtgaaaccgaatgagacgaagacctacttctggaaagtacagcaccacatggcccccacaaaagacgaattcgattgcaaagcatgggcgtatttttcagacgttgacttggagaaagatgtacattcaggacttattggtcctttgttggtgtgtcacactaacactctcaatccagcccatggcaggcaggtgacagtccaggaattcgctcttttctttaccatctttgatgagaccaagtcctggtacttcacggaaaacatggagcgcaattgcagagccccctgtaacatacagatggaggaccctacctttaaggaaaattatcggttccacgcaatcaacggatacattatggatacactccctggccttgtgatggctcaggaccaacgaatcaggtggtacctcctcagcatgggttctaatgagaacatacactccattcacttttcaggacatgtgttcactgtccggaagaaagaagagtataagatggccctctacaatttgtatccaggcgtgtttgagaccgttgaaatgcttccctctaaagctggcatctggagagtagagtgcttgatcggagaacatcttcacgcaggtatgagcaccttgttcctcgtgtacagcaacaaatgtcagaccccacttggcatggccagtggacacattcgcgactttcagatcacagcatctggccagtatggacaatgggccccaaagttggctcgcctccattactccggtagcataaatgcgtggtccactaaagaacctttcagctggattaaggtcgatcttcttgcccccatgatcatccacggcattaagacacagggagcgaggcagaaattctcctccctctacatctcacagttcattattatgtatagtttggacggcaagaagtggcaaacttatagaggtaacagtactggaacactcatggtgttcttcggcaacgttgatagctctggcatcaaacacaacatctttaatcctcccataatagctcggtacatcagattgcatccgacccactacagcattaggagtacactccgaatggagcttatgggttgcgacttgaattcctgttcaatgccactcggaatggagtctaaagccatctctgatgcacagataaccgccagtagctactttacgaacatgtttgctacgtggtcaccctctaaggcaaggcttcatttgcaaggccggtctaatgcctggagacctcaggtgaacaacccgaaagaatggctccaggtggactttcagaagaccatgaaagtaacaggtgtcactactcagggagttaagtccttgctcaccagcatgtatgtgaaggagttccttatttcctcatcacaagatggccaccagtggaccctcttctttcagaatggtaaggtcaaagtgtttcagggcaatcaagacagcttcacacccgtggtgaacagtcttgatcctccactcttgacacgataccttcgaatccatccacagtcttgggttcaccagattgcattgcgcatggaagtacttggatgcgaggctcaggacctctac

SEQ ID NO: 104 - protein, 1457 aa, synthetic construct
  REGION 1..1457: note = Variant of human B-domain deleted Factor VIII
MQIELSTCFFLCLLRFCFSATRRYYLGAVELSWDYMQSDLGELPVDARFPPRVPKSFPSNTSVVYKKTLFVEFTDHLFNIAKPRPPWMGLLGPTIQAEVYDTVVITLKNMASHPVSLHAVGVSYWKASEGAEYDDQTSQREKEDDKVFPGGSHTYVWQVLKENGPMASDPLCLTYSYLSHVDLVKDLNSGLIGALLVCREGSLAKEKTQTLHKFILLFAVFDEGKSWHSETKNSLMQDRDAASARAWPKMHTVNGYVNRSLPGLIGCHRKSVYWHVIGMGTTPEVHSIFLEGHTFLVRNHRQASLEISPITFLTAQTLLMDLGQFLLFCHISSHQHDGMEAYVKVDSCPEEPQLRMKNNEEAEDYDDDLTDSEMDVVRFDDDNSPSFIQIRSVAKKHPKTWVHYIAAEEEDWDYAPLVLAPDDRSYKSQYLNNGPQRIGRKYKKVRFMAYTDETFKTREAIQHESGILGPLLYGEVGDTLLIIFKNQASRPYNIYPHGITDVRPLYSRRLPKGVKHLKDFPILPGEIFKYKWTVTVEDGPTKSDPRCLTRYYSSFVNMERDLASGLIGPLLICYKESVDQRGNQIMSDKRNVILFSVFDENRSWYLTENIQRFLPNPAGVQLEDPEFQASNIMHSINGYVFDSLQLSVCLHEVAYWYILSIGAQTDFLSVFFSGYTFKHKMVYEDTLTLFPFSGETVFMSMENPGLWILGCHNSDFRNRGMTALLKVSSCDKNTGDYYEDSYEDISAYLLSKNNAIEPRSFSQNPPVLKRHQREITRTTLQSDQEEIDYDDTISVEMKKEDFDIYDEDENQSPRSFQKKTRHYFIAAVERLWDYGMSSSPHVLRNRAQSGSVPQFKKVVFQEFTDGSFTQPLYRGELNEHLGLLGPYIRAEVEDNIMVTFRNQASRPYSFYSSLISYEEDQRQGAEPRKNFVKPNETKTYFWKVQHHMAPTKDEFDCKAWAYFSDVDLEKDVHSGLIGPLLVCHTNTLNPAHGRQVTVQEFALFFTIFDETKSWYFTENMERNCRAPCNIQMEDPTFKENYRFHAINGYIMDTLPGLVMAQDQRIRWYLLSMGSNENIHSIHFSGHVFTVRKKEEYKMALYNLYPGVFETVEMLPSKAGIWRVECLIGEHLHAGMSTLFLVYSNKCQTPLGMASGHIRDFQITASGQYGQWAPKLARLHYSGSINAWSTKEPFSWIKVDLLAPMIIHGIKTQGARQKFSSLYISQFIIMYSLDGKKWQTYRGNSTGTLMVFFGNVDSSGIKHNIFNPPIIARYIRLHPTHYSIRSTLRMELMGCDLNSCSMPLGMESKAISDAQITASSYFTNMFATWSPSKARLHLQGRSNAWRPQVNNPKEWLQVDFQKTMKVTGVTTQGVKSLLTSMYVKEFLISSSQDGHQWTLFFQNGKVKVFQGNQDSFTPVVNSLDPPLLTRYLRIHPQSWVHQIALRMEVLGCEAQDLY

SEQ ID NO: 105 - DNA, 4371 bp, synthetic construct
  misc_feature 1..4371: note = Variant of human B-domain deleted Factor VIII
  source 1..4371: mol_type = other DNA
atgcagattgaactgtctacctgcttcttcctctgtttgctgaggttctgctttagcgccactagacggtactaccttggcgctgtggagctgtcctgggactatatgcagagtgatttgggagagcttcccgtcgacgcacgatttcctcctcgcgttccaaagtcatttcccttcaacacaagcgtggtgtacaagaagacgctcttcgtcgaattcaccgatcacctgttcaatatcgccaaacccagaccaccatggatgggtcttttggggcctaccatacaagcggaggtgtatgacacagttgttatcactctcaagaacatggcttctcatccggtaagtcttcacgcagtgggcgtgtcctactggaaagcttcagaaggagccgagtatgatgatcagacatcccagagggagaaagaagacgacaaggtatttccaggtgggtctcatacctatgtgtggcaagtgctcaaagagaatggccctatggcaagcgatccgctctgtttgacttacagctacctttcacacgttgacctcgtcaaggacctcaactccgggttgattggagccttgttggtatgcagggaaggatctcttgccaaagagaagacacagaccctccacaagtttatccttctctttgctgtgttcgatgagggcaaaagttggcatagcgaaacgaagaattccctcatgcaggatcgcgacgcagccagcgccagagcttggcccaagatgcacactgtgaacggatatgtcaataggtcacttcctggcttgattgggtgtcatcggaaaagtgtctactggcacgtgatcggaatggggacaacaccagaggtccactccatatttctcgaaggccataccttccttgttcgaaaccacagacaggcatccttggagatctctcccattacctttctcactgcccaaacgctccttatggacttgggtcagttccttctcttctgccatatcagctcacaccagcatgatggtatggaagcttatgtgaaagtcgacagttgtcctgaggagccacagttgcgcatgaagaataatgaagaagccgaggattacgacgacgatctcaccgattctgagatggacgtggtgaggtttgatgacgacaactctccctccttcattcaaatccggagcgtggcgaagaaacaccccaagacttgggtccactatatagcggcggaagaggaggattgggattacgctcctcttgtattggcaccagatgaccgctcatacaaaagccagtacctcaacaacggaccgcagagaattggccggaagtataagaaagtgcgatttatggcctatacagacgaaacctttaagacaagggaggccatccagcatgagagtgggattttgggacctcttctttacggcgaagttggtgataccctcctcatcatcttcaagaatcaagcttctcgcccctataacatttacccacacgggatcactgacgttaggcctttgtatagcagaagacttcccaaaggcgtgaagcatctcaaagacttccccattttgccaggcgagatctttaagtacaaatggaccgtcacagtggaagatggaccgactaaatcagaccctcgatgccttacgcggtactattcctccttcgtgaatatggagagagatttggcaagcggactcataggaccactcctcatctgttacaaggaatctgtagaccagaggggtaaccagattatgagtgataaacgcaatgtgatcctttttagcgtcttcgacgagaaccggtcctggtacttgaccgagaatatacaaaggttccttcccaaccccgcaggcgttcagttggaagaccctgagtttcaggccagcaatattatgcactcaatcaacggctatgtgtttgatagtctccagctttctgtttgcctccatgaagtagcctattggtacatcttgtcaattggtgctcaaacagacttcctctccgtcttcttctccggctacacctttaagcacaagatggtgtatgaggacactctcacactctttccattttctggagaaaccgtgttcatgagcatggagaatccaggcctttggatcttgggttgccacaacagtgattttcgcaatcggggaatgactgctctcctcaaagtcagcagctgtgataagaacacaggcgactattacgaagattcttacgaggacataagtgcctacttgttgtccaagaataacgccattgagcccagatcattctcccagaatcctcccgtgcttaaaaggcatcagcgcgaaatcaccagaactactcttcagtctgatcaagaggagattgactatgacgacaccataagcgtggaaatgaagaaggaggatttcgatatctatgacgaagatgagaaccagtctccgcggagctttcagaagaagacgcgacactacttcattgcagcagtcgaaaggctttgggactacggtatgtcatcatcccctcatgtgttgcgcaatagagctcagagtggaagtgttccacagttcaagaaagtcgtctttcaagagtttacagatggcagcttcacacagcctctctatcggggcgagcttaacgaacatttgggactccttggtccctatatccgagccgaagtggaggacaacattatggttacctttaggaatcaagcctctcgcccctacagcttctactcctccctcatcagttatgaggaggatcagagacaaggcgctgaaccacggaagaactttgtgaaaccgaatgagacgaagacctacttctggaaagtacagcaccacatggcccccacaaaagacgaattcgattgcaaagcatgggcgtatttttcagacgttgacttggagaaagatgtacattcaggacttattggtcctttgttggtgtgtcacactaacactctcaatccagcccatggcaggcaggtgacagtccaggaattcgctcttttctttaccatctttgatgagaccaagtcctggtacttcacggaaaacatggagcgcaattgcagagccccctgtaacatacagatggaggaccctacctttaaggaaaattatcggttccacgcaatcaacggatacattatggatacactccctggccttgtgatggctcaggaccaacgaatcaggtggtacctcctcagcatgggttctaatgagaacatacactccattcacttttcaggacatgtgttcactgtccggaagaaagaagagtataagatggccctctacaatttgtatccaggcgtgtttgagaccgttgaaatgcttccctctaaagctggcatctggagagtagagtgcttgatcggagaacatcttcacgcaggtatgagcaccttgttcctcgtgtacagcaacaaatgtcagaccccacttggcatggccagtggacacattcgcgactttcagatcacagcatctggccagtatggacaatgggccccaaagttggctcgcctccattactccggtagcataaatgcgtggtccactaaagaacctttcagctggattaaggtcgatcttcttgcccccatgatcatccacggcattaagacacagggagcgaggcagaaattctcctccctctacatctcacagttcattattatgtatagtttggacggcaagaagtggcaaacttatagaggtaacagtcggggaacactcatggtgttcttcggcaacgttgatagctctggcatcaaacacaacatctttaatcctcccataatagctcggtacatcagattgcatccgacccactacagcattaggagtacactccgaatggagcttatgggttgcgacttgaattcctgttcaatgccactcggaatggagtctaaagccatctctgatgcacagataaccgccagtagctactttacgaacatgtttgctacgtggtcaccctctaaggcaaggcttcatttgcaaggccggtctaatgcctggagacctcaggtgaacaacccgaaagaatggctccaggtggactttcagaagaccatgaaagtaacaggtgtcactactcagggagttaagtccttgctcaccagcatgtatgtgaaggagttccttatttcctcatcacaagatggccaccagtggaccctcttctttcagaatggtaaggtcaaagtgtttcagggcaatcaagacagcttcacacccgtggtgaacagtcttgatcctccactcttgacacgataccttcgaatccatccacagtcttgggttcaccagattgcattgcgcatggaagtacttggatgcgaggctcaggacctctac

SEQ ID NO: 106 - protein, 1457 aa, synthetic construct
  REGION 1..1457: note = Variant of human B-domain deleted Factor VIII
MQIELSTCFFLCLLRFCFSATRRYYLGAVELSWDYMQSDLGELPVDARFPPRVPKSFPFNTSVVYKKTLFVEFTDHLFNIAKPRPPWMGLLGPTIQAEVYDTVVITLKNMASHPVSLHAVGVSYWKASEGAEYDDQTSQREKEDDKVFPGGSHTYVWQVLKENGPMASDPLCLTYSYLSHVDLVKDLNSGLIGALLVCREGSLAKEKTQTLHKFILLFAVFDEGKSWHSETKNSLMQDRDAASARAWPKMHTVNGYVNRSLPGLIGCHRKSVYWHVIGMGTTPEVHSIFLEGHTFLVRNHRQASLEISPITFLTAQTLLMDLGQFLLFCHISSHQHDGMEAYVKVDSCPEEPQLRMKNNEEAEDYDDDLTDSEMDVVRFDDDNSPSFIQIRSVAKKHPKTWVHYIAAEEEDWDYAPLVLAPDDRSYKSQYLNNGPQRIGRKYKKVRFMAYTDETFKTREAIQHESGILGPLLYGEVGDTLLIIFKNQASRPYNIYPHGITDVRPLYSRRLPKGVKHLKDFPILPGEIFKYKWTVTVEDGPTKSDPRCLTRYYSSFVNMERDLASGLIGPLLICYKESVDQRGNQIMSDKRNVILFSVFDENRSWYLTENIQRFLPNPAGVQLEDPEFQASNIMHSINGYVFDSLQLSVCLHEVAYWYILSIGAQTDFLSVFFSGYTFKHKMVYEDTLTLFPFSGETVFMSMENPGLWILGCHNSDFRNRGMTALLKVSSCDKNTGDYYEDSYEDISAYLLSKNNAIEPRSFSQNPPVLKRHQREITRTTLQSDQEEIDYDDTISVEMKKEDFDIYDEDENQSPRSFQKKTRHYFIAAVERLWDYGMSSSPHVLRNRAQSGSVPQFKKVVFQEFTDGSFTQPLYRGELNEHLGLLGPYIRAEVEDNIMVTFRNQASRPYSFYSSLISYEEDQRQGAEPRKNFVKPNETKTYFWKVQHHMAPTKDEFDCKAWAYFSDVDLEKDVHSGLIGPLLVCHTNTLNPAHGRQVTVQEFALFFTIFDETKSWYFTENMERNCRAPCNIQMEDPTFKENYRFHAINGYIMDTLPGLVMAQDQRIRWYLLSMGSNENIHSIHFSGHVFTVRKKEEYKMALYNLYPGVFETVEMLPSKAGIWRVECLIGEHLHAGMSTLFLVYSNKCQTPLGMASGHIRDFQITASGQYGQWAPKLARLHYSGSINAWSTKEPFSWIKVDLLAPMIIHGIKTQGARQKFSSLYISQFIIMYSLDGKKWQTYRGNSRGTLMVFFGNVDSSGIKHNIFNPPIIARYIRLHPTHYSIRSTLRMELMGCDLNSCSMPLGMESKAISDAQITASSYFTNMFATWSPSKARLHLQGRSNAWRPQVNNPKEWLQVDFQKTMKVTGVTTQGVKSLLTSMYVKEFLISSSQDGHQWTLFFQNGKVKVFQGNQDSFTPVVNSLDPPLLTRYLRIHPQSWVHQIALRMEVLGCEAQDLY

SEQ ID NO: 107 - DNA, 4371 bp, synthetic construct
  misc_feature 1..4371: note = Variant of human B-domain deleted Factor VIII
  source 1..4371: mol_type = other DNA
atgcagattgaactgtctacctgcttcttcctctgtttgctgaggttctgctttagcgccactagacggtactaccttggcgctgtggagctgtcctgggactatatgcagagtgatttgggagagcttcccgtcgacgcacgatttcctcctcgcgttccaaagtcatttccccgtaacacaagcgtggtgtacaagaagacgctcttcgtcgaattcaccgatcacctgttcaatatcgccaaacccagaccaccatggatgggtcttttggggcctaccatacaagcggaggtgtatgacacagttgttatcactctcaagaacatggcttctcatccggtaagtcttcacgcagtgggcgtgtcctactggaaagcttcagaaggagccgagtatgatgatcagacatcccagagggagaaagaagacgacaaggtatttccaggtgggtctcatacctatgtgtggcaagtgctcaaagagaatggccctatggcaagcgatccgctctgtttgacttacagctacctttcacacgttgacctcgtcaaggacctcaactccgggttgattggagccttgttggtatgcagggaaggatctcttgccaaagagaagacacagaccctccacaagtttatccttctctttgctgtgttcgatgagggcaaaagttggcatagcgaaacgaagaattccctcatgcaggatcgcgacgcagccagcgccagagcttggcccaagatgcacactgtgaacggatatgtcaataggtcacttcctggcttgattgggtgtcatcggaaaagtgtctactggcacgtgatcggaatggggacaacaccagaggtccactccatatttctcgaaggccataccttccttgttcgaaaccacagacaggcatccttggagatctctcccattacctttctcactgcccaaacgctccttatggacttgggtcagttccttctcttctgccatatcagctcacaccagcatgatggtatggaagcttatgtgaaagtcgacagttgtcctgaggagccacagttgcgcatgaagaataatgaagaagccgaggattacgacgacgatctcaccgattctgagatggacgtggtgaggtttgatgacgacaactctccctccttcattcaaatccggagcgtggcgaagaaacaccccaagacttgggtccactatatagcggcggaagaggaggattgggattacgctcctcttgtattggcaccagatgaccgctcatacaaaagccagtacctcaacaacggaccgcagagaattggccggaagtataagaaagtgcgatttatggcctatacagacgaaacctttaagacaagggaggccatccagcatgagagtgggattttgggacctcttctttacggcgaagttggtgataccctcctcatcatcttcaagaatcaagcttctcgcccctataacatttacccacacgggatcactgacgttaggcctttgtatagcagaagacttcccaaaggcgtgaagcatctcaaagacttccccattttgccaggcgagatctttaagtacaaatggaccgtcacagtggaagatggaccgactaaatcagaccctcgatgccttacgcggtactattcctccttcgtgaatatggagagagatttggcaagcggactcataggaccactcctcatctgttacaaggaatctgtagaccagaggggtaaccagattatgagtgataaacgcaatgtgatcctttttagcgtcttcgacgagaaccggtcctggtacttgaccgagaatatacaaaggttccttcccaaccccgcaggcgttcagttggaagaccctgagtttcaggccagcaatattatgcactcaatcaacggctatgtgtttgatagtctccagctttctgtttgcctccatgaagtagcctattggtacatcttgtcaattggtgctcaaacagacttcctctccgtcttcttctccggctacacctttaagcacaagatggtgtatgaggacactctcacactctttccattttctggagaaaccgtgttcatgagcatggagaatccaggcctttggatcttgggttgccacaacagtgattttcgcaatcggggaatgactgctctcctcaaagtcagcagctgtgataagaacacaggcgactattacgaagattcttacgaggacataagtgcctacttgttgtccaagaataacgccattgagcccagatcattctcccagaatcctcccgtgcttaaaaggcatcagcgcgaaatcaccagaactactcttcagtctgatcaagaggagattgactatgacgacaccataagcgtggaaatgaagaaggaggatttcgatatctatgacgaagatgagaaccagtctccgcggagctttcagaagaagacgcgacactacttcattgcagcagtcgaaaggctttgggactacggtatgtcatcatcccctcatgtgttgcgcaatagagctcagagtggaagtgttccacagttcaagaaagtcgtctttcaagagtttacagatggcagcttcacacagcctctctatcggggcgagcttaacgaacatttgggactccttggtccctatatccgagccgaagtggaggacaacattatggttacctttaggaatcaagcctctcgcccctacagcttctactcctccctcatcagttatgaggaggatcagagacaaggcgctgaaccacggaagaactttgtgaaaccgaatgagacgaagacctacttctggaaagtacagcaccacatggcccccacaaaagacgaattcgattgcaaagcatgggcgtatttttcagacgttgacttggagaaagatgtacattcaggacttattggtcctttgttggtgtgtcacactaacactctcaatccagcccatggcaggcaggtgacagtccaggaattcgctcttttctttaccatctttgatgagaccaagtcctggtacttcacggaaaacatggagcgcaattgcagagccccctgtaacatacagatggaggaccctacctttaaggaaaattatcggttccacgcaatcaacggatacattatggatacactccctggccttgtgatggctcaggaccaacgaatcaggtggtacctcctcagcatgggttctaatgagaacatacactccattcacttttcaggacatgtgttcactgtccggaagaaagaagagtataagatggccctctacaatttgtatccaggcgtgtttgagaccgttgaaatgcttccctctaaagctggcatctggagagtagagtgcttgatcggagaacatcttcacgcaggtatgagcaccttgttcctcgtgtacagcaacaaatgtcagaccccacttggcatggccagtggacacattcgcgactttcagatcacagcatctggccagtatggacaatgggccccaaagttggctcgcctccattactccggtagcataaatgcgtggtccactaaagaacctttcagctggattaaggtcgatcttcttgcccccatgatcatccacggcattaagacacagggagcgaggcagaaattctcctccctctacatctcacagttcattattatgtatagtttggacggcaagaagtggcaaacttatagaggtaacagtactggaacactcatggtgttcttcggcaacgttgatagctctggcatcaaacacaacatctttaatcctcccataatagctcggtacatcagattgcatccgacccactacagcattaggagtacactccgaatggagcttatgggttgcgacttgaattcctgttcaatgccactcggaatggagtctaaagccatctctgatgcacagataaccgccagtagctactttacgaacatgtttgctacgtggtcaccctctaaggcaaggcttcatttgcaaggccggtctaatgcctggagacctcaggtgaacaacccgaaagaatggctccaggtggactttcagaagaccatgaaagtaacaggtgtcactactcagggagttaagtccttgctcaccagcatgtatgtgaaggagttccttatttcctcatcacaagatggccaccagtggaccctcttctttcagaatggtaaggtcaaagtgtttcagggcaatcaagacagcttcacacccgtggtgaacagtcttgatcctccactcttgacacgataccttcgaatccatccacagtcttgggttcaccagattgcattgcgcatggaagtacttggatgcgaggctcaggacctctac

SEQ ID NO: 108 - protein, 1457 aa, synthetic construct
  REGION 1..1457: note = Variant of human B-domain deleted Factor VIII
MQIELSTCFFLCLLRFCFSATRRYYLGAVELSWDYMQSDLGELPVDARFPPRVPKSFPRNTSVVYKKTLFVEFTDHLFNIAKPRPPWMGLLGPTIQAEVYDTVVITLKNMASHPVSLHAVGVSYWKASEGAEYDDQTSQREKEDDKVFPGGSHTYVWQVLKENGPMASDPLCLTYSYLSHVDLVKDLNSGLIGALLVCREGSLAKEKTQTLHKFILLFAVFDEGKSWHSETKNSLMQDRDAASARAWPKMHTVNGYVNRSLPGLIGCHRKSVYWHVIGMGTTPEVHSIFLEGHTFLVRNHRQASLEISPITFLTAQTLLMDLGQFLLFCHISSHQHDGMEAYVKVDSCPEEPQLRMKNNEEAEDYDDDLTDSEMDVVRFDDDNSPSFIQIRSVAKKHPKTWVHYIAAEEEDWDYAPLVLAPDDRSYKSQYLNNGPQRIGRKYKKVRFMAYTDETFKTREAIQHESGILGPLLYGEVGDTLLIIFKNQASRPYNIYPHGITDVRPLYSRRLPKGVKHLKDFPILPGEIFKYKWTVTVEDGPTKSDPRCLTRYYSSFVNMERDLASGLIGPLLICYKESVDQRGNQIMSDKRNVILFSVFDENRSWYLTENIQRFLPNPAGVQLEDPEFQASNIMHSINGYVFDSLQLSVCLHEVAYWYILSIGAQTDFLSVFFSGYTFKHKMVYEDTLTLFPFSGETVFMSMENPGLWILGCHNSDFRNRGMTALLKVSSCDKNTGDYYEDSYEDISAYLLSKNNAIEPRSFSQNPPVLKRHQREITRTTLQSDQEEIDYDDTISVEMKKEDFDIYDEDENQSPRSFQKKTRHYFIAAVERLWDYGMSSSPHVLRNRAQSGSVPQFKKVVFQEFTDGSFTQPLYRGELNEHLGLLGPYIRAEVEDNIMVTFRNQASRPYSFYSSLISYEEDQRQGAEPRKNFVKPNETKTYFWKVQHHMAPTKDEFDCKAWAYFSDVDLEKDVHSGLIGPLLVCHTNTLNPAHGRQVTVQEFALFFTIFDETKSWYFTENMERNCRAPCNIQMEDPTFKENYRFHAINGYIMDTLPGLVMAQDQRIRWYLLSMGSNENIHSIHFSGHVFTVRKKEEYKMALYNLYPGVFETVEMLPSKAGIWRVECLIGEHLHAGMSTLFLVYSNKCQTPLGMASGHIRDFQITASGQYGQWAPKLARLHYSGSINAWSTKEPFSWIKVDLLAPMIIHGIKTQGARQKFSSLYISQFIIMYSLDGKKWQTYRGNSTGTLMVFFGNVDSSGIKHNIFNPPIIARYIRLHPTHYSIRSTLRMELMGCDLNSCSMPLGMESKAISDAQITASSYFTNMFATWSPSKARLHLQGRSNAWRPQVNNPKEWLQVDFQKTMKVTGVTTQGVKSLLTSMYVKEFLISSSQDGHQWTLFFQNGKVKVFQGNQDSFTPVVNSLDPPLLTRYLRIHPQSWVHQIALRMEVLGCEAQDLY

SEQ ID NO: 109 - DNA, 4371 bp, synthetic construct
  misc_feature 1..4371: note = Variant of human B-domain deleted Factor VIII
  source 1..4371: mol_type = other DNA
atgcagattgaactgtctacctgcttcttcctctgtttgctgaggttctgctttagcgccactagacggtactaccttggcgctgtggagctgtcctgggactatatgcagagtgatttgggagagcttcccgtcgacgcacgatttcctcctcgcgttccaaagtcatttcccttcaacacaagcgtggtgtacaagaagacgctcttcgtcgaattcaccgatcacctgttcaatatcgccaaacccagaccaccatggatgggtcttttggggcctaccatatgggcggaggtgtatgacacagttgttatcactctcaagaacatggcttctcatccggtaagtcttcacgcagtgggcgtgtcctactggaaagcttcagaaggagccgagtatgatgatcagacatcccagagggagaaagaagacgacaaggtatttccaggtgggtctcatacctatgtgtggcaagtgctcaaagagaatggccctatggcaagcgatccgctctgtttgacttacagctacctttcacacgttgacctcgtcaaggacctcaactccgggttgattggagccttgttggtatgcagggaaggatctcttgccaaagagaagacacagaccctccacaagtttatccttctctttgctgtgttcgatgagggcaaaagttggcatagcgaaacgaagaattccctcatgcaggatcgcgacgcagccagcgccagagcttggcccaagatgcacactgtgaacggatatgtcaataggtcacttcctggcttgattgggtgtcatcggaaaagtgtctactggcacgtgatcggaatggggacaacaccagaggtccactccatatttctcgaaggccataccttccttgttcgaaaccacagacaggcatccttggagatctctcccattacctttctcactgcccaaacgctccttatggacttgggtcagttccttctcttctgccatatcagctcacaccagcatgatggtatggaagcttatgtgaaagtcgacagttgtcctgaggagccacagttgcgcatgaagaataatgaagaagccgaggattacgacgacgatctcaccgattctgagatggacgtggtgaggtttgatgacgacaactctccctccttcattcaaatccggagcgtggcgaagaaacaccccaagacttgggtccactatatagcggcggaagaggaggattgggattacgctcctcttgtattggcaccagatgaccgctcatacaaaagccagtacctcaacaacggaccgcagagaattggccggaagtataagaaagtgcgatttatggcctatacagacgaaacctttaagacaagggaggccatccagcatgagagtgggattttgggacctcttctttacggcgaagttggtgataccctcctcatcatcttcaagaatcaagcttctcgcccctataacatttacccacacgggatcactgacgttaggcctttgtatagcagaagacttcccaaaggcgtgaagcatctcaaagacttccccattttgccaggcgagatctttaagtacaaatggaccgtcacagtggaagatggaccgactaaatcagaccctcgatgccttacgcggtactattcctccttcgtgaatatggagagagatttggcaagcggactcataggaccactcctcatctgttacaaggaatctgtagaccagaggggtaaccagattatgagtgataaacgcaatgtgatcctttttagcgtcttcgacgagaaccggtcctggtacttgaccgagaatatacaaaggttccttcccaaccccgcaggcgttcagttggaagaccctgagtttcaggccagcaatattatgcactcaatcaacggctatgtgtttgatagtctccagctttctgtttgcctccatgaagtagcctattggtacatcttgtcaattggtgctcaaacagacttcctctccgtcttcttctccggctacacctttaagcacaagatggtgtatgaggacactctcacactctttccattttctggagaaaccgtgttcatgagcatggagaatccaggcctttggatcttgggttgccacaacagtgattttcgcaatcggggaatgactgctctcctcaaagtcagcagctgtgataagaacacaggcgactattacgaagattcttacgaggacataagtgcctacttgttgtccaagaataacgccattgagcccagatcattctcccagaatcctcccgtgcttaaaaggcatcagcgcgaaatcaccagaactactcttcagtctgatcaagaggagattgactatgacgacaccataagcgtggaaatgaagaaggaggatttcgatatctatgacgaagatgagaaccagtctccgcggagctttcagaagaagacgcgacactacttcattgcagcagtcgaaaggctttgggactacggtatgtcatcatcccctcatgtgttgcgcaatagagctcagagtggaagtgttccacagttcaagaaagtcgtctttcaagagtttacagatggcagcttcacacagcctctctatcggggcgagcttaacgaacatttgggactccttggtccctatatccgagccgaagtggaggacaacattatggttacctttaggaatcaagcctctcgcccctacagcttctactcctccctcatcagttatgaggaggatcagagacaaggcgctgaaccacggaagaactttgtgaaaccgaatgagacgaagacctacttctggaaagtacagcaccacatggcccccacaaaagacgaattcgattgcaaagcatgggcgtatttttcagacgttgacttggagaaagatgtacattcaggacttattggtcctttgttggtgtgtcacactaacactctcaatccagcccatggcaggcaggtgacagtccaggaattcgctcttttctttaccatctttgatgagaccaagtcctggtacttcacggaaaacatggagcgcaattgcagagccccctgtaacatacagatggaggaccctacctttaaggaaaattatcggttccacgcaatcaacggatacattatggatacactccctggccttgtgatggctcaggaccaacgaatcaggtggtacctcctcagcatgggttctaatgagaacatacactccattcacttttcaggacatgtgttcactgtccggaagaaagaagagtataagatggccctctacaatttgtatccaggcgtgtttgagaccgttgaaatgcttccctctaaagctggcatctggagagtagagtgcttgatcggagaacatcttcacgcaggtatgagcaccttgttcctcgtgtacagcaacaaatgtcagaccccacttggcatggccagtggacacattcgcgactttcagatcacagcatctggccagtatggacaatgggccccaaagttggctcgcctccattactccggtagcataaatgcgtggtccactaaagaacctttcagctggattaaggtcgatcttcttgcccccatgatcatccacggcattaagacacagggagcgaggcagaaattctcctccctctacatctcacagttcattattatgtatagtttggacggcaagaagtggcaaacttatagaggtaacagtactggaacactcatggtgttcttcggcaacgttgatagctctggcatcaaacacaacatctttaatcctcccataatagctcggtacatcagattgcatccgacccactacagcattaggagtacactccgaatggagcttatgggttgcgacttgaattcctgttcaatgccactcggaatggagtctaaagccatctctgatgcacagataaccgccagtagctactttacgaacatgtttgctacgtggtcaccctctaaggcaaggcttcatttgcaaggccggtctaatgcctggagacctcaggtgaacaacccgaaagaatggctccaggtggactttcagaagaccatgaaagtaacaggtgtcactactcagggagttaagtccttgctcaccagcatgtatgtgaaggagttccttatttcctcatcacaagatggccaccagtggaccctcttctttcagaatggtaaggtcaaagtgtttcagggcaatcaagacagcttcacacccgtggtgaacagtcttgatcctccactcttgacacgataccttcgaatccatccacagtcttgggttcaccagattgcattgcgcatggaagtacttggatgcgaggctcaggacctctac

SEQ ID NO: 110 - protein, 1457 aa, synthetic construct
  REGION 1..1457: note = Variant of human B-domain deleted Factor VIII
MQIELSTCFFLCLLRFCFSATRRYYLGAVELSWDYMQSDLGELPVDARFPPRVPKSFPFNTSVVYKKTLFVEFTDHLFNIAKPRPPWMGLLGPTIWAEVYDTVVITLKNMASHPVSLHAVGVSYWKASEGAEYDDQTSQREKEDDKVFPGGSHTYVWQVLKENGPMASDPLCLTYSYLSHVDLVKDLNSGLIGALLVCREGSLAKEKTQTLHKFILLFAVFDEGKSWHSETKNSLMQDRDAASARAWPKMHTVNGYVNRSLPGLIGCHRKSVYWHVIGMGTTPEVHSIFLEGHTFLVRNHRQASLEISPITFLTAQTLLMDLGQFLLFCHISSHQHDGMEAYVKVDSCPEEPQLRMKNNEEAEDYDDDLTDSEMDVVRFDDDNSPSFIQIRSVAKKHPKTWVHYIAAEEEDWDYAPLVLAPDDRSYKSQYLNNGPQRIGRKYKKVRFMAYTDETFKTREAIQHESGILGPLLYGEVGDTLLIIFKNQASRPYNIYPHGITDVRPLYSRRLPKGVKHLKDFPILPGEIFKYKWTVTVEDGPTKSDPRCLTRYYSSFVNMERDLASGLIGPLLICYKESVDQRGNQIMSDKRNVILFSVFDENRSWYLTENIQRFLPNPAGVQLEDPEFQASNIMHSINGYVFDSLQLSVCLHEVAYWYILSIGAQTDFLSVFFSGYTFKHKMVYEDTLTLFPFSGETVFMSMENPGLWILGCHNSDFRNRGMTALLKVSSCDKNTGDYYEDSYEDISAYLLSKNNAIEPRSFSQNPPVLKRHQREITRTTLQSDQEEIDYDDTISVEMKKEDFDIYDEDENQSPRSFQKKTRHYFIAAVERLWDYGMSSSPHVLRNRAQSGSVPQFKKVVFQEFTDGSFTQPLYRGELNEHLGLLGPYIRAEVEDNIMVTFRNQASRPYSFYSSLISYEEDQRQGAEPRKNFVKPNETKTYFWKVQHHMAPTKDEFDCKAWAYFSDVDLEKDVHSGLIGPLLVCHTNTLNPAHGRQVTVQEFALFFTIFDETKSWYFTENMERNCRAPCNIQMEDPTFKENYRFHAINGYIMDTLPGLVMAQDQRIRWYLLSMGSNENIHSIHFSGHVFTVRKKEEYKMALYNLYPGVFETVEMLPSKAGIWRVECLIGEHLHAGMSTLFLVYSNKCQTPLGMASGHIRDFQITASGQYGQWAPKLARLHYSGSINAWSTKEPFSWIKVDLLAPMIIHGIKTQGARQKFSSLYISQFIIMYSLDGKKWQTYRGNSTGTLMVFFGNVDSSGIKHNIFNPPIIARYIRLHPTHYSIRSTLRMELMGCDLNSCSMPLGMESKAISDAQITASSYFTNMFATWSPSKARLHLQGRSNAWRPQVNNPKEWLQVDFQKTMKVTGVTTQGVKSLLTSMYVKEFLISSSQDGHQWTLFFQNGKVKVFQGNQDSFTPVVNSLDPPLLTRYLRIHPQSWVHQIALRMEVLGCEAQDLY

SEQ ID NO: 111 - DNA, 4371 bp, synthetic construct
  misc_feature 1..4371: note = Variant of human B-domain deleted Factor VIII
  source 1..4371: mol_type = other DNA
atgcagattgaactgtctacctgcttcttcctctgtttgctgaggttctgctttagcgccactagacggtactaccttggcgctgtggagctgtcctgggactatatgcagagtgatttgggagagcttcccgtcgacgcacgatttcctcctcgcgttccaaagtcatttcccttcaacacaagcgtggtgtacaagaagacgctcttcgtcgaattcaccgatcacctgttcaatatcgccaaacccagaccaccatggatgggtcttttggggcctaccatacaagcggaggtgtatgacacagttgttatcactctcaagaacatggcttctcatccggtaagtcttcacgcagtgggcgtgtcctactggaaagcttcagaaggagccgagtatgatgatcagacatcccagagggagaaagaagacgacaaggtatttccaggtgggtctcatacctatgtgtggcaagtgctcaaagagaatggccctatggcaagcgatccgctctgtttgacttacagctacctttcacacgttgacctcgtcaaggacctcaactccgggttgattggagccttgttggtatgcagggaaggatctcttgccaaagagaagacacagaccctccacaagtttatccttctctttgctgtgttcgatgagggcaaaagttggcatagcgaaacgaagaattccctcatgcaggatcgcgacgcagccagcgccagagcttggcccaagatgcacactgtgaacggatatgtcaataggtcacttcctggcttgattgggtgtcatcggaaaagtgtctactggcacgtgatcggaatggggacaacaccagaggtccactccatatttctcgaaggccataccttccttgttcgaaaccacagacaggcatccttggagatctctcccattacctttctcactgcccaaacgctccttatggacttgggtcagttccttctcttctgccatatcagctcacaccagcatgatggtatggaagcttatgtgaaagtcgacagttgtcctgaggagccacagttgcgcatgaagaataatgaagaagccgaggattacgacgacgatctcaccgattctgagatggacgtggtgaggtttgatgacgacaactctccctccttcattcaaatccggagcgtggcgaagaaacaccccaagacttgggtccactatatagcggcggaagaggaggattgggattacgctcctcttgtattggcaccagatgaccgctcatacaaaagccagtacctcaacaacggaccgcagagaattggccggaagtataagaaagtgcgatttatggcctatacagacgaaacctttaagacaagggaggccatccagcatgagagtgggattttgggacctcttctttacggcgaagttggtgataccctcctcatcatcttcaagaatcaagcttctcgcccctataacatttacccacacgggatcactgacgttaggcctttgtatagcagaagacttcccaaaggcgtgaagcatctcaaagacttccccattttgccaggcgagatctttaagtacaaatggaccgtcacagtggaagatggaccgactaaatcagaccctcgatgccttacgcggtactattcctccttcgtgaatatggagagagatttggcaagcggactcataggaccactcctcatctgttacaaggaatctgtagaccagaggggtaaccagattatgagtgataaacgcaatgtgatcctttttagcgtcttcgacgagaaccggtcctggtacttgaccgagaatatacaaaggttccttcccaaccccgcaggcgttcagttggaagaccctgagtttcaggccagcaatattatgcactcaatcaacggctatgtgtttgatagtctccagctttctgtttgcctccatgaagtagcctattggtacatcttgtcaattggtgctcaaacagacttcctctccgtcttcttctccggctacacctttaagcacaagatggtgtatgaggacactctcacactctttccattttctggagaaaccgtgttcatgagcatggagaatccaggcctttggatcttgggttgccacaacagtgattttcgcaatcggggaatgactgctctcctcaaagtcagcagctgtgataagaacacaggcgactattacgaagattcttacgaggacataagtgcctacttgttgtccaagaataacgccattgagcccagatcattctcccagaatcctcccgtgcttaaaaggcatcagcgcgaaatcaccagaactactcttcagtctgatcaagaggagattgactatgacgacaccataagcgtggaatataagaaggaggatttcgatatctatgacgaagatgagaaccagtctccgcggagctttcagaagaagacgcgacactacttcattgcagcagtcgaaaggctttgggactacggtatgtcatcatcccctcatgtgttgcgcaatagagctcagagtggaagtgttccacagttcaagaaagtcgtctttcaagagtttacagatggcagcttcacacagcctctctatcggggcgagcttaacgaacatttgggactccttggtccctatatccgagccgaagtggaggacaacattatggttacctttaggaatcaagcctctcgcccctacagcttctactcctccctcatcagttatgaggaggatcagagacaaggcgctgaaccacggaagaactttgtgaaaccgaatgagacgaagacctacttctggaaagtacagcaccacatggcccccacaaaagacgaattcgattgcaaagcatgggcgtatttttcagacgttgacttggagaaagatgtacattcaggacttattggtcctttgttggtgtgtcacactaacactctcaatccagcccatggcaggcaggtgacagtccaggaattcgctcttttctttaccatctttgatgagaccaagtcctggtacttcacggaaaacatggagcgcaattgcagagccccctgtaacatacagatggaggaccctacctttaaggaaaattatcggttccacgcaatcaacggatacattatggatacactccctggccttgtgatggctcaggaccaacgaatcaggtggtacctcctcagcatgggttctaatgagaacatacactccattcacttttcaggacatgtgttcactgtccggaagaaagaagagtataagatggccctctacaatttgtatccaggcgtgtttgagaccgttgaaatgcttccctctaaagctggcatctggagagtagagtgcttgatcggagaacatcttcacgcaggtatgagcaccttgttcctcgtgtacagcaacaaatgtcagaccccacttggcatggccagtggacacattcgcgactttcagatcacagcatctggccagtatggacaatgggccccaaagttggctcgcctccattactccggtagcataaatgcgtggtccactaaagaacctttcagctggattaaggtcgatcttcttgcccccatgatcatccacggcattaagacacagggagcgaggcagaaattctcctccctctacatctcacagttcattattatgtatagtttggacggcaagaagtggcaaacttatagaggtaacagtactggaacactcatggtgttcttcggcaacgttgatagctctggcatcaaacacaacatctttaatcctcccataatagctcggtacatcagattgcatccgacccactacagcattaggagtacactccgaatggagcttatgggttgcgacttgaattcctgttcaatgccactcggaatggagtctaaagccatctctgatgcacagataaccgccagtagctactttacgaacatgtttgctacgtggtcaccctctaaggcaaggcttcatttgcaaggccggtctaatgcctggagacctcaggtgaacaacccgaaagaatggctccaggtggactttcagaagaccatgaaagtaacaggtgtcactactcagggagttaagtccttgctcaccagcatgtatgtgaaggagttccttatttcctcatcacaagatggccaccagtggaccctcttctttcagaatggtaaggtcaaagtgtttcagggcaatcaagacagcttcacacccgtggtgaacagtcttgatcctccactcttgacacgataccttcgaatccatccacagtcttgggttcaccagattgcattgcgcatggaagtacttggatgcgaggctcaggacctctac

SEQ ID NO: 112 - protein, 1457 aa, synthetic construct
  REGION 1..1457: note = Variant of human B-domain deleted Factor VIII
MQIELSTCFFLCLLRFCFSATRRYYLGAVELSWDYMQSDLGELPVDARFPPRVPKSFPFNTSVVYKKTLFVEFTDHLFNIAKPRPPWMGLLGPTIQAEVYDTVVITLKNMASHPVSLHAVGVSYWKASEGAEYDDQTSQREKEDDKVFPGGSHTYVWQVLKENGPMASDPLCLTYSYLSHVDLVKDLNSGLIGALLVCREGSLAKEKTQTLHKFILLFAVFDEGKSWHSETKNSLMQDRDAASARAWPKMHTVNGYVNRSLPGLIGCHRKSVYWHVIGMGTTPEVHSIFLEGHTFLVRNHRQASLEISPITFLTAQTLLMDLGQFLLFCHISSHQHDGMEAYVKVDSCPEEPQLRMKNNEEAEDYDDDLTDSEMDVVRFDDDNSPSFIQIRSVAKKHPKTWVHYIAAEEEDWDYAPLVLAPDDRSYKSQYLNNGPQRIGRKYKKVRFMAYTDETFKTREAIQHESGILGPLLYGEVGDTLLIIFKNQASRPYNIYPHGITDVRPLYSRRLPKGVKHLKDFPILPGEIFKYKWTVTVEDGPTKSDPRCLTRYYSSFVNMERDLASGLIGPLLICYKESVDQRGNQIMSDKRNVILFSVFDENRSWYLTENIQRFLPNPAGVQLEDPEFQASNIMHSINGYVFDSLQLSVCLHEVAYWYILSIGAQTDFLSVFFSGYTFKHKMVYEDTLTLFPFSGETVFMSMENPGLWILGCHNSDFRNRGMTALLKVSSCDKNTGDYYEDSYEDISAYLLSKNNAIEPRSFSQNPPVLKRHQREITRTTLQSDQEEIDYDDTISVEYKKEDFDIYDEDENQSPRSFQKKTRHYFIAAVERLWDYGMSSSPHVLRNRAQSGSVPQFKKVVFQEFTDGSFTQPLYRGELNEHLGLLGPYIRAEVEDNIMVTFRNQASRPYSFYSSLISYEEDQRQGAEPRKNFVKPNETKTYFWKVQHHMAPTKDEFDCKAWAYFSDVDLEKDVHSGLIGPLLVCHTNTLNPAHGRQVTVQEFALFFTIFDETKSWYFTENMERNCRAPCNIQMEDPTFKENYRFHAINGYIMDTLPGLVMAQDQRIRWYLLSMGSNENIHSIHFSGHVFTVRKKEEYKMALYNLYPGVFETVEMLPSKAGIWRVECLIGEHLHAGMSTLFLVYSNKCQTPLGMASGHIRDFQITASGQYGQWAPKLARLHYSGSINAWSTKEPFSWIKVDLLAPMIIHGIKTQGARQKFSSLYISQFIIMYSLDGKKWQTYRGNSTGTLMVFFGNVDSSGIKHNIFNPPIIARYIRLHPTHYSIRSTLRMELMGCDLNSCSMPLGMESKAISDAQITASSYFTNMFATWSPSKARLHLQGRSNAWRPQVNNPKEWLQVDFQKTMKVTGVTTQGVKSLLTSMYVKEFLISSSQDGHQWTLFFQNGKVKVFQGNQDSFTPVVNSLDPPLLTRYLRIHPQSWVHQIALRMEVLGCEAQDLY

SEQ ID NO: 113 - DNA, 4371 bp, synthetic construct
  misc_feature 1..4371: note = Variant of human B-domain deleted Factor VIII
  source 1..4371: mol_type = other DNA
atgcagattgaactgtctacctgcttcttcctctgtttgctgaggttctgctttagcgccactagacggtactaccttggcgctgtggagctgtcctgggactatatgcagagtgatttgggagagcttcccgtcgacgcacgatttcctcctcgcgttccaaagtcatttcccttcaacacaagcgtggtgtacaagaagacgctcttcgtcgaattcaccgatcacctgttcaatatcgccaaacccagaccaccatggatgggtcttttggggcctaccatacaagcggaggtgtatgacacagttgttatcactctcaagaacatggcttctcatccggtaagtcttcacgcagtgggcgtgtcctactggaaagcttcagaaggagccgagtatgatgatcagacatcccagagggagaaagaagacgacaaggtatttccaggtgggtctcatacctatgtgtggcaagtgctcaaagagaatggccctatggcaagcgatccgctctgtttgacttacagctacctttcacacgttgacctcgtcaaggacctcaactccgggttgattggagccttgttggtatgcagggaaggatctcttgccaaagagaagacacagaccctccacaagtttatccttctctttgctgtgttcgatgagggcaaaagttggcatagcgaaacgaagaattccctcatgcaggatcgcgacgcagccagcgccagagcttggcccaagatgcacactgtgaacggatatgtcaataggtcacttcctggcttgattgggtgtcatcggaaaagtgtctactggcacgtgatcggaatggggacaacaccagaggtccactccatatttctcgaaggccataccttccttgttcgaaaccacagacaggcatccttggagatctctcccattacctttctcactgcccaaacgctccttatggacttgggtcagttccttctcttctgccatatcagctcacaccagcatgatggtatggaagcttatgtgaaagtcgacagttgtcctgaggagccacagttgcgcatgaagaataatgaagaagccgaggattacgacgacgatctcaccgattctgagatggacgtggtgaggtttgatgacgacaactctccctccttcattcaaatccggagcgtggcgaagaaacaccccaagacttgggtccactatatagcggcggaagaggaggattgggattacgctcctcttgtattggcaccagatgaccgctcatacaaaagccagtacctcaacaacggaccgcagagaattggccggaagtataagaaagtgcgatttatggcctatacagacgaaacctttaagacaagggaggccatccagcatgagagtgggattttgggacctcttctttacggcgaagttggtgataccctcctcatcatcttcaagaatcaagcttctcgcccctataacatttacccacacgggatcactgacgttaggcctttgtatagcagaagacttcccaaaggcgtgaagcatctcaaagacttccccattttgccaggcgagatctttaagtacaaatggaccgtcacagtggaagatggaccgactaaatcagaccctcgatgccttacgcggtactattcctccttcgtgaatatggagagagatttggcaagcggactcataggaccactcctcatctgttacaaggaatctgtagaccagaggggtaaccagattatgagtgataaacgcaatgtgatcctttttagcgtcttcgacgagaaccggtcctggtacttgaccgagaatatacaaaggttccttcccaaccccgcaggcgttcagttggaagaccctgagtttcaggccagcaatattatgcactcaatcaacggctatgtgtttgatagtctccagctttctgtttgcctccatgaagtagcctattggtacatcttgtcaattggtgctcaaacagacttcctctccgtcttcttctccggctacacctttaagcacaagatggtgtatgaggacactctcacactctttccattttctggagaaaccgtgttcatgagcatggagaatccaggcctttggatcttgggttgccacaacagtgattttcgcaatcggggaatgactgctctcctcaaagtcagcagctgtgataagaacacaggcgactattacgaagattcttacgaggacataagtgcctacttgttgtccaagaataacgccattgagcccagatcattctcccagaatcctcccgtgcttaaaaggcatcagcgcgaaatcaccagaactactcttcagtctgatcaagaggagattgactatgacgacaccataagcgtggaaatgaagaaggaggatttcgatatctatgacgaagatgagaaccagtctccgcggagctttcagaagaagacgcgacactacttcattgcagcagtcgaaaggctttgggactacggtatgtcatcatcccctcatgtgttgcgcaatagagctcagagtggaagtgttccacagttcaagaaagtcgtctttcaagagtttacagatggcagcttcacacagcctctctatcggggcgagcttaacgaacatttgggactccttggtccctatatccgagccgaagtggaggacaacattatggttacctttaggaatcaagcctctcgcccctacagcttctactcctccctcatcagttatgaggaggatcagagacaaggcgctgaaccacggaagaactttgtgaaaccgaatgagacgaagacctacttctggaaagtacagcaccacatggcccccacaaaagacgaattcgattgcaaagcatgggcgtatttttcagacgttgacttggagaaagatgtacattcaggacttattggtcctttgttggtgtgtcacactaacactctcaatccagcccatggcaggcaggtgacagtccaggaattcgctcttttctttaccatctttgatgagaccaagtcctggtacttcacggaaaacatggagcgcaattgcagagccccctgtaacatacagatggaggaccctacctttaaggaaaattatcggttccacgcaatcaacggatacattatggatacactccctggccttgtgatggctcaggaccaacgaatcaggtggtacctcctcagcatgggttctaatgagaacatacactccattcacttttcaggacatgtgttcactgtccggaagaaagaagagtataagatggccctctacaatttgtatccaggcgtgtttgagaccgttgaaatgcttccctctaaagctggcatctggagagtagagtgcttgatcggagaacatcttcacgcaggtatgagcaccttgttcctcgtgtacagcaaccgttgtcagaccccacttggcatggccagtggacacattcgcgactttcagatcacagcatctggccagtatggacaatgggccccaaagttggctcgcctccattactccggtagcataaatgcgtggtccactaaagaacctttcagctggattaaggtcgatcttcttgcccccatgatcatccacggcattaagacacagggagcgaggcagaaattctcctccctctacatctcacagttcattattatgtatagtttggacggcaagaagtggcaaacttatagaggtaacagtactggaacactcatggtgttcttcggcaacgttgatagctctggcatcaaacacaacatctttaatcctcccataatagctcggtacatcagattgcatccgacccactacagcattaggagtacactccgaatggagcttatgggttgcgacttgaattcctgttcaatgccactcggaatggagtctaaagccatctctgatgcacagataaccgccagtagctactttacgaacatgtttgctacgtggtcaccctctaaggcaaggcttcatttgcaaggccggtctaatgcctggagacctcaggtgaacaacccgaaagaatggctccaggtggactttcagaagaccatgaaagtaacaggtgtcactactcagggagttaagtccttgctcaccagcatgtatgtgaaggagttccttatttcctcatcacaagatggccaccagtggaccctcttctttcagaatggtaaggtcaaagtgtttcagggcaatcaagacagcttcacacccgtggtgaacagtcttgatcctccactcttgacacgataccttcgaatccatccacagtcttgggttcaccagattgcattgcgcatggaagtacttggatgcgaggctcaggacctctac

SEQ ID NO: 114 - protein, 1457 aa, synthetic construct
  REGION 1..1457: note = Variant of human B-domain deleted Factor VIII
MQIELSTCFFLCLLRFCFSATRRYYLGAVELSWDYMQSDLGELPVDARFPPRVPKSFPFNTSVVYKKTLFVEFTDHLFNIAKPRPPWMGLLGPTIQAEVYDTVVITLKNMASHPVSLHAVGVSYWKASEGAEYDDQTSQREKEDDKVFPGGSHTYVWQVLKENGPMASDPLCLTYSYLSHVDLVKDLNSGLIGALLVCREGSLAKEKTQTLHKFILLFAVFDEGKSWHSETKNSLMQDRDAASARAWPKMHTVNGYVNRSLPGLIGCHRKSVYWHVIGMGTTPEVHSIFLEGHTFLVRNHRQASLEISPITFLTAQTLLMDLGQFLLFCHISSHQHDGMEAYVKVDSCPEEPQLRMKNNEEAEDYDDDLTDSEMDVVRFDDDNSPSFIQIRSVAKKHPKTWVHYIAAEEEDWDYAPLVLAPDDRSYKSQYLNNGPQRIGRKYKKVRFMAYTDETFKTREAIQHESGILGPLLYGEVGDTLLIIFKNQASRPYNIYPHGITDVRPLYSRRLPKGVKHLKDFPILPGEIFKYKWTVTVEDGPTKSDPRCLTRYYSSFVNMERDLASGLIGPLLICYKESVDQRGNQIMSDKRNVILFSVFDENRSWYLTENIQRFLPNPAGVQLEDPEFQASNIMHSINGYVFDSLQLSVCLHEVAYWYILSIGAQTDFLSVFFSGYTFKHKMVYEDTLTLFPFSGETVFMSMENPGLWILGCHNSDFRNRGMTALLKVSSCDKNTGDYYEDSYEDISAYLLSKNNAIEPRSFSQNPPVLKRHQREITRTTLQSDQEEIDYDDTISVEMKKEDFDIYDEDENQSPRSFQKKTRHYFIAAVERLWDYGMSSSPHVLRNRAQSGSVPQFKKVVFQEFTDGSFTQPLYRGELNEHLGLLGPYIRAEVEDNIMVTFRNQASRPYSFYSSLISYEEDQRQGAEPRKNFVKPNETKTYFWKVQHHMAPTKDEFDCKAWAYFSDVDLEKDVHSGLIGPLLVCHTNTLNPAHGRQVTVQEFALFFTIFDETKSWYFTENMERNCRAPCNIQMEDPTFKENYRFHAINGYIMDTLPGLVMAQDQRIRWYLLSMGSNENIHSIHFSGHVFTVRKKEEYKMALYNLYPGVFETVEMLPSKAGIWRVECLIGEHLHAGMSTLFLVYSNRCQTPLGMASGHIRDFQITASGQYGQWAPKLARLHYSGSINAWSTKEPFSWIKVDLLAPMIIHGIKTQGARQKFSSLYISQFIIMYSLDGKKWQTYRGNSTGTLMVFFGNVDSSGIKHNIFNPPIIARYIRLHPTHYSIRSTLRMELMGCDLNSCSMPLGMESKAISDAQITASSYFTNMFATWSPSKARLHLQGRSNAWRPQVNNPKEWLQVDFQKTMKVTGVTTQGVKSLLTSMYVKEFLISSSQDGHQWTLFFQNGKVKVFQGNQDSFTPVVNSLDPPLLTRYLRIHPQSWVHQIALRMEVLGCEAQDLY

SEQ ID NO: 115 - DNA, 4371 bp, synthetic construct
  misc_feature 1..4371: note = Variant of human B-domain deleted Factor VIII
  source 1..4371: mol_type = other DNA
atgcagattgaactgtctacctgcttcttcctctgtttgctgaggttctgctttagcgccactagacggtactaccttggcgctgtggagctgtcctgggactatatgcagagtgatttgggagagcttcccgtcgacgcacgatttcctcctcgcgttccaaagtcatttcccttcaacacaagcgtggtgtacaagaagacgctcttcgtcgaattcaccgatcacctgttcaatatcgccaaacccagaccaccatggatgggtcttttggggcctaccatacaagcggaggtgtatgacacagttgttatcactctcaagaacatggcttctcatccggtaagtcttcacgcagtgggcgtgtcctactggaaagcttcagaaggagccgagtatgatgatcagacatcccagagggagaaagaagacgacaaggtatttccaggtgggtctcatacctatgtgtggcaagtgctcaaagagaatggccctatggcaagcgatccgctctgtttgacttacagctacctttcacacgttgacctcgtcaaggacctcaactccgggttgattggagccttgttggtatgcagggaaggatctcttgccaaagagaagacacagaccctccacaagtttatccttctctttgctgtgttcgatgagggcaaaagttggcatagcgaaacgaagaattccctcatgcaggatcgcgacgcagccagcgccagagcttggcccaagatgcacactgtgaacggatatgtcaataggtcacttcctggcttgattgggtgtcatcggaaaagtgtctactggcacgtgatcggaatggggacaacaccagaggtccactccatatttctcgaaggccataccttccttgttcgaaaccacagacaggcatccttggagatctctcccattacctttctcactgcccaaacgctccttatggacttgggtcagttccttctcttctgccatatcagctcacaccagcatgatggtatggaagcttatgtgaaagtcgacagttgtcctgaggagccacagttgcgcatgaagaataatgaagaagccgaggattacgacgacgatctcaccgattctgagatggacgtggtgaggtttgatgacgacaactctccctccttcattcaaatccggagcgtggcgaagaaacaccccaagacttgggtccactatatagcggcggaagaggaggattgggattacgctcctcttgtattggcaccagatgaccgctcatacaaaagccagtacctcaacaacggaccggatagaattggccggaagtataagaaagtgcgatttatggcctatacagacgaaacctttaagacaagggaggccatccagcatgagagtgggattttgggacctcttctttacggcgaagttggtgataccctcctcatcatcttcaagaatcaagcttctcgcccctataacatttacccacacgggatcactgacgttaggcctttgtatagcagaagacttcccaaaggcgtgaagcatctcaaagacttccccattttgccaggcgagatctttaagtacaaatggaccgtcacagtggaagatggaccgactaaatcagaccctcgatgccttacgcggtactattcctccttcgtgaatatggagagagatttggcaagcggactcataggaccactcctcatctgttacaaggaatctgtagaccagaggggtaaccagattatgagtgataaacgcaatgtgatcctttttagcgtcttcgacgagaaccggtcctggtacttgaccgagaatatacaaaggttccttcccaaccccgcaggcgttcagttggaagaccctgagtttcaggccagcaatattatgcactcaatcaacggctatgtgtttgatagtctccagctttctgtttgcctccatgaagtagcctattggtacatcttgtcaattggtgctcaaacagacttcctctccgtcttcttctccggctacacctttaagcacaagatggtgtatgaggacactctcacactctttccattttctggagaaaccgtgttcatgagcatggagaatccaggcctttggatcttgggttgccacaacagtgattttcgcaatcggggaatgactgctctcctcaaagtcagcagctgtgataagaacacaggcgactattacgaagattcttacgaggacataagtgcctacttgttgtccaagaataacgccattgagcccagatcattctcccagaatcctcccgtgcttaaaaggcatcagcgcgaaatcaccagaactactcttcagtctgatcaagaggagattgactatgacgacaccataagcgtggaaatgaagaaggaggatttcgatatctatgacgaagatgagaaccagtctccgcggagctttcagaagaagacgcgacactacttcattgcagcagtcgaaaggctttgggactacggtatgtcatcatcccctcatgtgttgcgcaatagagctcagagtggaagtgttccacagttcaagaaagtcgtctttcaagagtttacagatggcagcttcacacagcctctctatcggggcgagcttaacgaacatttgggactccttggtccctatatccgagccgaagtggaggacaacattatggttacctttaggaatcaagcctctcgcccctacagcttctactcctccctcatcagttatgaggaggatcagagacaaggcgctgaaccacggaagaactttgtgaaaccgaatgagacgaagacctacttctggaaagtacagcaccacatggcccccacaaaagacgaattcgattgcaaagcatgggcgtatttttcagacgttgacttggagaaagatgtacattcaggacttattggtcctttgttggtgtgtcacactaacactctcaatccagcccatggcaggcaggtgacagtccaggaattcgctcttttctttaccatctttgatgagaccaagtcctggtacttcacggaaaacatggagcgcaattgcagagccccctgtaacatacagatggaggaccctacctttaaggaaaattatcggttccacgcaatcaacggatacattatggatacactccctggccttgtgatggctcaggaccaacgaatcaggtggtacctcctcagcatgggttctaatgagaacatacactccattcacttttcaggacatgtgttcactgtccggaagaaagaagagtataagatggccctctacaatttgtatccaggcgtgtttgagaccgttgaaatgcttccctctaaagctggcatctggagagtagagtgcttgatcggagaacatcttcacgcaggtatgagcaccttgttcctcgtgtacagcaacaaatgtcagaccccacttggcatggccagtggacacattcgcgactttcagatcacagcatctggccagtatggacaatgggccccaaagttggctcgcctccattactccggtagcataaatgcgtggtccactaaagaacctttcagctggattaaggtcgatcttcttgcccccatgatcatccacggcattaagacacagggagcgaggcagaaattctcctccctctacatctcacagttcattattatgtatagtttggacggcaagaagtggcaaacttatagaggtaacagtactggaacactcatggtgttcttcggcaacgttgatagctctggcatcaaacacaacatctttaatcctcccataatagctcggtacatcagattgcatccgacccactacagcattaggagtacactccgaatggagcttatgggttgcgacttgaattcctgttcaatgccactcggaatggagtctaaagccatctctgatgcacagataaccgccagtagctactttacgaacatgtttgctacgtggtcaccctctaaggcaaggcttcatttgcaaggccggtctaatgcctggagacctcaggtgaacaacccgaaagaatggctccaggtggactttcagaagaccatgaaagtaacaggtgtcactactcagggagttaagtccttgctcaccagcatgtatgtgaaggagttccttatttcctcatcacaagatggccaccagtggaccctcttctttcagaatggtaaggtcaaagtgtttcagggcaatcaagacagcttcacacccgtggtgaacagtcttgatcctccactcttgacacgataccttcgaatccatccacagtcttgggttcaccagattgcattgcgcatggaagtacttggatgcgaggctcaggacctctac

SEQ ID NO: 116 - protein, 1457 aa, synthetic construct
  REGION 1..1457: note = Variant of human B-domain deleted Factor VIII
MQIELSTCFFLCLLRFCFSATRRYYLGAVELSWDYMQSDLGELPVDARFPPRVPKSFPFNTSVVYKKTLFVEFTDHLFNIAKPRPPWMGLLGPTIQAEVYDTVVITLKNMASHPVSLHAVGVSYWKASEGAEYDDQTSQREKEDDKVFPGGSHTYVWQVLKENGPMASDPLCLTYSYLSHVDLVKDLNSGLIGALLVCREGSLAKEKTQTLHKFILLFAVFDEGKSWHSETKNSLMQDRDAASARAWPKMHTVNGYVNRSLPGLIGCHRKSVYWHVIGMGTTPEVHSIFLEGHTFLVRNHRQASLEISPITFLTAQTLLMDLGQFLLFCHISSHQHDGMEAYVKVDSCPEEPQLRMKNNEEAEDYDDDLTDSEMDVVRFDDDNSPSFIQIRSVAKKHPKTWVHYIAAEEEDWDYAPLVLAPDDRSYKSQYLNNGPDRIGRKYKKVRFMAYTDETFKTREAIQHESGILGPLLYGEVGDTLLIIFKNQASRPYNIYPHGITDVRPLYSRRLPKGVKHLKDFPILPGEIFKYKWTVTVEDGPTKSDPRCLTRYYSSFVNMERDLASGLIGPLLICYKESVDQRGNQIMSDKRNVILFSVFDENRSWYLTENIQRFLPNPAGVQLEDPEFQASNIMHSINGYVFDSLQLSVCLHEVAYWYILSIGAQTDFLSVFFSGYTFKHKMVYEDTLTLFPFSGETVFMSMENPGLWILGCHNSDFRNRGMTALLKVSSCDKNTGDYYEDSYEDISAYLLSKNNAIEPRSFSQNPPVLKRHQREITRTTLQSDQEEIDYDDTISVEMKKEDFDIYDEDENQSPRSFQKKTRHYFIAAVERLWDYGMSSSPHVLRNRAQSGSVPQFKKVVFQEFTDGSFTQPLYRGELNEHLGLLGPYIRAEVEDNIMVTFRNQASRPYSFYSSLISYEEDQRQGAEPRKNFVKPNETKTYFWKVQHHMAPTKDEFDCKAWAYFSDVDLEKDVHSGLIGPLLVCHTNTLNPAHGRQVTVQEFALFFTIFDETKSWYFTENMERNCRAPCNIQMEDPTFKENYRFHAINGYIMDTLPGLVMAQDQRIRWYLLSMGSNENIHSIHFSGHVFTVRKKEEYKMALYNLYPGVFETVEMLPSKAGIWRVECLIGEHLHAGMSTLFLVYSNKCQTPLGMASGHIRDFQITASGQYGQWAPKLARLHYSGSINAWSTKEPFSWIKVDLLAPMIIHGIKTQGARQKFSSLYISQFIIMYSLDGKKWQTYRGNSTGTLMVFFGNVDSSGIKHNIFNPPIIARYIRLHPTHYSIRSTLRMELMGCDLNSCSMPLGMESKAISDAQITASSYFTNMFATWSPSKARLHLQGRSNAWRPQVNNPKEWLQVDFQKTMKVTGVTTQGVKSLLTSMYVKEFLISSSQDGHQWTLFFQNGKVKVFQGNQDSFTPVVNSLDPPLLTRYLRIHPQSWVHQIALRMEVLGCEAQDLY

SEQ ID NO: 117 - DNA, 4371 bp, synthetic construct
  misc_feature 1..4371: note = Variant of human B-domain deleted Factor VIII
  source 1..4371: mol_type = other DNA
atgcagattgaactgtctacctgcttcttcctctgtttgctgaggttctgctttagcgccactagacggtactaccttggcgctgtggagctgtcctgggactatatgcagagtgatttgggagagcttcccgtcgacgcacgatttcctcctcgcgttccaaagtcatttcccttcaacacaagcgtggtgtacaagaagacgctcttcgtcgaattcaccgatcacctgttcaatatcgccaaacccagaccaccatggatgggtcttttggggcctaccatacaagcggaggtgtatgacacagttgttatcactctcaagaacatggcttctcatccggtaagtcttcacgcagtgggcgtgtcctactggaaagcttcagaaggagccgagtatgatgatcagacatcccagagggagaaagaagacgacaaggtatttccaggtgggtctcatacctatgtgtggcaagtgctcaaagagaatggccctatggcaagcgatccgctctgtttgacttacagctacctttcacacgttgacctcgtcaaggacctcaactccgggttgattggagccttgttggtatgcagggaaggatctcttgccaaagagaagacacagaccctccacaagtttatccttctctttgctgtgttcgatgagggcaaaagttggcatagcgaaacgaagaattccctcatgcaggatcgcgacgcagccagcgccagagcttggcccaagatgcacactgtgaacggatatgtcaataggtcacttcctggcttgattgggtgtcatcggaaaagtgtctactggcacgtgatcggaatggggacaacaccagaggtccactccatatttctcgaaggccataccttccttgttcgaaaccacagacaggcatccttggagatctctcccattacctttctcactgcccaaacgctccttatggacttgggtcagttccttctcttctgccatatcagctcacaccagcatgatggtatggaagcttatgtgaaagtcgacagttgtcctgaggagccacagttgcgcatgaagaataatgaagaagccgaggattacgacgacgatctcaccgattctgagatggacgtggtgaggtttgatgacgacaactctccctccttcattcaaatccggagcgtggcgaagaaacaccccaagacttgggtccactatatagcggcggaagaggaggattgggattacgctcctcttgtattggcaccagatgaccgctcatacaaaagccagtacctcaacaacggaccgcagagaattggccggaagtataagaaagtgcgatttatggcctatacagacgaaacctttaagacaagggaggccatccagcatgagagtgggattttgggacctcttctttacggcgaagttggtgataccctcctcatcatcttcaagaatcaagcttctcgcccctataacatttacccacacgggatcactgacgttaggcctttgtatagcagaagacttcccaaaggcgtgaagcatctcaaagacttccccattttgccaggcgagatctttaagtacaaatggaccgtcacagtggaagatggaccgactaaatcagaccctcgatgccttacgcggtactattcctccttcgtgaatatggagagagatttggcaagcggactcataggaccactcctcatctgttacaaggaatctgtagaccagaggggtaaccagattatgagtgataaacgcaatgtgatcctttttagcgtcttcgacgagaaccggtcctggtacttgaccgagaatatacaaaggttccttcccaaccccgcaggcgttcagttggaagaccctgagtttcaggccagcaatattatgcactcaatcaacggctatgtgtttgatagtctccagctttctgtttgcctccatgaagtagcctattggtacatcttgtcaattggtgctcaaacagacttcctctccgtcttcttctccggctacacctttaagcacaagatggtgtatgaggacactctcacactctttccattttctggagaaaccgtgttcatgagcatggagaatccaggcctttggatcttgggttgccacaacagtgatctgcgcaatcggggaatgactgctctcctcaaagtcagcagctgtgataagaacacaggcgactattacgaagattcttacgaggacataagtgcctacttgttgtccaagaataacgccattgagcccagatcattctcccagaatcctcccgtgcttaaaaggcatcagcgcgaaatcaccagaactactcttcagtctgatcaagaggagattgactatgacgacaccataagcgtggaaatgaagaaggaggatttcgatatctatgacgaagatgagaaccagtctccgcggagctttcagaagaagacgcgacactacttcattgcagcagtcgaaaggctttgggactacggtatgtcatcatcccctcatgtgttgcgcaatagagctcagagtggaagtgttccacagttcaagaaagtcgtctttcaagagtttacagatggcagcttcacacagcctctctatcggggcgagcttaacgaacatttgggactccttggtccctatatccgagccgaagtggaggacaacattatggttacctttaggaatcaagcctctcgcccctacagcttctactcctccctcatcagttatgaggaggatcagagacaaggcgctgaaccacggaagaactttgtgaaaccgaatgagacgaagacctacttctggaaagtacagcaccacatggcccccacaaaagacgaattcgattgcaaagcatgggcgtatttttcagacgttgacttggagaaagatgtacattcaggacttattggtcctttgttggtgtgtcacactaacactctcaatccagcccatggcaggcaggtgacagtccaggaattcgctcttttctttaccatctttgatgagaccaagtcctggtacttcacggaaaacatggagcgcaattgcagagccccctgtaacatacagatggaggaccctacctttaaggaaaattatcggttccacgcaatcaacggatacattatggatacactccctggccttgtgatggctcaggaccaacgaatcaggtggtacctcctcagcatgggttctaatgagaacatacactccattcacttttcaggacatgtgttcactgtccggaagaaagaagagtataagatggccctctacaatttgtatccaggcgtgtttgagaccgttgaaatgcttccctctaaagctggcatctggagagtagagtgcttgatcggagaacatcttcacgcaggtatgagcaccttgttcctcgtgtacagcaacaaatgtcagaccccacttggcatggccagtggacacattcgcgactttcagatcacagcatctggccagtatggacaatgggccccaaagttggctcgcctccattactccggtagcataaatgcgtggtccactaaagaacctttcagctggattaaggtcgatcttcttgcccccatgatcatccacggcattaagacacagggagcgaggcagaaattctcctccctctacatctcacagttcattattatgtatagtttggacggcaagaagtggcaaacttatagaggtaacagtactggaacactcatggtgttcttcggcaacgttgatagctctggcatcaaacacaacatctttaatcctcccataatagctcggtacatcagattgcatccgacccactacagcattaggagtacactccgaatggagcttatgggttgcgacttgaattcctgttcaatgccactcggaatggagtctaaagccatctctgatgcacagataaccgccagtagctactttacgaacatgtttgctacgtggtcaccctctaaggcaaggcttcatttgcaaggccggtctaatgcctggagacctcaggtgaacaacccgaaagaatggctccaggtggactttcagaagaccatgaaagtaacaggtgtcactactcagggagttaagtccttgctcaccagcatgtatgtgaaggagttccttatttcctcatcacaagatggccaccagtggaccctcttctttcagaatggtaaggtcaaagtgtttcagggcaatcaagacagcttcacacccgtggtgaacagtcttgatcctccactcttgacacgataccttcgaatccatccacagtcttgggttcaccagattgcattgcgcatggaagtacttggatgcgaggctcaggacctctac

SEQ ID NO: 118 - protein, 1457 aa, synthetic construct
  REGION 1..1457: note = Variant of human B-domain deleted Factor VIII
MQIELSTCFFLCLLRFCFSATRRYYLGAVELSWDYMQSDLGELPVDARFPPRVPKSFPFNTSVVYKKTLFVEFTDHLFNIAKPRPPWMGLLGPTIQAEVYDTVVITLKNMASHPVSLHAVGVSYWKASEGAEYDDQTSQREKEDDKVFPGGSHTYVWQVLKENGPMASDPLCLTYSYLSHVDLVKDLNSGLIGALLVCREGSLAKEKTQTLHKFILLFAVFDEGKSWHSETKNSLMQDRDAASARAWPKMHTVNGYVNRSLPGLIGCHRKSVYWHVIGMGTTPEVHSIFLEGHTFLVRNHRQASLEISPITFLTAQTLLMDLGQFLLFCHISSHQHDGMEAYVKVDSCPEEPQLRMKNNEEAEDYDDDLTDSEMDVVRFDDDNSPSFIQIRSVAKKHPKTWVHYIAAEEEDWDYAPLVLAPDDRSYKSQYLNNGPQRIGRKYKKVRFMAYTDETFKTREAIQHESGILGPLLYGEVGDTLLIIFKNQASRPYNIYPHGITDVRPLYSRRLPKGVKHLKDFPILPGEIFKYKWTVTVEDGPTKSDPRCLTRYYSSFVNMERDLASGLIGPLLICYKESVDQRGNQIMSDKRNVILFSVFDENRSWYLTENIQRFLPNPAGVQLEDPEFQASNIMHSINGYVFDSLQLSVCLHEVAYWYILSIGAQTDFLSVFFSGYTFKHKMVYEDTLTLFPFSGETVFMSMENPGLWILGCHNSDLRNRGMTALLKVSSCDKNTGDYYEDSYEDISAYLLSKNNAIEPRSFSQNPPVLKRHQREITRTTLQSDQEEIDYDDTISVEMKKEDFDIYDEDENQSPRSFQKKTRHYFIAAVERLWDYGMSSSPHVLRNRAQSGSVPQFKKVVFQEFTDGSFTQPLYRGELNEHLGLLGPYIRAEVEDNIMVTFRNQASRPYSFYSSLISYEEDQRQGAEPRKNFVKPNETKTYFWKVQHHMAPTKDEFDCKAWAYFSDVDLEKDVHSGLIGPLLVCHTNTLNPAHGRQVTVQEFALFFTIFDETKSWYFTENMERNCRAPCNIQMEDPTFKENYRFHAINGYIMDTLPGLVMAQDQRIRWYLLSMGSNENIHSIHFSGHVFTVRKKEEYKMALYNLYPGVFETVEMLPSKAGIWRVECLIGEHLHAGMSTLFLVYSNKCQTPLGMASGHIRDFQITASGQYGQWAPKLARLHYSGSINAWSTKEPFSWIKVDLLAPMIIHGIKTQGARQKFSSLYISQFIIMYSLDGKKWQTYRGNSTGTLMVFFGNVDSSGIKHNIFNPPIIARYIRLHPTHYSIRSTLRMELMGCDLNSCSMPLGMESKAISDAQITASSYFTNMFATWSPSKARLHLQGRSNAWRPQVNNPKEWLQVDFQKTMKVTGVTTQGVKSLLTSMYVKEFLISSSQDGHQWTLFFQNGKVKVFQGNQDSFTPVVNSLDPPLLTRYLRIHPQSWVHQIALRMEVLGCEAQDLY

SEQ ID NO: 119 - DNA, 4371 bp, synthetic construct
  misc_feature 1..4371: note = Variant of human B-domain deleted Factor VIII
  source 1..4371: mol_type = other DNA
atgcagattgaactgtctacctgcttcttcctctgtttgctgaggttctgctttagcgccactagacggtactaccttggcgctgtggagctgtcctgggactatatgcagagtgatttgggagagcttcccgtcgacgcacgatttcctcctcgcgttccaaaggagtttcccttcaacacaagcgtggtgtacaagaagacgctcttcgtcgaattcaccgatcacctgttcaatatcgccaaacccagaccaccatggatgggtcttttggggcctaccatacaagcggaggtgtatgacacagttgttatcactctcaagaacatggcttctcatccggtaagtcttcacgcagtgggcgtgtcctactggaaagcttcagaaggagccgagtatgatgatcagacatcccagagggagaaagaagacgacaaggtatttccaggtgggtctcatacctatgtgtggcaagtgctcaaagagaatggccctatggcaagcgatccgctctgtttgacttacagctacctttcacacgttgacctcgtcaaggacctcaactccgggttgattggagccttgttggtatgcagggaaggatctcttgccaaagagaagacacagaccctccacaagtttatccttctctttgctgtgttcgatgagggcaaaagttggcatagcgaaacgaagaattccctcatgcaggatcgcgacgcagccagcgccagagcttggcccaagatgcacactgtgaacggatatgtcaataggtcacttcctggcttgattgggtgtcatcggaaaagtgtctactggcacgtgatcggaatggggacaacaccagaggtccactccatatttctcgaaggccataccttccttgttcgaaaccacagacaggcatccttggagatctctcccattacctttctcactgcccaaacgctccttatggacttgggtcagttccttctcttctgccatatcagctcacaccagcatgatggtatggaagcttatgtgaaagtcgacagttgtcctgaggagccacagttgcgcatgaagaataatgaagaagccgaggattacgacgacgatctcaccgattctgagatggacgtggtgaggtttgatgacgacaactctccctccttcattcaaatccggagcgtggcgaagaaacaccccaagacttgggtccactatatagcggcggaagaggaggattgggattacgctcctcttgtattggcaccagatgaccgctcatacaaaagccagtacctcaacaacggaccgcagagaattggccggaagtataagaaagtgcgatttatggcctatacagacgaaacctttaagacaagggaggccatccagcatgagagtgggattttgggacctcttctttacggcgaagttggtgataccctcctcatcatcttcaagaatcaagcttctcgcccctataacatttacccacacgggatcactgacgttaggcctttgtatagcagaagacttcccaaaggcgtgaagcatctcaaagacttccccattttgccaggcgagatctttaagtacaaatggaccgtcacagtggaagatggaccgactaaatcagaccctcgatgccttacgcggtactattcctccttcgtgaatatggagagagatttggcaagcggactcataggaccactcctcatctgttacaaggaatctgtagaccagaggggtaaccagattatgagtgataaacgcaatgtgatcctttttagcgtcttcgacgagaaccggtcctggtacttgaccgagaatatacaaaggttccttcccaaccccgcaggcgttcagttggaagaccctgagtttcaggccagcaatattatgcactcaatcaacggctatgtgtttgatagtctccagctttctgtttgcctccatgaagtagcctattggtacatcttgtcaattggtgctcaaacagacttcctctccgtcttcttctccggctacacctttaagcacaagatggtgtatgaggacactctcacactctttccattttctggagaaaccgtgttcatgagcatggagaatccaggcctttggatcttgggttgccacaacagtgattttcgcaatcggggaatgactgctctcctcaaagtcagcagctgtgataagaacacaggcgactattacgaagattcttacgaggacataagtgcctacttgttgtccaagaataacgccattgagcccagatcattctcccagaatcctcccgtgcttaaaaggcatcagcgcgaaatcaccagaactactcttcagtctgatcaagaggagattgactatgacgacaccataagcgtggaaatgaagaaggaggatttcgatatctatgacgaagatgagaaccagtctccgcggagctttcagaagaagacgcgacactacttcattgcagcagtcgaaaggctttgggactacggtatgtcatcatcccctcatgtgttgcgcaatagagctcagagtggaagtgttccacagttcaagaaagtcgtctttcaagagtttacagatggcagcttcacacagcctctctatcggggcgagcttaacgaacatttgggactccttggtccctatatccgagccgaagtggaggacaacattatggttacctttaggaatcaagcctctcgcccctacagcttctactcctccctcatcagttatgaggaggatcagagacaaggcgctgaaccacggaagaactttgtgaaaccgaatgagacgaagacctacttctggaaagtacagcaccacatggcccccacaaaagacgaattcgattgcaaagcatgggcgtatttttcagacgttgacttggagaaagatgtacattcaggacttattggtcctttgttggtgtgtcacactaacactctcaatccagcccatggcaggcaggtgacagtccaggaattcgctcttttctttaccatctttgatgagaccaagtcctggtacttcacggaaaacatggagcgcaattgcagagccccctgtaacatacagatggaggaccctacctttaaggaaaattatcggttccacgcaatcaacggatacattatggatacactccctggccttgtgatggctcaggaccaacgaatcaggtggtacctcctcagcatgggttctaatgagaacatacactccattcacttttcaggacatgtgttcactgtccggaagaaagaagagtataagatggccctctacaatttgtatccaggcgtgtttgagaccgttgaaatgcttccctctaaagctggcatctggagagtagagtgcttgatcggagaacatcttcacgcaggtatgagcaccttgttcctcgtgtacagcaacaaatgtcagaccccacttggcatggccagtggacacattcgcgactttcagatcacagcatctggccagtatggacaatgggccccaaagttggctcgcctccattactccggtagcataaatgcgtggtccactaaagaacctttcagctggattaaggtcgatcttcttgcccccatgatcatccacggcattaagacacagggagcgaggcagaaattctcctccctctacatctcacagttcattattatgtatagtttggacggcaagaagtggcaaacttatagaggtaacagtactggaacactcatggtgttcttcggcaacgttgatagctctggcatcaaacacaacatctttaatcctcccataatagctcggtacatcagattgcatccgacccactacagcattaggagtacactccgaatggagcttatgggttgcgacttgaattcctgttcaatgccactcggaatggagtctaaagccatctctgatgcacagataaccgccagtagctactttacgaacatgtttgctacgtggtcaccctctaaggcaaggcttcatttgcaaggccggtctaatgcctggagacctcaggtgaacaacccgaaagaatggctccaggtggactttcagaagaccatgaaagtaacaggtgtcactactcagggagttaagtccttgctcaccagcatgtatgtgaaggagttccttatttcctcatcacaagatggccaccagtggaccctcttctttcagaatggtaaggtcaaagtgtttcagggcaatcaagacagcttcacacccgtggtgaacagtcttgatcctccactcttgacacgataccttcgaatccatccacagtcttgggttcaccagattgcattgcgcatggaagtacttggatgcgaggctcaggacctctac

SEQ ID NO: 120 - protein, 1457 aa, synthetic construct
  REGION 1..1457: note = Variant of human B-domain deleted Factor VIII
MQIELSTCFFLCLLRFCFSATRRYYLGAVELSWDYMQSDLGELPVDARFPPRVPKEFPFNTSVVYKKTLFVEFTDHLFNIAKPRPPWMGLLGPTIQAEVYDTVVITLKNMASHPVSLHAVGVSYWKASEGAEYDDQTSQREKEDDKVFPGGSHTYVWQVLKENGPMASDPLCLTYSYLSHVDLVKDLNSGLIGALLVCREGSLAKEKTQTLHKFILLFAVFDEGKSWHSETKNSLMQDRDAASARAWPKMHTVNGYVNRSLPGLIGCHRKSVYWHVIGMGTTPEVHSIFLEGHTFLVRNHRQASLEISPITFLTAQTLLMDLGQFLLFCHISSHQHDGMEAYVKVDSCPEEPQLRMKNNEEAEDYDDDLTDSEMDVVRFDDDNSPSFIQIRSVAKKHPKTWVHYIAAEEEDWDYAPLVLAPDDRSYKSQYLNNGPQRIGRKYKKVRFMAYTDETFKTREAIQHESGILGPLLYGEVGDTLLIIFKNQASRPYNIYPHGITDVRPLYSRRLPKGVKHLKDFPILPGEIFKYKWTVTVEDGPTKSDPRCLTRYYSSFVNMERDLASGLIGPLLICYKESVDQRGNQIMSDKRNVILFSVFDENRSWYLTENIQRFLPNPAGVQLEDPEFQASNIMHSINGYVFDSLQLSVCLHEVAYWYILSIGAQTDFLSVFFSGYTFKHKMVYEDTLTLFPFSGETVFMSMENPGLWILGCHNSDFRNRGMTALLKVSSCDKNTGDYYEDSYEDISAYLLSKNNAIEPRSFSQNPPVLKRHQREITRTTLQSDQEEIDYDDTISVEMKKEDFDIYDEDENQSPRSFQKKTRHYFIAAVERLWDYGMSSSPHVLRNRAQSGSVPQFKKVVFQEFTDGSFTQPLYRGELNEHLGLLGPYIRAEVEDNIMVTFRNQASRPYSFYSSLISYEEDQRQGAEPRKNFVKPNETKTYFWKVQHHMAPTKDEFDCKAWAYFSDVDLEKDVHSGLIGPLLVCHTNTLNPAHGRQVTVQEFALFFTIFDETKSWYFTENMERNCRAPCNIQMEDPTFKENYRFHAINGYIMDTLPGLVMAQDQRIRWYLLSMGSNENIHSIHFSGHVFTVRKKEEYKMALYNLYPGVFETVEMLPSKAGIWRVECLIGEHLHAGMSTLFLVYSNKCQTPLGMASGHIRDFQITASGQYGQWAPKLARLHYSGSINAWSTKEPFSWIKVDLLAPMIIHGIKTQGARQKFSSLYISQFIIMYSLDGKKWQTYRGNSTGTLMVFFGNVDSSGIKHNIFNPPIIARYIRLHPTHYSIRSTLRMELMGCDLNSCSMPLGMESKAISDAQITASSYFTNMFATWSPSKARLHLQGRSNAWRPQVNNPKEWLQVDFQKTMKVTGVTTQGVKSLLTSMYVKEFLISSSQDGHQWTLFFQNGKVKVFQGNQDSFTPVVNSLDPPLLTRYLRIHPQSWVHQIALRMEVLGCEAQDLY

SEQ ID NO: 121 - DNA, 4371 bp, synthetic construct
  misc_feature 1..4371: note = Variant of human B-domain deleted Factor VIII
  source 1..4371: mol_type = other DNA
atgcagattgaactgtctacctgcttcttcctctgtttgctgaggttctgctttagcgccactagacggtactaccttggcgctgtggagctgtcctgggactatatgcagagtgatttgggagagcttcccgtcgacgcacgatttcctcctcgcgttccaaagtcatttcccttcaacacaagcgtggtgtacaagaagacgctcttcgtcgaattcaccgatcacctgttcaatatcgccaaacccagaccaccatggatgggtcttttggggcctaccatacaagcggaggtgtatgacacagttgttatcactctcaagaacatggcttctcatccggtaagtcttcacgcagtgggcgtgtcctactggaaagcttcagaaggagccgagtatgatgatcagacatcccagagggagaaagaagacgacaaggtatttccaggtgggtctcatacctatgtgtggcaagtgctcaaagagaatggccctatggcaagcgatccgctctgtttgacttacagctacctttcacacgttgacctcgtcaaggacctcaactccgggttgattggagccttgttggtatgcagggaaggatctcttgccaaagagaagacacagaccctccacaagtttatccttctctttgctgtgttcgatgagggcaaaagttggcatagcgaaacgaagaattccctcatgcaggatcgcgacgcagccagcgccagagcttggcccaagatgcacactgtgaacggatatgtcaataggtcacttcctggcttgattgggtgtcatcggaaaagtgtctactggcacgtgatcggaatggggacaacaccagaggtccactccatatttctcgaaggccataccttccttgttcgaaaccacagacaggcatccttggagatctctcccattacctttctcactgcccaaacgctccttatggacttgggtcagttccttctcttctgccatatcagctcacaccagcatgatggtatggaagcttatgtgaaagtcgacagttgtcctgaggagccacagttgcgcatgaagaataatgaagaagccgaggattacgacgacgatctcaccgattctgagatggacgtggtgaggtttgatgacgacaactctccctccttcattcaaatccggagcgtggcgaagaaacaccccaagacttgggtccactatatagcggcggaagaggaggattgggattacgctcctcttgtattggcaccagatgaccgctcatacaaaagccagtacctcaacaacggaccgcagagaattggccggaagtataagaaagtgcgatttatggcctatacagacgaaacctttaagacaagggaggccatccagcatgagagtgggattttgggacctcttctttacggcgaagttggtgataccctcctcatcatcttcaagaatcaagcttctcgcccctataacatttacccacacgggatcactgacgttaggcctttgtatagcagaagacttcccaaaggcgtgaagcatctcaaagacttccccattttgccaggcgagatctttaagtacaaatggaccgtcacagtggaagatggaccgactaaatcagaccctcgatgccttacgcggtactattcctccttcgtgaatatggagagagatttggcaagcggactcataggaccactcctcatctgttacaaggaatctgtagaccagaggggtaaccagattatgagtgataaacgcaatgtgatcctttttagcgtcttcgacgagaaccggtcctggtacttgaccgagaatatacaaaggttccttcccaaccccgcaggcgttcagttggaagaccctgagtttcaggccagcaatattatgcactcaatcaacggctatgtgtttgatagtctccagctttctgtttgcctccatgaagtagcctattggtacatcttgtcaattggtgctcaaacagacttcctctccgtcttcttctccggctacacctttaagcacaagatggtgtatgaggacactctcacactctttccattttctggagaaaccgtgttcatgagcatggagaatccaggcctttggatcttgggttgccacaacagtgattttcgcaatcggggaatgactgctctcctcaaagtcagcagctgtgataagaacacaggcgactattacgaagattcttacgaggacataagtgcctacttgttgtccaagaataacgccattgagcccagatcattctcccagaatcctcccgtgcttaaaaggcatcagcacgaaatcaccagaactactcttcagtctgatcaagaggagattgactatgacgacaccataagcgtggaaatgaagaaggaggatttcgatatctatgacgaagatgagaaccagtctccgcggagctttcagaagaagacgcgacactacttcattgcagcagtcgaaaggctttgggactacggtatgtcatcatcccctcatgtgttgcgcaatagagctcagagtggaagtgttccacagttcaagaaagtcgtctttcaagagtttacagatggcagcttcacacagcctctctatcggggcgagcttaacgaacatttgggactccttggtccctatatccgagccgaagtggaggacaacattatggttacctttaggaatcaagcctctcgcccctacagcttctactcctccctcatcagttatgaggaggatcagagacaaggcgctgaaccacggaagaactttgtgaaaccgaatgagacgaagacctacttctggaaagtacagcaccacatggcccccacaaaagacgaattcgattgcaaagcatgggcgtatttttcagacgttgacttggagaaagatgtacattcaggacttattggtcctttgttggtgtgtcacactaacactctcaatccagcccatggcaggcaggtgacagtccaggaattcgctcttttctttaccatctttgatgagaccaagtcctggtacttcacggaaaacatggagcgcaattgcagagccccctgtaacatacagatggaggaccctacctttaaggaaaattatcggttccacgcaatcaacggatacattatggatacactccctggccttgtgatggctcaggaccaacgaatcaggtggtacctcctcagcatgggttctaatgagaacatacactccattcacttttcaggacatgtgttcactgtccggaagaaagaagagtataagatggccctctacaatttgtatccaggcgtgtttgagaccgttgaaatgcttccctctaaagctggcatctggagagtagagtgcttgatcggagaacatcttcacgcaggtatgagcaccttgttcctcgtgtacagcaacaaatgtcagaccccacttggcatggccagtggacacattcgcgactttcagatcacagcatctggccagtatggacaatgggccccaaagttggctcgcctccattactccggtagcataaatgcgtggtccactaaagaacctttcagctggattaaggtcgatcttcttgcccccatgatcatccacggcattaagacacagggagcgaggcagaaattctcctccctctacatctcacagttcattattatgtatagtttggacggcaagaagtggcaaacttatagaggtaacagtacgggaacactcatggtgttcttcggcaacgttgatagctctggcatcaaacacaacatctttaatcctcccataatagctcggtacatcagattgcatccgacccactacagcattaggagtacactccgaatggagcttatgggttgcgacttgaattcctgttcaatgccactcggaatggagtctaaagccatctctgatgcacagataaccgccagtagctactttacgaacatgtttgctacgtggtcaccctctaaggcaaggcttcatttgcaaggccggtctaatgcctggagacctcaggtgaacaacccgaaagaatggctccaggtggactttcagaagaccatgaaagtaacaggtgtcactactcagggagttaagtccttgctcaccagcatgtatgtgaaggagttccttatttcctcatcacaagatggccaccagtggaccctcttctttcagaatggtaaggtcaaagtgtttcagggcaatcaagacagcttcacacccgtggtgaacagtcttgatcctccactcttgacacgataccttcgaatccatccacagtcttgggttcaccagattgcattgcgcatggaagtacttggatgcgaggctcaggacctctac

SEQ ID NO: 122 - protein, 1457 aa, synthetic construct
  REGION 1..1457: note = Variant of human B-domain deleted Factor VIII
MQIELSTCFFLCLLRFCFSATRRYYLGAVELSWDYMQSDLGELPVDARFPPRVPKSFPFNTSVVYKKTLFVEFTDHLFNIAKPRPPWMGLLGPTIQAEVYDTVVITLKNMASHPVSLHAVGVSYWKASEGAEYDDQTSQREKEDDKVFPGGSHTYVWQVLKENGPMASDPLCLTYSYLSHVDLVKDLNSGLIGALLVCREGSLAKEKTQTLHKFILLFAVFDEGKSWHSETKNSLMQDRDAASARAWPKMHTVNGYVNRSLPGLIGCHRKSVYWHVIGMGTTPEVHSIFLEGHTFLVRNHRQASLEISPITFLTAQTLLMDLGQFLLFCHISSHQHDGMEAYVKVDSCPEEPQLRMKNNEEAEDYDDDLTDSEMDVVRFDDDNSPSFIQIRSVAKKHPKTWVHYIAAEEEDWDYAPLVLAPDDRSYKSQYLNNGPQRIGRKYKKVRFMAYTDETFKTREAIQHESGILGPLLYGEVGDTLLIIFKNQASRPYNIYPHGITDVRPLYSRRLPKGVKHLKDFPILPGEIFKYKWTVTVEDGPTKSDPRCLTRYYSSFVNMERDLASGLIGPLLICYKESVDQRGNQIMSDKRNVILFSVFDENRSWYLTENIQRFLPNPAGVQLEDPEFQASNIMHSINGYVFDSLQLSVCLHEVAYWYILSIGAQTDFLSVFFSGYTFKHKMVYEDTLTLFPFSGETVFMSMENPGLWILGCHNSDFRNRGMTALLKVSSCDKNTGDYYEDSYEDISAYLLSKNNAIEPRSFSQNPPVLKRHQHEITRTTLQSDQEEIDYDDTISVEMKKEDFDIYDEDENQSPRSFQKKTRHYFIAAVERLWDYGMSSSPHVLRNRAQSGSVPQFKKVVFQEFTDGSFTQPLYRGELNEHLGLLGPYIRAEVEDNIMVTFRNQASRPYSFYSSLISYEEDQRQGAEPRKNFVKPNETKTYFWKVQHHMAPTKDEFDCKAWAYFSDVDLEKDVHSGLIGPLLVCHTNTLNPAHGRQVTVQEFALFFTIFDETKSWYFTENMERNCRAPCNIQMEDPTFKENYRFHAINGYIMDTLPGLVMAQDQRIRWYLLSMGSNENIHSIHFSGHVFTVRKKEEYKMALYNLYPGVFETVEMLPSKAGIWRVECLIGEHLHAGMSTLFLVYSNKCQTPLGMASGHIRDFQITASGQYGQWAPKLARLHYSGSINAWSTKEPFSWIKVDLLAPMIIHGIKTQGARQKFSSLYISQFIIMYSLDGKKWQTYRGNSTGTLMVFFGNVDSSGIKHNIFNPPIIARYIRLHPTHYSIRSTLRMELMGCDLNSCSMPLGMESKAISDAQITASSYFTNMFATWSPSKARLHLQGRSNAWRPQVNNPKEWLQVDFQKTMKVTGVTTQGVKSLLTSMYVKEFLISSSQDGHQWTLFFQNGKVKVFQGNQDSFTPVVNSLDPPLLTRYLRIHPQSWVHQIALRMEVLGCEAQDLY

SEQ ID NO: 123 - DNA, 4371 bp, synthetic construct
  misc_feature 1..4371: note = Variant of human B-domain deleted Factor VIII
  source 1..4371: mol_type = other DNA
atgcagattgaactgtctacctgcttcttcctctgtttgctgaggttctgctttagcgccactagacggtactaccttggcgctgtggagctgtcctgggactatatgcagagtgatttgggagagcttcccgtcgacgcacgatttcctcctcgcgttccaaagtcatttcccttcaacacaagcgtggtgtacaagaagacgctcttcgtcgaattcaccgatcacctgttcaatatcgccaaacccagaccaccatggatgggtcttttggggcctaccatacaagcggaggtgtatgacacagttgttatcactctcaagaacatggcttctcatccggtaagtcttcacgcagtgggcgtgtcctactggaaagcttcagaaggagccgagtatgatgatcagacatcccagagggagaaagaagacgacaaggtatttccaggtgggtctcatacctatgtgtggcaagtgctcaaagagaatggccctatggcaagcgatccgctctgtttgacttacagctacctttcacacgttgacctcgtcaaggacctcaactccgggttgattggagccttgttggtatgcagggaaggatctcttgccaaagagaagacacagaccctccacaagtttatccttctctttgctgtgttcgatgagggcaaaagttggcatagcgaaacgaagaattccctcatgcaggatcgcgacgcagccagcgccagagcttggcccaagatgcacactgtgaacggatatgtcaataggtcacttcctggcttgattgggtgtcatcggaaaagtgtctactggcacgtgatcggaatggggacaacaccagaggtccactccatatttctcgaaggccataccttccttgttcgaaaccacagacaggcatccttggagatctctcccattacctttctcactgcccaaacgctccttatggacttgggtcagttccttctcttctgccatatcagctcacaccagcatgatggtatggaagcttatgtgaaagtcgacagttgtcctgaggagccacagttgcgcatgaagaataatgaagaagccgaggattacgacgacgatctcaccgattctgagatggacgtggtgaggtttgatgacgacaactctccctccttcattcaaatccggagcgtggcgaagaaacaccccaagacttgggtccactatatagcggcggaagaggaggattgggattacgctcctcttgtattggcaccagatgaccgctcatacaaaagccagtacctcaacaacggaccgcagagaattggccggaagtataagaaagtgcgatttatggcctatacagacgaaacctttaagacaagggaggccatccagcatgagagtgggattttgggacctcttctttacggcgaagttggtgataccctcctcatcatcttcaagaatcaagcttctcgcccctataacatttacccacacgggatcactgacgttaggcctttgtatagcagaagacttcccaaaggcgtgaagcatctcaaagacttccccattttgccaggcgagatctttaagtacaaatggaccgtcacagtggaagatggaccgactaaatcagaccctcgatgccttacgcggtactattcctccttcgtgaatatggagagagatttggcaagcggactcataggaccactcctcatctgttacaaggaatctgtagaccagaggggtaaccagattatgagtgataaacgcaatgtgatcctttttagcgtcttcgacgagaaccggtcctggtacttgaccgagaatatacaaaggttccttcccaaccccgcaggcgttcagttggaagaccctgagtttcaggccagcaatattatgcactcaatcaacggctatgtgtttgatagtctccagctttctgtttgcctccatgaagtagcctattggtacatcttgtcaattggtgctcaaacagacttcctctccgtcttcttctccggctacacctttaagcacaagatggtgtatgaggacactctcacactctttccattttctggagaaaccgtgttcatgagcatggagaatccaggcctttggatcttgggttgccacaacagtgattttcgcaatcggggaatgactgctctcctcaaagtcagcagctgtgataagaacattggcgactattacgaagattcttacgaggacataagtgcctacttgttgtccaagaataacgccattgagcccagatcattctcccagaatcctcccgtgcttaaaaggcatcagcgcgaaatcaccagaactactcttcagtctgatcaagaggagattgactatgacgacaccataagcgtggaaatgaagaaggaggatttcgatatctatgacgaagatgagaaccagtctccgcggagctttcagaagaagacgcgacactacttcattgcagcagtcgaaaggctttgggactacggtatgtcatcatcccctcatgtgttgcgcaatagagctcagagtggaagtgttccacagttcaagaaagtcgtctttcaagagtttacagatggcagcttcacacagcctctctatcggggcgagcttaacgaacatttgggactccttggtccctatatccgagccgaagtggaggacaacattatggttacctttaggaatcaagcctctcgcccctacagcttctactcctccctcatcagttatgaggaggatcagagacaaggcgctgaaccacggaagaactttgtgaaaccgaatgagacgaagacctacttctggaaagtacagcaccacatggcccccacaaaagacgaattcgattgcaaagcatgggcgtatttttcagacgttgacttggagaaagatgtacattcaggacttattggtcctttgttggtgtgtcacactaacactctcaatccagcccatggcaggcaggtgacagtccaggaattcgctcttttctttaccatctttgatgagaccaagtcctggtacttcacggaaaacatggagcgcaattgcagagccccctgtaacatacagatggaggaccctacctttaaggaaaattatcggttccacgcaatcaacggatacattatggatacactccctggccttgtgatggctcaggaccaacgaatcaggtggtacctcctcagcatgggttctaatgagaacatacactccattcacttttcaggacatgtgttcactgtccggaagaaagaagagtataagatggccctctacaatttgtatccaggcgtgtttgagaccgttgaaatgcttccctctaaagctggcatctggagagtagagtgcttgatcggagaacatcttcacgcaggtatgagcaccttgttcctcgtgtacagcaacaaatgtcagaccccacttggcatggccagtggacacattcgcgactttcagatcacagcatctggccagtatggacaatgggccccaaagttggctcgcctccattactccggtagcataaatgcgtggtccactaaagaacctttcagctggattaaggtcgatcttcttgcccccatgatcatccacggcattaagacacagggagcgaggcagaaattctcctccctctacatctcacagttcattattatgtatagtttggacggcaagaagtggcaaacttatagaggtaacagtactggaacactcatggtgttcttcggcaacgttgatagctctggcatcaaacacaacatctttaatcctcccataatagctcggtacatcagattgcatccgacccactacagcattaggagtacactccgaatggagcttatgggttgcgacttgaattcctgttcaatgccactcggaatggagtctaaagccatctctgatgcacagataaccgccagtagctactttacgaacatgtttgctacgtggtcaccctctaaggcaaggcttcatttgcaaggccggtctaatgcctggagacctcaggtgaacaacccgaaagaatggctccaggtggactttcagaagaccatgaaagtaacaggtgtcactactcagggagttaagtccttgctcaccagcatgtatgtgaaggagttccttatttcctcatcacaagatggccaccagtggaccctcttctttcagaatggtaaggtcaaagtgtttcagggcaatcaagacagcttcacacccgtggtgaacagtcttgatcctccactcttgacacgataccttcgaatccatccacagtcttgggttcaccagattgcattgcgcatggaagtacttggatgcgaggctcaggacctctac

SEQ ID NO: 124 - protein, 1457 aa, synthetic construct
  REGION 1..1457: note = Variant of human B-domain deleted Factor VIII
MQIELSTCFFLCLLRFCFSATRRYYLGAVELSWDYMQSDLGELPVDARFPPRVPKSFPFNTSVVYKKTLFVEFTDHLFNIAKPRPPWMGLLGPTIQAEVYDTVVITLKNMASHPVSLHAVGVSYWKASEGAEYDDQTSQREKEDDKVFPGGSHTYVWQVLKENGPMASDPLCLTYSYLSHVDLVKDLNSGLIGALLVCREGSLAKEKTQTLHKFILLFAVFDEGKSWHSETKNSLMQDRDAASARAWPKMHTVNGYVNRSLPGLIGCHRKSVYWHVIGMGTTPEVHSIFLEGHTFLVRNHRQASLEISPITFLTAQTLLMDLGQFLLFCHISSHQHDGMEAYVKVDSCPEEPQLRMKNNEEAEDYDDDLTDSEMDVVRFDDDNSPSFIQIRSVAKKHPKTWVHYIAAEEEDWDYAPLVLAPDDRSYKSQYLNNGPQRIGRKYKKVRFMAYTDETFKTREAIQHESGILGPLLYGEVGDTLLIIFKNQASRPYNIYPHGITDVRPLYSRRLPKGVKHLKDFPILPGEIFKYKWTVTVEDGPTKSDPRCLTRYYSSFVNMERDLASGLIGPLLICYKESVDQRGNQIMSDKRNVILFSVFDENRSWYLTENIQRFLPNPAGVQLEDPEFQASNIMHSINGYVFDSLQLSVCLHEVAYWYILSIGAQTDFLSVFFSGYTFKHKMVYEDTLTLFPFSGETVFMSMENPGLWILGCHNSDFRNRGMTALLKVSSCDKNIGDYYEDSYEDISAYLLSKNNAIEPRSFSQNPPVLKRHQREITRTTLQSDQEEIDYDDTISVEMKKEDFDIYDEDENQSPRSFQKKTRHYFIAAVERLWDYGMSSSPHVLRNRAQSGSVPQFKKVVFQEFTDGSFTQPLYRGELNEHLGLLGPYIRAEVEDNIMVTFRNQASRPYSFYSSLISYEEDQRQGAEPRKNFVKPNETKTYFWKVQHHMAPTKDEFDCKAWAYFSDVDLEKDVHSGLIGPLLVCHTNTLNPAHGRQVTVQEFALFFTIFDETKSWYFTENMERNCRAPCNIQMEDPTFKENYRFHAINGYIMDTLPGLVMAQDQRIRWYLLSMGSNENIHSIHFSGHVFTVRKKEEYKMALYNLYPGVFETVEMLPSKAGIWRVECLIGEHLHAGMSTLFLVYSNKCQTPLGMASGHIRDFQITASGQYGQWAPKLARLHYSGSINAWSTKEPFSWIKVDLLAPMIIHGIKTQGARQKFSSLYISQFIIMYSLDGKKWQTYRGNSTGTLMVFFGNVDSSGIKHNIFNPPIIARYIRLHPTHYSIRSTLRMELMGCDLNSCSMPLGMESKAISDAQITASSYFTNMFATWSPSKARLHLQGRSNAWRPQVNNPKEWLQVDFQKTMKVTGVTTQGVKSLLTSMYVKEFLISSSQDGHQWTLFFQNGKVKVFQGNQDSFTPVVNSLDPPLLTRYLRIHPQSWVHQIALRMEVLGCEAQDLY

SEQ ID NO: 125 - DNA, 4371 bp, synthetic construct
  misc_feature 1..4371: note = Variant of human B-domain deleted Factor VIII
  source 1..4371: mol_type = other DNA
atgcagattgaactgtctacctgcttcttcctctgtttgctgaggttctgctttagcgccactagacggtactaccttggcgctgtggagctgtcctgggactatatgcagagtgatttgggagagcttcccgtcgacgcacgatttcctcctcgcgttccaaagtcatttcccttcaacacaagcgtggtgtacaagaagacgctcttcgtcgaattcaccgatcacctgttcaatatcgccaaacccagaccaccatggatgggtcttttggggcctaccatacaagcggaggtgtatgacacagttgttatcactctcaagaacatggcttctcatccggtaagtcttcacgcagtgggcgtgtcctactggaaagcttcagaaggagccgagtatgatgatcagacatcccagagggagaaagaagacgacaaggtatttccaggtgggtctcatacctatgtgtggcaagtgctcaaagagaatggccctatggcaagcgatccgctctgtttgacttacagctacctttcacacgttgacctcgtcaaggacctcaactccgggttgattggagccttgttggtatgcagggaaggatctcttgccaaagagaagacacagaccctccacaagtttatccttctctttgctgtgttcgatgagggcaaaagttggcatagcgaaacgaagaattccctcatgcaggatcgcgacgcagccagcgccagagcttggcccaagatgcacactgtgaacggatatgtcaataggtcacttcctggcttgattgggtgtcatcggaaaagtgtctactggcacgtgatcggaatggggacaacaccagaggtccactccatatttctcgaaggccataccttccttgttcgaaaccacagacaggcatccttggagatctctcccattacctttctcactgcccaaacgctccttatggacttgggtcagttccttctcttctgccatatcagctcacaccagcatgatggtatggaagcttatgtgaaagtcgacagttgtcctgaggagccacagttgcgcatgaagtcgaatgaagaagccgaggattacgacgacgatctcaccgattctgagatggacgtggtgaggtttgatgacgacaactctccctccttcattcaaatccggagcgtggcgaagaaacaccccaagacttgggtccactatatagcggcggaagaggaggattgggattacgctcctcttgtattggcaccagatgaccgctcatacaaaagccagtacctcaacaacggaccgcagagaattggccggaagtataagaaagtgcgatttatggcctatacagacgaaacctttaagacaagggaggccatccagcatgagagtgggattttgggacctcttctttacggcgaagttggtgataccctcctcatcatcttcaagaatcaagcttctcgcccctataacatttacccacacgggatcactgacgttaggcctttgtatagcagaagacttcccaaaggcgtgaagcatctcaaagacttccccattttgccaggcgagatctttaagtacaaatggaccgtcacagtggaagatggaccgactaaatcagaccctcgatgccttacgcggtactattcctccttcgtgaatatggagagagatttggcaagcggactcataggaccactcctcatctgttacaaggaatctgtagaccagaggggtaaccagattatgagtgataaacgcaatgtgatcctttttagcgtcttcgacgagaaccggtcctggtacttgaccgagaatatacaaaggttccttcccaaccccgcaggcgttcagttggaagaccctgagtttcaggccagcaatattatgcactcaatcaacggctatgtgtttgatagtctccagctttctgtttgcctccatgaagtagcctattggtacatcttgtcaattggtgctcaaacagacttcctctccgtcttcttctccggctacacctttaagcacaagatggtgtatgaggacactctcacactctttccattttctggagaaaccgtgttcatgagcatggagaatccaggcctttggatcttgggttgccacaacagtgattttcgcaatcggggaatgactgctctcctcaaagtcagcagctgtgataagaacacaggcgactattacgaagattcttacgaggacataagtgcctacttgttgtccaagaataacgccattgagcccagatcattctcccagaatcctcccgtgcttaaaaggcatcagcgcgaaatcaccagaactactcttcagtctgatcaagaggagattgactatgacgacaccataagcgtggaaatgaagaaggaggatttcgatatctatgacgaagatgagaaccagtctccgcggagctttcagaagaagacgcgacactacttcattgcagcagtcgaaaggctttgggactacggtatgtcatcatcccctcatgtgttgcgcaatagagctcagagtggaagtgttccacagttcaagaaagtcgtctttcaagagtttacagatggcagcttcacacagcctctctatcggggcgagcttaacgaacatttgggactccttggtccctatatccgagccgaagtggaggacaacattatggttacctttaggaatcaagcctctcgcccctacagcttctactcctccctcatcagttatgaggaggatcagagacaaggcgctgaaccacggaagaactttgtgaaaccgaatgagacgaagacctacttctggaaagtacagcaccacatggcccccacaaaagacgaattcgattgcaaagcatgggcgtatttttcagacgttgacttggagaaagatgtacattcaggacttattggtcctttgttggtgtgtcacactaacactctcaatccagcccatggcaggcaggtgacagtccaggaattcgctcttttctttaccatctttgatgagaccaagtcctggtacttcacggaaaacatggagcgcaattgcagagccccctgtaacatacagatggaggaccctacctttaaggaaaattatcggttccacgcaatcaacggatacattatggatacactccctggccttgtgatggctcaggaccaacgaatcaggtggtacctcctcagcatgggttctaatgagaacatacactccattcacttttcaggacatgtgttcactgtccggaagaaagaagagtataagatggccctctacaatttgtatccaggcgtgtttgagaccgttgaaatgcttccctctaaagctggcatctggagagtagagtgcttgatcggagaacatcttcacgcaggtatgagcaccttgttcctcgtgtacagcaacaaatgtcagaccccacttggcatggccagtggacacattcgcgactttcagatcacagcatctggccagtatggacaatgggccccaaagttggctcgcctccattactccggtagcataaatgcgtggtccactaaagaacctttcagctggattaaggtcgatcttcttgcccccatgatcatccacggcattaagacacagggagcgaggcagaaattctcctccctctacatctcacagttcattattatgtatagtttggacggcaagaagtggcaaacttatagaggtaacagtactggaacactcatggtgttcttcggcaacgttgatagctctggcatcaaacacaacatctttaatcctcccataatagctcggtacatcagattgcatccgacccactacagcattaggagtacactccgaatggagcttatgggttgcgacttgaattcctgttcaatgccactcggaatggagtctaaagccatctctgatgcacagataaccgccagtagctactttacgaacatgtttgctacgtggtcaccctctaaggcaaggcttcatttgcaaggccggtctaatgcctggagacctcaggtgaacaacccgaaagaatggctccaggtggactttcagaagaccatgaaagtaacaggtgtcactactcagggagttaagtccttgctcaccagcatgtatgtgaaggagttccttatttcctcatcacaagatggccaccagtggaccctcttctttcagaatggtaaggtcaaagtgtttcagggcaatcaagacagcttcacacccgtggtgaacagtcttgatcctccactcttgacacgataccttcgaatccatccacagtcttgggttcaccagattgcattgcgcatggaagtacttggatgcgaggctcaggacctctac

SEQ ID NO: 126 - protein, 1457 aa, synthetic construct
  REGION 1..1457: note = Variant of human B-domain deleted Factor VIII
MQIELSTCFFLCLLRFCFSATRRYYLGAVELSWDYMQSDLGELPVDARFPPRVPKSFPFNTSVVYKKTLFVEFTDHLFNIAKPRPPWMGLLGPTIQAEVYDTVVITLKNMASHPVSLHAVGVSYWKASEGAEYDDQTSQREKEDDKVFPGGSHTYVWQVLKENGPMASDPLCLTYSYLSHVDLVKDLNSGLIGALLVCREGSLAKEKTQTLHKFILLFAVFDEGKSWHSETKNSLMQDRDAASARAWPKMHTVNGYVNRSLPGLIGCHRKSVYWHVIGMGTTPEVHSIFLEGHTFLVRNHRQASLEISPITFLTAQTLLMDLGQFLLFCHISSHQHDGMEAYVKVDSCPEEPQLRMKSNEEAEDYDDDLTDSEMDVVRFDDDNSPSFIQIRSVAKKHPKTWVHYIAAEEEDWDYAPLVLAPDDRSYKSQYLNNGPQRIGRKYKKVRFMAYTDETFKTREAIQHESGILGPLLYGEVGDTLLIIFKNQASRPYNIYPHGITDVRPLYSRRLPKGVKHLKDFPILPGEIFKYKWTVTVEDGPTKSDPRCLTRYYSSFVNMERDLASGLIGPLLICYKESVDQRGNQIMSDKRNVILFSVFDENRSWYLTENIQRFLPNPAGVQLEDPEFQASNIMHSINGYVFDSLQLSVCLHEVAYWYILSIGAQTDFLSVFFSGYTFKHKMVYEDTLTLFPFSGETVFMSMENPGLWILGCHNSDFRNRGMTALLKVSSCDKNTGDYYEDSYEDISAYLLSKNNAIEPRSFSQNPPVLKRHQREITRTTLQSDQEEIDYDDTISVEMKKEDFDIYDEDENQSPRSFQKKTRHYFIAAVERLWDYGMSSSPHVLRNRAQSGSVPQFKKVVFQEFTDGSFTQPLYRGELNEHLGLLGPYIRAEVEDNIMVTFRNQASRPYSFYSSLISYEEDQRQGAEPRKNFVKPNETKTYFWKVQHHMAPTKDEFDCKAWAYFSDVDLEKDVHSGLIGPLLVCHTNTLNPAHGRQVTVQEFALFFTIFDETKSWYFTENMERNCRAPCNIQMEDPTFKENYRFHAINGYIMDTLPGLVMAQDQRIRWYLLSMGSNENIHSIHFSGHVFTVRKKEEYKMALYNLYPGVFETVEMLPSKAGIWRVECLIGEHLHAGMSTLFLVYSNKCQTPLGMASGHIRDFQITASGQYGQWAPKLARLHYSGSINAWSTKEPFSWIKVDLLAPMIIHGIKTQGARQKFSSLYISQFIIMYSLDGKKWQTYRGNSTGTLMVFFGNVDSSGIKHNIFNPPIIARYIRLHPTHYSIRSTLRMELMGCDLNSCSMPLGMESKAISDAQITASSYFTNMFATWSPSKARLHLQGRSNAWRPQVNNPKEWLQVDFQKTMKVTGVTTQGVKSLLTSMYVKEFLISSSQDGHQWTLFFQNGKVKVFQGNQDSFTPVVNSLDPPLLTRYLRIHPQSWVHQIALRMEVLGCEAQDLY

SEQ ID NO: 127 - DNA, 4371 bp, synthetic construct
  misc_feature 1..4371: note = Variant of human B-domain deleted Factor VIII
  source 1..4371: mol_type = other DNA
atgcagattgaactgtctacctgcttcttcctctgtttgctgaggttctgctttagcgccactagacggtactaccttggcgctgtggagctgtcctgggactatatgcagagtgatttgggagagcttcccgtcgacgcacgatttcctcctcgcgttccaaagtcatttcccttcaacacaagcgtggtgtacaagaagacgctcttcgtcgaattcaccgatcacctgttcaatatcgccaaacccagaccaccatggatgggtcttttggggcctaccatacaagcggaggtgtatgacacagttgttatcactctcaagaacatggcttctcatccggtaagtcttcacgcagtgggcgtgtcctactggaaagcttcagaaggagccgagtatgatgatcagacatcccagagggagaaagaagacgacaaggtatttccaggtgggtctcatacctatgtgtggcaagtgctcaaagagaatggccctatggcaagcgatccgctctgtttgacttacagctacctttcacacgttgacctcgtcaaggacctcaactccgggttgattggagccttgttggtatgcagggaaggatctcttgccaaagagaagacacagaccctccacaagtttatccttctctttgctgtgttcgatgagggcaaaagttggcatagcgaaacgaagaattccctcatgcaggatcgcgacgcagccagcgccagagcttggcccaagatgcacactgtgaacggatatgtcaataggtcacttcctggcttgattgggtgtcatcggaaaagtgtctactggcacgtgatcggaatggggacaacaccagaggtccactccatatttctcgaaggccataccttccttgttcgaaaccacagacaggcatccttggagatctctcccattacctttctcactgcccaaacgctccttatggacttgggtcagttccttctcttctgccatatcagctcacaccctcatgatggtatggaagcttatgtgaaagtcgacagttgtcctgaggagccacagttgcgcatgaagaataatgaagaagccgaggattacgacgacgatctcaccgattctgagatggacgtggtgaggtttgatgacgacaactctccctccttcattcaaatccggagcgtggcgaagaaacaccccaagacttgggtccactatatagcggcggaagaggaggattgggattacgctcctcttgtattggcaccagatgaccgctcatacaaaagccagtacctcaacaacggaccgcagagaattggccggaagtataagaaagtgcgatttatggcctatacagacgaaacctttaagacaagggaggccatccagcatgagagtgggattttgggacctcttctttacggcgaagttggtgataccctcctcatcatcttcaagaatcaagcttctcgcccctataacatttacccacacgggatcactgacgttaggcctttgtatagcagaagacttcccaaaggcgtgaagcatctcaaagacttccccattttgccaggcgagatctttaagtacaaatggaccgtcacagtggaagatggaccgactaaatcagaccctcgatgccttacgcggtactattcctccttcgtgaatatggagagagatttggcaagcggactcataggaccactcctcatctgttacaaggaatctgtagaccagaggggtaaccagattatgagtgataaacgcaatgtgatcctttttagcgtcttcgacgagaaccggtcctggtacttgaccgagaatatacaaaggttccttcccaaccccgcaggcgttcagttggaagaccctgagtttcaggccagcaatattatgcactcaatcaacggctatgtgtttgatagtctccagctttctgtttgcctccatgaagtagcctattggtacatcttgtcaattggtgctcaaacagacttcctctccgtcttcttctccggctacacctttaagcacaagatggtgtatgaggacactctcacactctttccattttctggagaaaccgtgttcatgagcatggagaatccaggcctttggatcttgggttgccacaacagtgattttcgcaatcggggaatgactgctctcctcaaagtcagcagctgtgataagaacacaggcgactattacgaagattcttacgaggacataagtgcctacttgttgtccaagaataacgccattgagcccagatcattctcccagaatcctcccgtgcttaaaaggcatcagcgcgaaatcaccagaactactcttcagtctgatcaagaggagattgactatgacgacaccataagcgtggaaatgaagaaggaggatttcgatatctatgacgaagatgagaaccagtctccgcggagctttcagaagaagacgcgacactacttcattgcagcagtcgaaaggctttgggactacggtatgtcatcatcccctcatgtgttgcgcaatagagctcagagtggaagtgttccacagttcaagaaagtcgtctttcaagagtttacagatggcagcttcacacagcctctctatcggggcgagcttaacgaacatttgggactccttggtccctatatccgagccgaagtggaggacaacattatggttacctttaggaatcaagcctctcgcccctacagcttctactcctccctcatcagttatgaggaggatcagagacaaggcgctgaaccacggaagaactttgtgaaaccgaatgagacgaagacctacttctggaaagtacagcaccacatggcccccacaaaagacgaattcgattgcaaagcatgggcgtatttttcagacgttgacttggagaaagatgtacattcaggacttattggtcctttgttggtgtgtcacactaacactctcaatccagcccatggcaggcaggtgacagtccaggaattcgctcttttctttaccatctttgatgagaccaagtcctggtacttcacggaaaacatggagcgcaattgcagagccccctgtaacatacagatggaggaccctacctttaaggaaaattatcggttccacgcaatcaacggatacattatggatacactccctggccttgtgatggctcaggaccaacgaatcaggtggtacctcctcagcatgggttctaatgagaacatacactccattcacttttcaggacatgtgttcactgtccggaagaaagaagagtataagatggccctctacaatttgtatccaggcgtgtttgagaccgttgaaatgcttccctctaaagctggcatctggagagtagagtgcttgatcggagaacatcttcacgcaggtatgagcaccttgttcctcgtgtacagcaacaaatgtcagaccccacttggcatggccagtggacacattcgcgactttcagatcacagcatctggccagtatggacaatgggccccaaagttggctcgcctccattactccggtagcataaatgcgtggtccactaaagaacctttcagctggattaaggtcgatcttcttgcccccatgatcatccacggcattaagacacagggagcgaggcagaaattctcctccctctacatctcacagttcattattatgtatagtttggacggcaagaagtggcaaacttatagaggtaacagtactggaacactcatggtgttcttcggcaacgttgatagctctggcatcaaacacaacatctttaatcctcccataatagctcggtacatcagattgcatccgacccactacagcattaggagtacactccgaatggagcttatgggttgcgacttgaattcctgttcaatgccactcggaatggagtctaaagccatctctgatgcacagataaccgccagtagctactttacgaacatgtttgctacgtggtcaccctctaaggcaaggcttcatttgcaaggccggtctaatgcctggagacctcaggtgaacaacccgaaagaatggctccaggtggactttcagaagaccatgaaagtaacaggtgtcactactcagggagttaagtccttgctcaccagcatgtatgtgaaggagttccttatttcctcatcacaagatggccaccagtggaccctcttctttcagaatggtaaggtcaaagtgtttcagggcaatcaagacagcttcacacccgtggtgaacagtcttgatcctccactcttgacacgataccttcgaatccatccacagtcttgggttcaccagattgcattgcgcatggaagtacttggatgcgaggctcaggacctctac

SEQ ID NO: 128 - protein, 1457 aa, synthetic construct
  REGION 1..1457: note = Variant of human B-domain deleted Factor VIII
MQIELSTCFFLCLLRFCFSATRRYYLGAVELSWDYMQSDLGELPVDARFPPRVPKSFPFNTSVVYKKTLFVEFTDHLFNIAKPRPPWMGLLGPTIQAEVYDTVVITLKNMASHPVSLHAVGVSYWKASEGAEYDDQTSQREKEDDKVFPGGSHTYVWQVLKENGPMASDPLCLTYSYLSHVDLVKDLNSGLIGALLVCREGSLAKEKTQTLHKFILLFAVFDEGKSWHSETKNSLMQDRDAASARAWPKMHTVNGYVNRSLPGLIGCHRKSVYWHVIGMGTTPEVHSIFLEGHTFLVRNHRQASLEISPITFLTAQTLLMDLGQFLLFCHISSHPHDGMEAYVKVDSCPEEPQLRMKNNEEAEDYDDDLTDSEMDVVRFDDDNSPSFIQIRSVAKKHPKTWVHYIAAEEEDWDYAPLVLAPDDRSYKSQYLNNGPQRIGRKYKKVRFMAYTDETFKTREAIQHESGILGPLLYGEVGDTLLIIFKNQASRPYNIYPHGITDVRPLYSRRLPKGVKHLKDFPILPGEIFKYKWTVTVEDGPTKSDPRCLTRYYSSFVNMERDLASGLIGPLLICYKESVDQRGNQIMSDKRNVILFSVFDENRSWYLTENIQRFLPNPAGVQLEDPEFQASNIMHSINGYVFDSLQLSVCLHEVAYWYILSIGAQTDFLSVFFSGYTFKHKMVYEDTLTLFPFSGETVFMSMENPGLWILGCHNSDFRNRGMTALLKVSSCDKNTGDYYEDSYEDISAYLLSKNNAIEPRSFSQNPPVLKRHQREITRTTLQSDQEEIDYDDTISVEMKKEDFDIYDEDENQSPRSFQKKTRHYFIAAVERLWDYGMSSSPHVLRNRAQSGSVPQFKKVVFQEFTDGSFTQPLYRGELNEHLGLLGPYIRAEVEDNIMVTFRNQASRPYSFYSSLISYEEDQRQGAEPRKNFVKPNETKTYFWKVQHHMAPTKDEFDCKAWAYFSDVDLEKDVHSGLIGPLLVCHTNTLNPAHGRQVTVQEFALFFTIFDETKSWYFTENMERNCRAPCNIQMEDPTFKENYRFHAINGYIMDTLPGLVMAQDQRIRWYLLSMGSNENIHSIHFSGHVFTVRKKEEYKMALYNLYPGVFETVEMLPSKAGIWRVECLIGEHLHAGMSTLFLVYSNKCQTPLGMASGHIRDFQITASGQYGQWAPKLARLHYSGSINAWSTKEPFSWIKVDLLAPMIIHGIKTQGARQKFSSLYISQFIIMYSLDGKKWQTYRGNSTGTLMVFFGNVDSSGIKHNIFNPPIIARYIRLHPTHYSIRSTLRMELMGCDLNSCSMPLGMESKAISDAQITASSYFTNMFATWSPSKARLHLQGRSNAWRPQVNNPKEWLQVDFQKTMKVTGVTTQGVKSLLTSMYVKEFLISSSQDGHQWTLFFQNGKVKVFQGNQDSFTPVVNSLDPPLLTRYLRIHPQSWVHQIALRMEVLGCEAQDLY

SEQ ID NO: 129 - DNA, 4371 bp, synthetic construct
  misc_feature 1..4371: note = Variant of human B-domain deleted Factor VIII
  source 1..4371: mol_type = other DNA
atgcagattgaactgtctacctgcttcttcctctgtttgctgaggttctgctttagcgccactagacggtactaccttggcgctgtggagctgtcctgggactatatgcagagtgatttgggagagcttcccgtcgacgcacgatttcctcctcgcgttccaaagtcatttccccagaacacaagcgtggtgtacaagaagacgctcttcgtcgaattcaccgatcacctgttcaatatcgccaaacccagaccaccatggatgggtcttttggggcctaccatacaagcggaggtgtatgacacagttgttatcactctcaagaacatggcttctcatccggtaagtcttcacgcagtgggcgtgtcctactggaaagcttcagaaggagccgagtatgatgatcagacatcccagagggagaaagaagacgacaaggtatttccaggtgggtctcatacctatgtgtggcaagtgctcaaagagaatggccctatggcaagcgatccgctctgtttgacttacagctacctttcacacgttgacctcgtcaaggacctcaactccgggttgattggagccttgttggtatgcagggaaggatctcttgccaaagagaagacacagaccctccacaagtttatcctcctctttgctgtgttcgatgagggcaaaagttggcatagcgaaacgaagaattccctcatgcaggatcgcgacgcagccagcgccagagcttggcccaagatgcacactgtgaacggatatgtcaataggtcacttcctggcttgattgggtgtcatcggaaaagtgtctactggcacgtgatcggaatggggacaacaccagaggtccactccatatttctcgaaggccataccttccttgttcgaaaccacagacaggcatccttggagatctctcccattacctttctcactgcccaaacgctccttatggacttgggtcagttccttctcttctgccatatcagctcacaccagcatgatggtatggaagcttatgtgaaagtcgacagttgtcctgaggagccacagttgcgcatgaagaataatgaagaagccgaggattacgacgacgatctcaccgattctgagatggacgtggtgaggtttgatgacgacaactctccctccttcattcaaatccggagcgtggcgaagaaacaccccaagacttgggtccactatatagcggcggaagaggaggattgggattacgctcctcttgtattggcaccagatgaccgctcatacaaaagccagtacctcaacaacggaccgcagagaattggccggaagtataagaaagtgcgatttatggcctatacagacgaaacctttaagacaagggaggccatccagcatgagagtgggattttgggacctcttctttacggcgaagttggtgataccctcctcatcatcttcaagaatcaagcttctcgcccctataacatttacccacacgggatcactgacgttaggcctttgtatagcagaagacttcccaaaggcgtgaagcatctcaaagacttccccattttgccaggcgagatctttaagtacaaatggaccgtcacagtggaagatggaccgactaaatcagaccctcgatgccttacgcggtactattcctccttcgtgaatatggagagagatttggcaagcggactcataggaccactcctcatctgttacaaggaatctgtagaccagaggggtaaccagattatgagtgataaacgcaatgtgatcctttttagcgtcttcgacgagaaccggtcctggtacttgaccgagaatatacaaaggttccttcccaaccccgcaggcgttcagttggaagaccctgagtttcaggccagcaatattatgcactcaatcaacggctatgtgtttgatagtctccagctttctgtttgcctccatgaagtagcctattggtacatcttgtcaattggtgctcaaacagacttcctctccgtcttcttctccggctacacctttaagcacaagatggtgtatgaggacactctcacactctttccattttctggagaaaccgtgttcatgagcatggagaatccaggcctttggatcttgggttgccacaacagtgattttcgcaatcggggaatgactgctctcctcaaagtcagcagctgtgataagaacacaggcgactattacgaagattcttacgaggacataagtgcctacttgttgtccaagaataacgccattgagcccagatcattctcccagaatcctcccgtgcttaaaaggcatcagcgcgaaatcaccagaactactcttcagtctgatcaagaggagattgactatgacgacaccataagcgtggaaatgaagaaggaggatttcgatatctatgacgaagatgagaaccagtctccgcggagctttcagaagaagacgcgacactacttcattgcagcagtcgaaaggctttgggactacggtatgtcatcatcccctcatgtgttgcgcaatagagctcagagtggaagtgttccacagttcaagaaagtcgtctttcaagagtttacagatggcagcttcacacagcctctctatcggggcgagcttaacgaacatttgggactccttggtccctatatccgagccgaagtggaggacaacattatggttacctttaggaatcaagcctctcgcccctacagcttctactcctccctcatcagttatgaggaggatcagagacaaggcgctgaaccacggaagaactttgtgaaaccgaatgagacgaagacctacttctggaaagtacagcaccacatggcccccacaaaagacgaattcgattgcaaagcatgggcgtatttttcagacgttgacttggagaaagatgtacattcaggacttattggtcctttgttggtgtgtcacactaacactctcaatccagcccatggcaggcaggtgacagtccaggaattcgctcttttctttaccatctttgatgagaccaagtcctggtacttcacggaaaacatggagcgcaattgcagagccccctgtaacatacagatggaggaccctacctttaaggaaaattatcggttccacgcaatcaacggatacattatggatacactccctggccttgtgatggctcaggaccaacgaatcaggtggtacctcctcagcatgggttctaatgagaacatacactccattcacttttcaggacatgtgttcactgtccggaagaaagaagagtataagatggccctctacaatttgtatccaggcgtgtttgagaccgttgaaatgcttccctctaaagctggcatctggagagtagagtgcttgatcggagaacatcttcacgcaggtatgagcaccttgttcctcgtgtacagcaacaaatgtcagaccccacttggcatggccagtggacacattcgcgactttcagatcacagcatctggccagtatggacaatgggccccaaagttggctcgcctccattactccggtagcataaatgcgtggtccactaaagaacctttcagctggattaaggtcgatcttcttgcccccatgatcatccacggcattaagacacagggagcgaggcagaaattctcctccctctacatctcacagttcattattatgtatagtttggacggcaagaagtggcaaacttatagaggtaacagtactggaacactcatggtgttcttcggcaacgttgatagctctggcatcaaacacaacatctttaatcctcccataatagctcggtacatcagattgcatccgacccactacagcattaggagtacactccgaatggagcttatgggttgcgacttgaattcctgttcaatgccactcggaatggagtctaaagccatctctgatgcacagataaccgccagtagctactttacgaacatgtttgctacgtggtcaccctctaaggcaaggcttcatttgcaaggccggtctaatgcctggagacctcaggtgaacaacccgaaagaatggctccaggtggactttcagaagaccatgaaagtaacaggtgtcactactcagggagttaagtccttgctcaccagcatgtatgtgaaggagttccttatttcctcatcacaagatggccaccagtggaccctcttctttcagaatggtaaggtcaaagtgtttcagggcaatcaagacagcttcacacccgtggtgaacagtcttgatcctccactcttgacacgataccttcgaatccatccacagtcttgggttcaccagattgcattgcgcatggaagtacttggatgcgaggctcaggacctctac

SEQ ID NO: 130 - protein, 1457 aa, synthetic construct
  REGION 1..1457: note = Variant of human B-domain deleted Factor VIII
MQIELSTCFFLCLLRFCFSATRRYYLGAVELSWDYMQSDLGELPVDARFPPRVPKSFPQNTSVVYKKTLFVEFTDHLFNIAKPRPPWMGLLGPTIQAEVYDTVVITLKNMASHPVSLHAVGVSYWKASEGAEYDDQTSQREKEDDKVFPGGSHTYVWQVLKENGPMASDPLCLTYSYLSHVDLVKDLNSGLIGALLVCREGSLAKEKTQTLHKFILLFAVFDEGKSWHSETKNSLMQDRDAASARAWPKMHTVNGYVNRSLPGLIGCHRKSVYWHVIGMGTTPEVHSIFLEGHTFLVRNHRQASLEISPITFLTAQTLLMDLGQFLLFCHISSHQHDGMEAYVKVDSCPEEPQLRMKNNEEAEDYDDDLTDSEMDVVRFDDDNSPSFIQIRSVAKKHPKTWVHYIAAEEEDWDYAPLVLAPDDRSYKSQYLNNGPQRIGRKYKKVRFMAYTDETFKTREAIQHESGILGPLLYGEVGDTLLIIFKNQASRPYNIYPHGITDVRPLYSRRLPKGVKHLKDFPILPGEIFKYKWTVTVEDGPTKSDPRCLTRYYSSFVNMERDLASGLIGPLLICYKESVDQRGNQIMSDKRNVILFSVFDENRSWYLTENIQRFLPNPAGVQLEDPEFQASNIMHSINGYVFDSLQLSVCLHEVAYWYILSIGAQTDFLSVFFSGYTFKHKMVYEDTLTLFPFSGETVFMSMENPGLWILGCHNSDFRNRGMTALLKVSSCDKNTGDYYEDSYEDISAYLLSKNNAIEPRSFSQNPPVLKRHQREITRTTLQSDQEEIDYDDTISVEMKKEDFDIYDEDENQSPRSFQKKTRHYFIAAVERLWDYGMSSSPHVLRNRAQSGSVPQFKKVVFQEFTDGSFTQPLYRGELNEHLGLLGPYIRAEVEDNIMVTFRNQASRPYSFYSSLISYEEDQRQGAEPRKNFVKPNETKTYFWKVQHHMAPTKDEFDCKAWAYFSDVDLEKDVHSGLIGPLLVCHTNTLNPAHGRQVTVQEFALFFTIFDETKSWYFTENMERNCRAPCNIQMEDPTFKENYRFHAINGYIMDTLPGLVMAQDQRIRWYLLSMGSNENIHSIHFSGHVFTVRKKEEYKMALYNLYPGVFETVEMLPSKAGIWRVECLIGEHLHAGMSTLFLVYSNKCQTPLGMASGHIRDFQITASGQYGQWAPKLARLHYSGSINAWSTKEPFSWIKVDLLAPMIIHGIKTQGARQKFSSLYISQFIIMYSLDGKKWQTYRGNSTGTLMVFFGNVDSSGIKHNIFNPPIIARYIRLHPTHYSIRSTLRMELMGCDLNSCSMPLGMESKAISDAQITASSYFTNMFATWSPSKARLHLQGRSNAWRPQVNNPKEWLQVDFQKTMKVTGVTTQGVKSLLTSMYVKEFLISSSQDGHQWTLFFQNGKVKVFQGNQDSFTPVVNSLDPPLLTRYLRIHPQSWVHQIALRMEVLGCEAQDLY

SEQ ID NO: 131 - DNA, 4371 bp, synthetic construct
  misc_feature 1..4371: note = Variant of human B-domain deleted Factor VIII
  source 1..4371: mol_type = other DNA
atgcagattgaactgtctacctgcttcttcctctgtttgctgaggttctgctttagcgccactagacggtactaccttggcgctgtggagctgtcctgggactatatgcagagtgatttgggagagcttcccgtcgacgcacgatttcctcctcgcgttccaaagtcatttcccttcaacacaagcgtggtgtacaagaagacgctcttcgtcgaattcaccgatcacctgttcaatatcgccaaacccagaccaccatggatgggtcttttggggcctaccatacaagcggaggtgtatgacacagttgttatcactctcaagaacatggcttctcatccggtaagtcttcacgcagtgggcgtgtcctactggaaagcttcagaaggagccgagtatgatgatcagacatcccagagggagaaagaagacgacaaggtatttccaggtgggtctcatacctatgtgtggcaagtgctcaaagagaatggccctatggcaagcgatccgctctgtttgacttacagctacctttcacacgttgacctcgtcaaggacctcaactccgggttgattggagccttgttggtatgcagggaaggatctcttgccaaagagaagacacagaccctccacaagtttatccttctctttgctgtgttcgatgagggcaaaagttggcatagcgaaacgaagaattccctcatgcaggatcgcgacgcagccagcgccagagcttggcccaagatgcacactgtgaacggatatgtcaataggtcacttcctggcttgattgggtgtcatcggaaaagtgtctactggcacgtgatcggaatggggacaacaccagaggtccactccatatttctcgaaggccataccttccttgttcgaaaccacagacaggcatccttggagatctctcccattacctttctcactgcccaaacgctccttatggacttgggtcagttccttctcttctgccatatcagctcacaccagcatgatggtatggaagcttatgtgaaagtcgacagttgtcctgaggagccacagttgcgcatgaagaataatgaagaagccgaggattacgacgacgatctcaccgattctgagatggacgtggtgaggtttgatgacgacaactctccctccttcattcaaatccggagcgtggcgaagaaacaccccaagacttgggtccactatatagcggcggaagaggaggattgggattacgctcctcttgtattggcaccagatgaccgctcatacaaaagccagtacctcaacaacggaccgcagagaattggccggaagtataagaaagtgcgatttatggcctatacagacgaaacctttaagacaagggaggccatccagcatgagagtgggattttgggacctcttctttacggcgaagttggtgataccctcctcatcatcttcaagaatcaagcttctcgcccctataacatttacccacacgggatcactgacgttaggcctttgtatagcagaagacttcccaaaggcgtgaagcatctcaaagacttccccattttgccaggcgagatctttaagtacaaatggaccgtcacagtggaagatggaccgactaaatcagaccctcgatgccttacgcggtactattcctccttcgtgaatatggagagagatttggcaagcggactcataggaccactcctcatctgttacaaggaatctgtagaccagaggggtaaccagattatgagtgataaacgcaatgtgatcctttttagcgtcttcgacgagaaccggtcctggtacttgaccgagaatatacaaaggttccttcccaaccccgcaggcgttcagttggaagaccctgagtttcaggccagcaatattatgcactcaatcaacggctatgtgtttgatagtctccagctttctgtttgcctccatgaagtagcctattggtacatcttgtcaattggtgctcaaacagacttcctctccgtcttcttctccggctacacctttaagcacaagatggtgtatgaggacactctcacactctttccattttctggagaaaccgtgttcatgagcatggagaatccaggcctttggatcttgggttgccacaacagtgattttcgcaatcggggaatgactgctctcctcaaagtcagcacttgtgataagaacacaggcgactattacgaagattcttacgaggacataagtgcctacttgttgtccaagaataacgccattgagcccagatcattctcccagaatcctcccgtgcttaaaaggcatcagcgcgaaatcaccagaactactcttcagtctgatcaagaggagattgactatgacgacaccataagcgtggaaatgaagaaggaggatttcgatatctatgacgaagatgagaaccagtctccgcggagctttcagaagaagacgcgacactacttcattgcagcagtcgaaaggctttgggactacggtatgtcatcatcccctcatgtgttgcgcaatagagctcagagtggaagtgttccacagttcaagaaagtcgtctttcaagagtttacagatggcagcttcacacagcctctctatcggggcgagcttaacgaacatttgggactccttggtccctatatccgagccgaagtggaggacaacattatggttacctttaggaatcaagcctctcgcccctacagcttctactcctccctcatcagttatgaggaggatcagagacaaggcgctgaaccacggaagaactttgtgaaaccgaatgagacgaagacctacttctggaaagtacagcaccacatggcccccacaaaagacgaattcgattgcaaagcatgggcgtatttttcagacgttgacttggagaaagatgtacattcaggacttattggtcctttgttggtgtgtcacactaacactctcaatccagcccatggcaggcaggtgacagtccaggaattcgctcttttctttaccatctttgatgagaccaagtcctggtacttcacggaaaacatggagcgcaattgcagagccccctgtaacatacagatggaggaccctacctttaaggaaaattatcggttccacgcaatcaacggatacattatggatacactccctggccttgtgatggctcaggaccaacgaatcaggtggtacctcctcagcatgggttctaatgagaacatacactccattcacttttcaggacatgtgttcactgtccggaagaaagaagagtataagatggccctctacaatttgtatccaggcgtgtttgagaccgttgaaatgcttccctctaaagctggcatctggagagtagagtgcttgatcggagaacatcttcacgcaggtatgagcaccttgttcctcgtgtacagcaacaaatgtcagaccccacttggcatggccagtggacacattcgcgactttcagatcacagcatctggccagtatggacaatgggccccaaagttggctcgcctccattactccggtagcataaatgcgtggtccactaaagaacctttcagctggattaaggtcgatcttcttgcccccatgatcatccacggcattaagacacagggagcgaggcagaaattctcctccctctacatctcacagttcattattatgtatagtttggacggcaagaagtggcaaacttatagaggtaacagtactggaacactcatggtgttcttcggcaacgttgatagctctggcatcaaacacaacatctttaatcctcccataatagctcggtacatcagattgcatccgacccactacagcattaggagtacactccgaatggagcttatgggttgcgacttgaattcctgttcaatgccactcggaatggagtctaaagccatctctgatgcacagataaccgccagtagctactttacgaacatgtttgctacgtggtcaccctctaaggcaaggcttcatttgcaaggccggtctaatgcctggagacctcaggtgaacaacccgaaagaatggctccaggtggactttcagaagaccatgaaagtaacaggtgtcactactcagggagttaagtccttgctcaccagcatgtatgtgaaggagttccttatttcctcatcacaagatggccaccagtggaccctcttctttcagaatggtaaggtcaaagtgtttcagggcaatcaagacagcttcacacccgtggtgaacagtcttgatcctccactcttgacacgataccttcgaatccatccacagtcttgggttcaccagattgcattgcgcatggaagtacttggatgcgaggctcaggacctctac

SEQ ID NO: 132 - protein, 1457 aa, synthetic construct
  REGION 1..1457: note = Variant of human B-domain deleted Factor VIII
MQIELSTCFFLCLLRFCFSATRRYYLGAVELSWDYMQSDLGELPVDARFPPRVPKSFPFNTSVVYKKTLFVEFTDHLFNIAKPRPPWMGLLGPTIQAEVYDTVVITLKNMASHPVSLHAVGVSYWKASEGAEYDDQTSQREKEDDKVFPGGSHTYVWQVLKENGPMASDPLCLTYSYLSHVDLVKDLNSGLIGALLVCREGSLAKEKTQTLHKFILLFAVFDEGKSWHSETKNSLMQDRDAASARAWPKMHTVNGYVNRSLPGLIGCHRKSVYWHVIGMGTTPEVHSIFLEGHTFLVRNHRQASLEISPITFLTAQTLLMDLGQFLLFCHISSHQHDGMEAYVKVDSCPEEPQLRMKNNEEAEDYDDDLTDSEMDVVRFDDDNSPSFIQIRSVAKKHPKTWVHYIAAEEEDWDYAPLVLAPDDRSYKSQYLNNGPQRIGRKYKKVRFMAYTDETFKTREAIQHESGILGPLLYGEVGDTLLIIFKNQASRPYNIYPHGITDVRPLYSRRLPKGVKHLKDFPILPGEIFKYKWTVTVEDGPTKSDPRCLTRYYSSFVNMERDLASGLIGPLLICYKESVDQRGNQIMSDKRNVILFSVFDENRSWYLTENIQRFLPNPAGVQLEDPEFQASNIMHSINGYVFDSLQLSVCLHEVAYWYILSIGAQTDFLSVFFSGYTFKHKMVYEDTLTLFPFSGETVFMSMENPGLWILGCHNSDFRNRGMTALLKVSTCDKNTGDYYEDSYEDISAYLLSKNNAIEPRSFSQNPPVLKRHQREITRTTLQSDQEEIDYDDTISVEMKKEDFDIYDEDENQSPRSFQKKTRHYFIAAVERLWDYGMSSSPHVLRNRAQSGSVPQFKKVVFQEFTDGSFTQPLYRGELNEHLGLLGPYIRAEVEDNIMVTFRNQASRPYSFYSSLISYEEDQRQGAEPRKNFVKPNETKTYFWKVQHHMAPTKDEFDCKAWAYFSDVDLEKDVHSGLIGPLLVCHTNTLNPAHGRQVTVQEFALFFTIFDETKSWYFTENMERNCRAPCNIQMEDPTFKENYRFHAINGYIMDTLPGLVMAQDQRIRWYLLSMGSNENIHSIHFSGHVFTVRKKEEYKMALYNLYPGVFETVEMLPSKAGIWRVECLIGEHLHAGMSTLFLVYSNKCQTPLGMASGHIRDFQITASGQYGQWAPKLARLHYSGSINAWSTKEPFSWIKVDLLAPMIIHGIKTQGARQKFSSLYISQFIIMYSLDGKKWQTYRGNSTGTLMVFFGNVDSSGIKHNIFNPPIIARYIRLHPTHYSIRSTLRMELMGCDLNSCSMPLGMESKAISDAQITASSYFTNMFATWSPSKARLHLQGRSNAWRPQVNNPKEWLQVDFQKTMKVTGVTTQGVKSLLTSMYVKEFLISSSQDGHQWTLFFQNGKVKVFQGNQDSFTPVVNSLDPPLLTRYLRIHPQSWVHQIALRMEVLGCEAQDLY

SEQ ID NO: 133 - DNA, 4371 bp, synthetic construct
  misc_feature 1..4371: note = Variant of human B-domain deleted Factor VIII
  source 1..4371: mol_type = other DNA
atgcagattgaactgtctacctgcttcttcctctgtttgctgaggttctgctttagcgccactagacggtactaccttggcgctgtggagctgtcctgggactatatgcagagtgatttgggagagcttcccgtcgacgcacgatttcctcctcgcgttccaaagtcatttcccttcaacacaagcgtggtgtacaagaagacgctcttcgtcgaattcaccgatcacctgttcaatatcgccaaacccagaccaccatggatgggtcttttggggcctaccatacaagcggaggtgtatgacacagttgttatcactctcaagaacatggcttctcatccggtaagtcttcacgcagtgggcgtgtcctactggaaagcttcagaaggagccgagtatgatgatcagacatcccagagggagaaagaagacgacaaggtatttccaggtgggtctcatacctatgtgtggcaagtgctcaaagagaatggccctatggcaagcgatccgctctgtttgacttacagctacctttcacacgttgacctcgtcaaggacctcaactccgggttgattggagccttgttggtatgcagggaaggatctcttgccaaagagaagacacagaccctccacaagtttatccttctctttgctgtgttcgatgagggcaaaagttggcatagcgaaacgaagaattccctcatgcaggatcgcgacgcagccagcgccagagcttggcccaagatgcacactgtgaacggatatgtcaataggtcacttcctggcttgattgggtgtcatcggaaaagtgtctactggcacgtgatcggaatggggacaacaccagaggtccactccatatttctcgaaggccataccttccttgttcgaaaccacagacaggcatccttggagatctctcccattacctttctcactgcccaaacgctccttatggacttgggtcagttccttctcttctgccatatcagctcacaccagcatgatggtatggaagcttatgtgaaagtcgacagttgtcctgaggagccacagttgcgcatgaagaataatgaagaagccgaggattacgacgacgatctcaccgattctgagatggacgtggtgaggtttgatgacgacaactctccctccttcattcaaatccggagcgtggcgaagaaacaccccaagacttgggtccactatatagcggcggaagaggaggattgggattacgctcctcttgtattggcaccagatgaccgctcatacaaaagccagtacctcaacaacggaccgcagagaattggccggaagtataagaaagtgcgatttatggcctatacagacgaaacctttaagacaagggaggccatccagcatgagagtgggattttgggacctcttctttacggcgaagttggtgataccctcctcatcatcttcaagaatcaagcttctcgcccctataacatttacccacacgggatcactgacgttaggcctttgtatagcagaagacttcccaaaggcgtgaagcatctcaaagacttccccattttgccaggcgagatctttaagtacaaatggaccgtcacagtggaagatggaccgactaaatcagaccctcgatgccttacgcggtactattcctccttcgtgaatatggagagagatttggcaagcggactcataggaccactcctcatctgttacaaggaatctgtagaccagaggggtaaccagattatgagtgataaacgcaatgtgatcctttttagcgtcttcgacgagaaccggtcctggtacttgaccgagaatatacaaaggttccttcccaaccccgcaggcgttcagttggaagaccctgagtttcaggccagcaatattatgcactcaatcaacggctatgtgtttgatagtctccagctttctgtttgcctccatgaagtagcctattggtacatcttgtcaattggtgctcaaacagacttcctctccgtcttcttctccggctacacctttaagcacaagatggtgtatgaggacactctcacactctttccattttctggagaaaccgtgttcatgagcatggagaatccaggcctttggatcttgggttgccacaacagtgataagcgcaatcggggaatgactgctctcctcaaagtcagcagctgtgataagaacacaggcgactattacgaagattcttacgaggacataagtgcctacttgttgtccaagaataacgccattgagcccagatcattctcccagaatcctcccgtgcttaaaaggcatcagcgcgaaatcaccagaactactcttcagtctgatcaagaggagattgactatgacgacaccataagcgtggaaatgaagaaggaggatttcgatatctatgacgaagatgagaaccagtctccgcggagctttcagaagaagacgcgacactacttcattgcagcagtcgaaaggctttgggactacggtatgtcatcatcccctcatgtgttgcgcaatagagctcagagtggaagtgttccacagttcaagaaagtcgtctttcaagagtttacagatggcagcttcacacagcctctctatcggggcgagcttaacgaacatttgggactccttggtccctatatccgagccgaagtggaggacaacattatggttacctttaggaatcaagcctctcgcccctacagcttctactcctccctcatcagttatgaggaggatcagagacaaggcgctgaaccacggaagaactttgtgaaaccgaatgagacgaagacctacttctggaaagtacagcaccacatggcccccacaaaagacgaattcgattgcaaagcatgggcgtatttttcagacgttgacttggagaaagatgtacattcaggacttattggtcctttgttggtgtgtcacactaacactctcaatccagcccatggcaggcaggtgacagtccaggaattcgctcttttctttaccatctttgatgagaccaagtcctggtacttcacggaaaacatggagcgcaattgcagagccccctgtaacatacagatggaggaccctacctttaaggaaaattatcggttccacgcaatcaacggatacattatggatacactccctggccttgtgatggctcaggaccaacgaatcaggtggtacctcctcagcatgggttctaatgagaacatacactccattcacttttcaggacatgtgttcactgtccggaagaaagaagagtataagatggccctctacaatttgtatccaggcgtgtttgagaccgttgaaatgcttccctctaaagctggcatctggagagtagagtgcttgatcggagaacatcttcacgcaggtatgagcaccttgttcctcgtgtacagcaacaaatgtcagaccccacttggcatggccagtggacacattcgcgactttcagatcacagcatctggccagtatggacaatgggccccaaagttggctcgcctccattactccggtagcataaatgcgtggtccactaaagaacctttcagctggattaaggtcgatcttcttgcccccatgatcatccacggcattaagacacagggagcgaggcagaaattctcctccctctacatctcacagttcattattatgtatagtttggacggcaagaagtggcaaacttatagaggtaacagtactggaacactcatggtgttcttcggcaacgttgatagctctggcatcaaacacaacatctttaatcctcccataatagctcggtacatcagattgcatccgacccactacagcattaggagtacactccgaatggagcttatgggttgcgacttgaattcctgttcaatgccactcggaatggagtctaaagccatctctgatgcacagataaccgccagtagctactttacgaacatgtttgctacgtggtcaccctctaaggcaaggcttcatttgcaaggccggtctaatgcctggagacctcaggtgaacaacccgaaagaatggctccaggtggactttcagaagaccatgaaagtaacaggtgtcactactcagggagttaagtccttgctcaccagcatgtatgtgaaggagttccttatttcctcatcacaagatggccaccagtggaccctcttctttcagaatggtaaggtcaaagtgtttcagggcaatcaagacagcttcacacccgtggtgaacagtcttgatcctccactcttgacacgataccttcgaatccatccacagtcttgggttcaccagattgcattgcgcatggaagtacttggatgcgaggctcaggacctctac

SEQ ID NO: 134 - protein, 1457 aa, synthetic construct
  REGION 1..1457: note = Variant of human B-domain deleted Factor VIII
MQIELSTCFFLCLLRFCFSATRRYYLGAVELSWDYMQSDLGELPVDARFPPRVPKSFPFNTSVVYKKTLFVEFTDHLFNIAKPRPPWMGLLGPTIQAEVYDTVVITLKNMASHPVSLHAVGVSYWKASEGAEYDDQTSQREKEDDKVFPGGSHTYVWQVLKENGPMASDPLCLTYSYLSHVDLVKDLNSGLIGALLVCREGSLAKEKTQTLHKFILLFAVFDEGKSWHSETKNSLMQDRDAASARAWPKMHTVNGYVNRSLPGLIGCHRKSVYWHVIGMGTTPEVHSIFLEGHTFLVRNHRQASLEISPITFLTAQTLLMDLGQFLLFCHISSHQHDGMEAYVKVDSCPEEPQLRMKNNEEAEDYDDDLTDSEMDVVRFDDDNSPSFIQIRSVAKKHPKTWVHYIAAEEEDWDYAPLVLAPDDRSYKSQYLNNGPQRIGRKYKKVRFMAYTDETFKTREAIQHESGILGPLLYGEVGDTLLIIFKNQASRPYNIYPHGITDVRPLYSRRLPKGVKHLKDFPILPGEIFKYKWTVTVEDGPTKSDPRCLTRYYSSFVNMERDLASGLIGPLLICYKESVDQRGNQIMSDKRNVILFSVFDENRSWYLTENIQRFLPNPAGVQLEDPEFQASNIMHSINGYVFDSLQLSVCLHEVAYWYILSIGAQTDFLSVFFSGYTFKHKMVYEDTLTLFPFSGETVFMSMENPGLWILGCHNSDKRNRGMTALLKVSSCDKNTGDYYEDSYEDISAYLLSKNNAIEPRSFSQNPPVLKRHQREITRTTLQSDQEEIDYDDTISVEMKKEDFDIYDEDENQSPRSFQKKTRHYFIAAVERLWDYGMSSSPHVLRNRAQSGSVPQFKKVVFQEFTDGSFTQPLYRGELNEHLGLLGPYIRAEVEDNIMVTFRNQASRPYSFYSSLISYEEDQRQGAEPRKNFVKPNETKTYFWKVQHHMAPTKDEFDCKAWAYFSDVDLEKDVHSGLIGPLLVCHTNTLNPAHGRQVTVQEFALFFTIFDETKSWYFTENMERNCRAPCNIQMEDPTFKENYRFHAINGYIMDTLPGLVMAQDQRIRWYLLSMGSNENIHSIHFSGHVFTVRKKEEYKMALYNLYPGVFETVEMLPSKAGIWRVECLIGEHLHAGMSTLFLVYSNKCQTPLGMASGHIRDFQITASGQYGQWAPKLARLHYSGSINAWSTKEPFSWIKVDLLAPMIIHGIKTQGARQKFSSLYISQFIIMYSLDGKKWQTYRGNSTGTLMVFFGNVDSSGIKHNIFNPPIIARYIRLHPTHYSIRSTLRMELMGCDLNSCSMPLGMESKAISDAQITASSYFTNMFATWSPSKARLHLQGRSNAWRPQVNNPKEWLQVDFQKTMKVTGVTTQGVKSLLTSMYVKEFLISSSQDGHQWTLFFQNGKVKVFQGNQDSFTPVVNSLDPPLLTRYLRIHPQSWVHQIALRMEVLGCEAQDLY

SEQ ID NO: 135 - DNA, 4371 bp, synthetic construct
  misc_feature 1..4371: note = Variant of human B-domain deleted Factor VIII
  source 1..4371: mol_type = other DNA
atgcagattgaactgtctacctgcttcttcctctgtttgctgaggttctgctttagcgccactagacggtactaccttggcgctgtggagctgtcctgggactatatgcagagtgatttgggagagcttcccgtcgacgcacgatttcctcctcgcgttccaaagtcatttcccttcaacacaagcgtggtgtacaagaagacgctcttcgtcgaattcaccgatcacctgttcaatatcgccaaacccagaccaccatggatgggtcttttggggcctaccatacaagcggaggtgtatgacacagttgttatcactctcaagaacatggcttctcatccggtaagtcttcacgcagtgggcgtgtcctactggaaagcttcagaaggagccgagtatgatgatcagacatcccagagggagaaagaagacgacaaggtatttccaggtgggtctcatacctatgtgtggcaagtgctcaaagagaatggccctatggcaagcgatccgctctgtttgacttacagctacctttcacacgttgacctcgtcaaggacctcaactccgggttgattggagccttgttggtatgcagggaaggatctcttgccaaagagaagacacagaccctccacaagtttatccttctctttgctgtgttcgatgagggcaaaagttggcatagcgaaacgaagaattccctcatgcaggatcgcgacgcagccagcgccagagcttggcccaagatgcacactgtgaacggatatgtcaataggtcacttcctggcttgattgggtgtcatcggaaaagtgtctactggcacgtgatcggaatggggacaacaccagaggtccactccatatttctcgaaggccataccttccttgttcgaaaccacagacaggcatccttggagatctctcccattacctttctcactgcccaaacgctccttatggacttgggtcagttccttctcttctgccatatcagctcacaccagcatgatggtatggaagcttatgtgaaagtcgacagttgtcctgaggagccacagttgcgcatgaagaataatgaagaagccgaggattacgacgacgatctcaccgattctgagatggacgtggtgaggtttgatgacgacaactctccctccttcattcaaatccggagcgtggcgaagaaacaccccaagacttgggtccactatatagcggcggaagaggaggattgggattacgctcctcttgtattggcaccagatgaccgctcatacaaaagccagtacctcaacaacggaccgcagagaattggccggaagtataagaaagtgcgatttatggcctatacagacgaaacctttaagacaagggaggccatccagcatgagagtgggattttgggacctcttctttacggcgaagttggtgataccctcctcatcatcttcaagaatcaagcttctcgcccctataacatttacccacacgggatcactgacgttaggcctttgtatagcagaagacttcccaaaggcgtgaagcatctcaaagacttccccattttgccaggcgagatctttaagtacaaatggaccgtcacagtggaagatggaccgactaaatcagaccctcgatgccttacgcggtactattcctccttcgtgaatatggagagagatttggcaagcggactcataggaccactcctcatctgttacaaggaatctgtagaccagaggggtaaccagattatgagtgataaacgcaatgtgatcctttttagcgtcttcgacgagaaccggtcctggtacttgaccgagaatatacaaaggttccttcccaaccccgcaggcgttcagttggaagaccctgagtttcaggccagcaatattatgcactcaatcaacggctatgtgtttgatagtctccagctttctgtttgcctccatgaagtagcctattggtacatcttgtcaattggtgctcaaggggacttcctctccgtcttcttctccggctacacctttaagcacaagatggtgtatgaggacactctcacactctttccattttctggagaaaccgtgttcatgagcatggagaatccaggcctttggatcttgggttgccacaacagtgattttcgcaatcggggaatgactgctctcctcaaagtcagcagctgtgataagaacacaggcgactattacgaagattcttacgaggacataagtgcctacttgttgtccaagaataacgccattgagcccagatcattctcccagaatcctcccgtgcttaaaaggcatcagcgcgaaatcaccagaactactcttcagtctgatcaagaggagattgactatgacgacaccataagcgtggaaatgaagaaggaggatttcgatatctatgacgaagatgagaaccagtctccgcggagctttcagaagaagacgcgacactacttcattgcagcagtcgaaaggctttgggactacggtatgtcatcatcccctcatgtgttgcgcaatagagctcagagtggaagtgttccacagttcaagaaagtcgtctttcaagagtttacagatggcagcttcacacagcctctctatcggggcgagcttaacgaacatttgggactccttggtccctatatccgagccgaagtggaggacaacattatggttacctttaggaatcaagcctctcgcccctacagcttctactcctccctcatcagttatgaggaggatcagagacaaggcgctgaaccacggaagaactttgtgaaaccgaatgagacgaagacctacttctggaaagtacagcaccacatggcccccacaaaagacgaattcgattgcaaagcatgggcgtatttttcagacgttgacttggagaaagatgtacattcaggacttattggtcctttgttggtgtgtcacactaacactctcaatccagcccatggcaggcaggtgacagtccaggaattcgctcttttctttaccatctttgatgagaccaagtcctggtacttcacggaaaacatggagcgcaattgcagagccccctgtaacatacagatggaggaccctacctttaaggaaaattatcggttccacgcaatcaacggatacattatggatacactccctggccttgtgatggctcaggaccaacgaatcaggtggtacctcctcagcatgggttctaatgagaacatacactccattcacttttcaggacatgtgttcactgtccggaagaaagaagagtataagatggccctctacaatttgtatccaggcgtgtttgagaccgttgaaatgcttccctctaaagctggcatctggagagtagagtgcttgatcggagaacatcttcacgcaggtatgagcaccttgttcctcgtgtacagcaacaaatgtcagaccccacttggcatggccagtggacacattcgcgactttcagatcacagcatctggccagtatggacaatgggccccaaagttggctcgcctccattactccggtagcataaatgcgtggtccactaaagaacctttcagctggattaaggtcgatcttcttgcccccatgatcatccacggcattaagacacagggagcgaggcagaaattctcctccctctacatctcacagttcattattatgtatagtttggacggcaagaagtggcaaacttatagaggtaacagtactggaacactcatggtgttcttcggcaacgttgatagctctggcatcaaacacaacatctttaatcctcccataatagctcggtacatcagattgcatccgacccactacagcattaggagtacactccgaatggagcttatgggttgcgacttgaattcctgttcaatgccactcggaatggagtctaaagccatctctgatgcacagataaccgccagtagctactttacgaacatgtttgctacgtggtcaccctctaaggcaaggcttcatttgcaaggccggtctaatgcctggagacctcaggtgaacaacccgaaagaatggctccaggtggactttcagaagaccatgaaagtaacaggtgtcactactcagggagttaagtccttgctcaccagcatgtatgtgaaggagttccttatttcctcatcacaagatggccaccagtggaccctcttctttcagaatggtaaggtcaaagtgtttcagggcaatcaagacagcttcacacccgtggtgaacagtcttgatcctccactcttgacacgataccttcgaatccatccacagtcttgggttcaccagattgcattgcgcatggaagtacttggatgcgaggctcaggacctctac

SEQ ID NO: 136 - protein, 1457 aa, synthetic construct
  REGION 1..1457: note = Variant of human B-domain deleted Factor VIII
MQIELSTCFFLCLLRFCFSATRRYYLGAVELSWDYMQSDLGELPVDARFPPRVPKSFPFNTSVVYKKTLFVEFTDHLFNIAKPRPPWMGLLGPTIQAEVYDTVVITLKNMASHPVSLHAVGVSYWKASEGAEYDDQTSQREKEDDKVFPGGSHTYVWQVLKENGPMASDPLCLTYSYLSHVDLVKDLNSGLIGALLVCREGSLAKEKTQTLHKFILLFAVFDEGKSWHSETKNSLMQDRDAASARAWPKMHTVNGYVNRSLPGLIGCHRKSVYWHVIGMGTTPEVHSIFLEGHTFLVRNHRQASLEISPITFLTAQTLLMDLGQFLLFCHISSHQHDGMEAYVKVDSCPEEPQLRMKNNEEAEDYDDDLTDSEMDVVRFDDDNSPSFIQIRSVAKKHPKTWVHYIAAEEEDWDYAPLVLAPDDRSYKSQYLNNGPQRIGRKYKKVRFMAYTDETFKTREAIQHESGILGPLLYGEVGDTLLIIFKNQASRPYNIYPHGITDVRPLYSRRLPKGVKHLKDFPILPGEIFKYKWTVTVEDGPTKSDPRCLTRYYSSFVNMERDLASGLIGPLLICYKESVDQRGNQIMSDKRNVILFSVFDENRSWYLTENIQRFLPNPAGVQLEDPEFQASNIMHSINGYVFDSLQLSVCLHEVAYWYILSIGAQGDFLSVFFSGYTFKHKMVYEDTLTLFPFSGETVFMSMENPGLWILGCHNSDFRNRGMTALLKVSSCDKNTGDYYEDSYEDISAYLLSKNNAIEPRSFSQNPPVLKRHQREITRTTLQSDQEEIDYDDTISVEMKKEDFDIYDEDENQSPRSFQKKTRHYFIAAVERLWDYGMSSSPHVLRNRAQSGSVPQFKKVVFQEFTDGSFTQPLYRGELNEHLGLLGPYIRAEVEDNIMVTFRNQASRPYSFYSSLISYEEDQRQGAEPRKNFVKPNETKTYFWKVQHHMAPTKDEFDCKAWAYFSDVDLEKDVHSGLIGPLLVCHTNTLNPAHGRQVTVQEFALFFTIFDETKSWYFTENMERNCRAPCNIQMEDPTFKENYRFHAINGYIMDTLPGLVMAQDQRIRWYLLSMGSNENIHSIHFSGHVFTVRKKEEYKMALYNLYPGVFETVEMLPSKAGIWRVECLIGEHLHAGMSTLFLVYSNKCQTPLGMASGHIRDFQITASGQYGQWAPKLARLHYSGSINAWSTKEPFSWIKVDLLAPMIIHGIKTQGARQKFSSLYISQFIIMYSLDGKKWQTYRGNSTGTLMVFFGNVDSSGIKHNIFNPPIIARYIRLHPTHYSIRSTLRMELMGCDLNSCSMPLGMESKAISDAQITASSYFTNMFATWSPSKARLHLQGRSNAWRPQVNNPKEWLQVDFQKTMKVTGVTTQGVKSLLTSMYVKEFLISSSQDGHQWTLFFQNGKVKVFQGNQDSFTPVVNSLDPPLLTRYLRIHPQSWVHQIALRMEVLGCEAQDLY

SEQ ID NO: 137 - DNA, 4371 bp, synthetic construct
  misc_feature 1..4371: note = Variant of human B-domain deleted Factor VIII
  source 1..4371: mol_type = other DNA
atgcagattgaactgtctacctgcttcttcctctgtttgctgaggttctgctttagcgccactagacggtactaccttggcgctgtggagctgtcctgggactatatgcagagtgatttgggagagcttcccgtcgacgcacgatttcctcctcgcgttccaaagtcatttcccttcaacacaagcgtggtgtacaagaagacgctcttcgtcgaattcaccgatcacctgttcaatatcgccaaacccagaccaccatggatgggtcttttggggcctaccatacaagcggaggtgtatgacacagttgttatcactctcaagaacatggcttctcatccggtaagtcttcacgcagtgggcgtgtcctactggaaagcttcagaaggagccgagtatgatgatcagacatcccagagggagaaagaagacgacaaggtatttccaggtgggtctcatacctatgtgtggcaagtgctcaaagagaatggccctatggcaagcgatccgctctgtttgacttacagctacctttcacacgttgacctcgtcaaggacctcaactccgggttgattggagccttgttggtatgcagggaaggatctcttgccaaagagaagacacagaccctccacaagtttatccttctctttgctgtgttcgatgagggcaaaagttggcatagcgaaacgaagaattccctcatgcaggatcgcgacgcagccagcgccagagcttggcccaagatgcacactgtgaacggatatgtcaataggtcacttcctggcttgattgggtgtcatcggaaaagtgtctactggcacgtgatcggaatggggacaacaccagaggtccactccatatttctcgaaggccataccttccttgttcgaaaccacagacaggcatccttggagatctctcccattacctttctcactgcccaaacgctccttatggacttgggtcagttccttctcttctgccatatcagctcacaccagcatgatggtatggaagcttatgtgaaagtcgacagttgtcctgaggagccacagttgcgcatgaagaataatgaagaaactgaggattacgacgacgatctcaccgattctgagatggacgtggtgaggtttgatgacgacaactctccctccttcattcaaatccggagcgtggcgaagaaacaccccaagacttgggtccactatatagcggcggaagaggaggattgggattacgctcctcttgtattggcaccagatgaccgctcatacaaaagccagtacctcaacaacggaccgcagagaattggccggaagtataagaaagtgcgatttatggcctatacagacgaaacctttaagacaagggaggccatccagcatgagagtgggattttgggacctcttctttacggcgaagttggtgataccctcctcatcatcttcaagaatcaagcttctcgcccctataacatttacccacacgggatcactgacgttaggcctttgtatagcagaagacttcccaaaggcgtgaagcatctcaaagacttccccattttgccaggcgagatctttaagtacaaatggaccgtcacagtggaagatggaccgactaaatcagaccctcgatgccttacgcggtactattcctccttcgtgaatatggagagagatttggcaagcggactcataggaccactcctcatctgttacaaggaatctgtagaccagaggggtaaccagattatgagtgataaacgcaatgtgatcctttttagcgtcttcgacgagaaccggtcctggtacttgaccgagaatatacaaaggttccttcccaaccccgcaggcgttcagttggaagaccctgagtttcaggccagcaatattatgcactcaatcaacggctatgtgtttgatagtctccagctttctgtttgcctccatgaagtagcctattggtacatcttgtcaattggtgctcaaacagacttcctctccgtcttcttctccggctacacctttaagcacaagatggtgtatgaggacactctcacactctttccattttctggagaaaccgtgttcatgagcatggagaatccaggcctttggatcttgggttgccacaacagtgattttcgcaatcggggaatgactgctctcctcaaagtcagcagctgtgataagaacacaggcgactattacgaagattcttacgaggacataagtgcctacttgttgtccaagaataacgccattgagcccagatcattctcccagaatcctcccgtgcttaaaaggcatcagcgcgaaatcaccagaactactcttcagtctgatcaagaggagattgactatgacgacaccataagcgtggaaatgaagaaggaggatttcgatatctatgacgaagatgagaaccagtctccgcggagctttcagaagaagacgcgacactacttcattgcagcagtcgaaaggctttgggactacggtatgtcatcatcccctcatgtgttgcgcaatagagctcagagtggaagtgttccacagttcaagaaagtcgtctttcaagagtttacagatggcagcttcacacagcctctctatcggggcgagcttaacgaacatttgggactccttggtccctatatccgagccgaagtggaggacaacattatggttacctttaggaatcaagcctctcgcccctacagcttctactcctccctcatcagttatgaggaggatcagagacaaggcgctgaaccacggaagaactttgtgaaaccgaatgagacgaagacctacttctggaaagtacagcaccacatggcccccacaaaagacgaattcgattgcaaagcatgggcgtatttttcagacgttgacttggagaaagatgtacattcaggacttattggtcctttgttggtgtgtcacactaacactctcaatccagcccatggcaggcaggtgacagtccaggaattcgctcttttctttaccatctttgatgagaccaagtcctggtacttcacggaaaacatggagcgcaattgcagagccccctgtaacatacagatggaggaccctacctttaaggaaaattatcggttccacgcaatcaacggatacattatggatacactccctggccttgtgatggctcaggaccaacgaatcaggtggtacctcctcagcatgggttctaatgagaacatacactccattcacttttcaggacatgtgttcactgtccggaagaaagaagagtataagatggccctctacaatttgtatccaggcgtgtttgagaccgttgaaatgcttccctctaaagctggcatctggagagtagagtgcttgatcggagaacatcttcacgcaggtatgagcaccttgttcctcgtgtacagcaacaaatgtcagaccccacttggcatggccagtggacacattcgcgactttcagatcacagcatctggccagtatggacaatgggccccaaagttggctcgcctccattactccggtagcataaatgcgtggtccactaaagaacctttcagctggattaaggtcgatcttcttgcccccatgatcatccacggcattaagacacagggagcgaggcagaaattctcctccctctacatctcacagttcattattatgtatagtttggacggcaagaagtggcaaacttatagaggtaacagtactggaacactcatggtgttcttcggcaacgttgatagctctggcatcaaacacaacatctttaatcctcccataatagctcggtacatcagattgcatccgacccactacagcattaggagtacactccgaatggagcttatgggttgcgacttgaattcctgttcaatgccactcggaatggagtctaaagccatctctgatgcacagataaccgccagtagctactttacgaacatgtttgctacgtggtcaccctctaaggcaaggcttcatttgcaaggccggtctaatgcctggagacctcaggtgaacaacccgaaagaatggctccaggtggactttcagaagaccatgaaagtaacaggtgtcactactcagggagttaagtccttgctcaccagcatgtatgtgaaggagttccttatttcctcatcacaagatggccaccagtggaccctcttctttcagaatggtaaggtcaaagtgtttcagggcaatcaagacagcttcacacccgtggtgaacagtcttgatcctccactcttgacacgataccttcgaatccatccacagtcttgggttcaccagattgcattgcgcatggaagtacttggatgcgaggctcaggacctctac

SEQ ID NO: 138 - protein, 1457 aa, synthetic construct
  REGION 1..1457: note = Variant of human B-domain deleted Factor VIII
MQIELSTCFFLCLLRFCFSATRRYYLGAVELSWDYMQSDLGELPVDARFPPRVPKSFPFNTSVVYKKTLFVEFTDHLFNIAKPRPPWMGLLGPTIQAEVYDTVVITLKNMASHPVSLHAVGVSYWKASEGAEYDDQTSQREKEDDKVFPGGSHTYVWQVLKENGPMASDPLCLTYSYLSHVDLVKDLNSGLIGALLVCREGSLAKEKTQTLHKFILLFAVFDEGKSWHSETKNSLMQDRDAASARAWPKMHTVNGYVNRSLPGLIGCHRKSVYWHVIGMGTTPEVHSIFLEGHTFLVRNHRQASLEISPITFLTAQTLLMDLGQFLLFCHISSHQHDGMEAYVKVDSCPEEPQLRMKNNEETEDYDDDLTDSEMDVVRFDDDNSPSFIQIRSVAKKHPKTWVHYIAAEEEDWDYAPLVLAPDDRSYKSQYLNNGPQRIGRKYKKVRFMAYTDETFKTREAIQHESGILGPLLYGEVGDTLLIIFKNQASRPYNIYPHGITDVRPLYSRRLPKGVKHLKDFPILPGEIFKYKWTVTVEDGPTKSDPRCLTRYYSSFVNMERDLASGLIGPLLICYKESVDQRGNQIMSDKRNVILFSVFDENRSWYLTENIQRFLPNPAGVQLEDPEFQASNIMHSINGYVFDSLQLSVCLHEVAYWYILSIGAQTDFLSVFFSGYTFKHKMVYEDTLTLFPFSGETVFMSMENPGLWILGCHNSDFRNRGMTALLKVSSCDKNTGDYYEDSYEDISAYLLSKNNAIEPRSFSQNPPVLKRHQREITRTTLQSDQEEIDYDDTISVEMKKEDFDIYDEDENQSPRSFQKKTRHYFIAAVERLWDYGMSSSPHVLRNRAQSGSVPQFKKVVFQEFTDGSFTQPLYRGELNEHLGLLGPYIRAEVEDNIMVTFRNQASRPYSFYSSLISYEEDQRQGAEPRKNFVKPNETKTYFWKVQHHMAPTKDEFDCKAWAYFSDVDLEKDVHSGLIGPLLVCHTNTLNPAHGRQVTVQEFALFFTIFDETKSWYFTENMERNCRAPCNIQMEDPTFKENYRFHAINGYIMDTLPGLVMAQDQRIRWYLLSMGSNENIHSIHFSGHVFTVRKKEEYKMALYNLYPGVFETVEMLPSKAGIWRVECLIGEHLHAGMSTLFLVYSNKCQTPLGMASGHIRDFQITASGQYGQWAPKLARLHYSGSINAWSTKEPFSWIKVDLLAPMIIHGIKTQGARQKFSSLYISQFIIMYSLDGKKWQTYRGNSTGTLMVFFGNVDSSGIKHNIFNPPIIARYIRLHPTHYSIRSTLRMELMGCDLNSCSMPLGMESKAISDAQITASSYFTNMFATWSPSKARLHLQGRSNAWRPQVNNPKEWLQVDFQKTMKVTGVTTQGVKSLLTSMYVKEFLISSSQDGHQWTLFFQNGKVKVFQGNQDSFTPVVNSLDPPLLTRYLRIHPQSWVHQIALRMEVLGCEAQDLY

SEQ ID NO: 139 - DNA, 4371 bp, synthetic construct
  misc_feature 1..4371: note = Variant of human B-domain deleted Factor VIII
  source 1..4371: mol_type = other DNA
atgcagattgaactgtctacctgcttcttcctctgtttgctgaggttctgctttagcgccactagacggtactaccttggcgctgtggagctgtcctgggactatatgcagagtgatttgggagagcttcccgtcgacgcacgatttcctcctcgcgttccaaagtcaactcccttcaacacaagcgtggtgtacaagaagacgctcttcgtcgaattcaccgatcacctgttcaatatcgccaaacccagaccaccatggatgggtcttttggggcctaccatacaagcggaggtgtatgacacagttgttatcactctcaagaacatggcttctcatccggtaagtcttcacgcagtgggcgtgtcctactggaaagcttcagaaggagccgagtatgatgatcagacatcccagagggagaaagaagacgacaaggtatttccaggtgggtctcatacctatgtgtggcaagtgctcaaagagaatggccctatggcaagcgatccgctctgtttgacttacagctacctttcacacgttgacctcgtcaaggacctcaactccgggttgattggagccttgttggtatgcagggaaggatctcttgccaaagagaagacacagaccctccacaagtttatccttctctttgctgtgttcgatgagggcaaaagttggcatagcgaaacgaagaattccctcatgcaggatcgcgacgcagccagcgccagagcttggcccaagatgcacactgtgaacggatatgtcaataggtcacttcctggcttgattgggtgtcatcggaaaagtgtctactggcacgtgatcggaatggggacaacaccagaggtccactccatatttctcgaaggccataccttccttgttcgaaaccacagacaggcatccttggagatctctcccattacctttctcactgcccaaacgctccttatggacttgggtcagttccttctcttctgccatatcagctcacaccagcatgatggtatggaagcttatgtgaaagtcgacagttgtcctgaggagccacagttgcgcatgaagaataatgaagaagccgaggattacgacgacgatctcaccgattctgagatggacgtggtgaggtttgatgacgacaactctccctccttcattcaaatccggagcgtggcgaagaaacaccccaagacttgggtccactatatagcggcggaagaggaggattgggattacgctcctcttgtattggcaccagatgaccgctcatacaaaagccagtacctcaacaacggaccgcagagaattggccggaagtataagaaagtgcgatttatggcctatacagacgaaacctttaagacaagggaggccatccagcatgagagtgggattttgggacctcttctttacggcgaagttggtgataccctcctcatcatcttcaagaatcaagcttctcgcccctataacatttacccacacgggatcactgacgttaggcctttgtatagcagaagacttcccaaaggcgtgaagcatctcaaagacttccccattttgccaggcgagatctttaagtacaaatggaccgtcacagtggaagatggaccgactaaatcagaccctcgatgccttacgcggtactattcctccttcgtgaatatggagagagatttggcaagcggactcataggaccactcctcatctgttacaaggaatctgtagaccagaggggtaaccagattatgagtgataaacgcaatgtgatcctttttagcgtcttcgacgagaaccggtcctggtacttgaccgagaatatacaaaggttccttcccaaccccgcaggcgttcagttggaagaccctgagtttcaggccagcaatattatgcactcaatcaacggctatgtgtttgatagtctccagctttctgtttgcctccatgaagtagcctattggtacatcttgtcaattggtgctcaaacagacttcctctccgtcttcttctccggctacacctttaagcacaagatggtgtatgaggacactctcacactctttccattttctggagaaaccgtgttcatgagcatggagaatccaggcctttggatcttgggttgccacaacagtgattttcgcaatcggggaatgactgctctcctcaaagtcagcagctgtgataagaacacaggcgactattacgaagattcttacgaggacataagtgcctacttgttgtccaagaataacgccattgagcccagatcattctcccagaatcctcccgtgcttaaaaggcatcagcgcgaaatcaccagaactactcttcagtctgatcaagaggagattgactatgacgacaccataagcgtggaaatgaagaaggaggatttcgatatctatgacgaagatgagaaccagtctccgcggagctttcagaagaagacgcgacactacttcattgcagcagtcgaaaggctttgggactacggtatgtcatcatcccctcatgtgttgcgcaatagagctcagagtggaagtgttccacagttcaagaaagtcgtctttcaagagtttacagatggcagcttcacacagcctctctatcggggcgagcttaacgaacatttgggactccttggtccctatatccgagccgaagtggaggacaacattatggttacctttaggaatcaagcctctcgcccctacagcttctactcctccctcatcagttatgaggaggatcagagacaaggcgctgaaccacggaagaactttgtgaaaccgaatgagacgaagacctacttctggaaagtacagcaccacatggcccccacaaaagacgaattcgattgcaaagcatgggcgtatttttcagacgttgacttggagaaagatgtacattcaggacttattggtcctttgttggtgtgtcacactaacactctcaatccagcccatggcaggcaggtgacagtccaggaattcgctcttttctttaccatctttgatgagaccaagtcctggtacttcacggaaaacatggagcgcaattgcagagccccctgtaacatacagatggaggaccctacctttaaggaaaattatcggttccacgcaatcaacggatacattatggatacactccctggccttgtgatggctcaggaccaacgaatcaggtggtacctcctcagcatgggttctaatgagaacatacactccattcacttttcaggacatgtgttcactgtccggaagaaagaagagtataagatggccctctacaatttgtatccaggcgtgtttgagaccgttgaaatgcttccctctaaagctggcatctggagagtagagtgcttgatcggagaacatcttcacgcaggtatgagcaccttgttcctcgtgtacagcaacaaatgtcagaccccacttggcatggccagtggacacattcgcgactttcagatcacagcatctggccagtatggacaatgggccccaaagttggctcgcctccattactccggtagcataaatgcgtggtccactaaagaacctttcagctggattaaggtcgatcttcttgcccccatgatcatccacggcattaagacacagggagcgaggcagaaattctcctccctctacatctcacagttcattattatgtatagtttggacggcaagaagtggcaaacttatagaggtaacagtactggaacactcatggtgttcttcggcaacgttgatagctctggcatcaaacacaacatctttaatcctcccataatagctcggtacatcagattgcatccgacccactacagcattaggagtacactccgaatggagcttatgggttgcgacttgaattcctgttcaatgccactcggaatggagtctaaagccatctctgatgcacagataaccgccagtagctactttacgaacatgtttgctacgtggtcaccctctaaggcaaggcttcatttgcaaggccggtctaatgcctggagacctcaggtgaacaacccgaaagaatggctccaggtggactttcagaagaccatgaaagtaacaggtgtcactactcagggagttaagtccttgctcaccagcatgtatgtgaaggagttccttatttcctcatcacaagatggccaccagtggaccctcttctttcagaatggtaaggtcaaagtgtttcagggcaatcaagacagcttcacacccgtggtgaacagtcttgatcctccactcttgacacgataccttcgaatccatccacagtcttgggttcaccagattgcattgcgcatggaagtacttggatgcgaggctcaggacctctac

SEQ ID NO: 140 - protein, 1457 aa, synthetic construct
  REGION 1..1457: note = Variant of human B-domain deleted Factor VIII
MQIELSTCFFLCLLRFCFSATRRYYLGAVELSWDYMQSDLGELPVDARFPPRVPKSTPFNTSVVYKKTLFVEFTDHLFNIAKPRPPWMGLLGPTIQAEVYDTVVITLKNMASHPVSLHAVGVSYWKASEGAEYDDQTSQREKEDDKVFPGGSHTYVWQVLKENGPMASDPLCLTYSYLSHVDLVKDLNSGLIGALLVCREGSLAKEKTQTLHKFILLFAVFDEGKSWHSETKNSLMQDRDAASARAWPKMHTVNGYVNRSLPGLIGCHRKSVYWHVIGMGTTPEVHSIFLEGHTFLVRNHRQASLEISPITFLTAQTLLMDLGQFLLFCHISSHQHDGMEAYVKVDSCPEEPQLRMKNNEEAEDYDDDLTDSEMDVVRFDDDNSPSFIQIRSVAKKHPKTWVHYIAAEEEDWDYAPLVLAPDDRSYKSQYLNNGPQRIGRKYKKVRFMAYTDETFKTREAIQHESGILGPLLYGEVGDTLLIIFKNQASRPYNIYPHGITDVRPLYSRRLPKGVKHLKDFPILPGEIFKYKWTVTVEDGPTKSDPRCLTRYYSSFVNMERDLASGLIGPLLICYKESVDQRGNQIMSDKRNVILFSVFDENRSWYLTENIQRFLPNPAGVQLEDPEFQASNIMHSINGYVFDSLQLSVCLHEVAYWYILSIGAQTDFLSVFFSGYTFKHKMVYEDTLTLFPFSGETVFMSMENPGLWILGCHNSDFRNRGMTALLKVSSCDKNTGDYYEDSYEDISAYLLSKNNAIEPRSFSQNPPVLKRHQREITRTTLQSDQEEIDYDDTISVEMKKEDFDIYDEDENQSPRSFQKKTRHYFIAAVERLWDYGMSSSPHVLRNRAQSGSVPQFKKVVFQEFTDGSFTQPLYRGELNEHLGLLGPYIRAEVEDNIMVTFRNQASRPYSFYSSLISYEEDQRQGAEPRKNFVKPNETKTYFWKVQHHMAPTKDEFDCKAWAYFSDVDLEKDVHSGLIGPLLVCHTNTLNPAHGRQVTVQEFALFFTIFDETKSWYFTENMERNCRAPCNIQMEDPTFKENYRFHAINGYIMDTLPGLVMAQDQRIRWYLLSMGSNENIHSIHFSGHVFTVRKKEEYKMALYNLYPGVFETVEMLPSKAGIWRVECLIGEHLHAGMSTLFLVYSNKCQTPLGMASGHIRDFQITASGQYGQWAPKLARLHYSGSINAWSTKEPFSWIKVDLLAPMIIHGIKTQGARQKFSSLYISQFIIMYSLDGKKWQTYRGNSTGTLMVFFGNVDSSGIKHNIFNPPIIARYIRLHPTHYSIRSTLRMELMGCDLNSCSMPLGMESKAISDAQITASSYFTNMFATWSPSKARLHLQGRSNAWRPQVNNPKEWLQVDFQKTMKVTGVTTQGVKSLLTSMYVKEFLISSSQDGHQWTLFFQNGKVKVFQGNQDSFTPVVNSLDPPLLTRYLRIHPQSWVHQIALRMEVLGCEAQDLY

SEQ ID NO: 141 - DNA, 4371 bp, synthetic construct
  misc_feature 1..4371: note = Variant of human B-domain deleted Factor VIII
  source 1..4371: mol_type = other DNA
atgcagattgaactgtctacctgcttcttcctctgtttgctgaggttctgctttagcgccactagacggtactaccttggcgctgtggagctgtcctgggactatatgcagagtgatttgggagagcttcccgtcgacgcacgatttcctcctcgcgttccaaagtcatttcccttcaacacaagcgtggtgtacaagaagacgctcttcgtcgaattcaccgatcacctgttcaatatcgccaaacccagaccaccatggatgggtcttttggggcctaccatacaagcggaggtgtatgacacagttgttatcactctcaagaacatggcttctcatccggtaagtcttcacgcagtgggcgtgtcctactggaaagcttcagaaggagccgagtatgatgatcagacatcccagagggagaaagaagacgacaaggtatttccaggtgggtctcatacctatgtgtggcaagtgctcaaagagaatggccctatggcaagcgatccgctctgtttgacttacagctacctttcacacgttgacctcgtcaaggacctcaactccgggttgattggagccttgttggtatgcagggaaggatctcttgccaaagagaagacacagaccctccacaagtttatccttctctttgctgtgttcgatgagggcaaaagttggcatagcgaaacgaagaattccctcatgcaggatcgcgacgcagccagcgccagagcttggcccaagatgcacactgtgaacggatatgtcaataggtcacttcctggcttgattgggtgtcatcggaaaagtgtctactggcacgtgatcggaatggggacaacaccagaggtccactccatatttctcgaaggccataccttccttgttcgaaaccacagacaggcatccttggagatctctcccattacctttctcactgcccaaacgctccttatggacttgggtcagttccttctcttctgccatatcagctcacaccagcatgatggtatggaagcttatgtgaaagtcgacagttgtcctgaggagccacagttgcgcatgaagaatggtgaagaagccgaggattacgacgacgatctcaccgattctgagatggacgtggtgaggtttgatgacgacaactctccctccttcattcaaatccggagcgtggcgaagaaacaccccaagacttgggtccactatatagcggcggaagaggaggattgggattacgctcctcttgtattggcaccagatgaccgctcatacaaaagccagtacctcaacaacggaccgcagagaattggccggaagtataagaaagtgcgatttatggcctatacagacgaaacctttaagacaagggaggccatccagcatgagagtgggattttgggacctcttctttacggcgaagttggtgataccctcctcatcatcttcaagaatcaagcttctcgcccctataacatttacccacacgggatcactgacgttaggcctttgtatagcagaagacttcccaaaggcgtgaagcatctcaaagacttccccattttgccaggcgagatctttaagtacaaatggaccgtcacagtggaagatggaccgactaaatcagaccctcgatgccttacgcggtactattcctccttcgtgaatatggagagagatttggcaagcggactcataggaccactcctcatctgttacaaggaatctgtagaccagaggggtaaccagattatgagtgataaacgcaatgtgatcctttttagcgtcttcgacgagaaccggtcctggtacttgaccgagaatatacaaaggttccttcccaaccccgcaggcgttcagttggaagaccctgagtttcaggccagcaatattatgcactcaatcaacggctatgtgtttgatagtctccagctttctgtttgcctccatgaagtagcctattggtacatcttgtcaattggtgctcaaacagacttcctctccgtcttcttctccggctacacctttaagcacaagatggtgtatgaggacactctcacactctttccattttctggagaaaccgtgttcatgagcatggagaatccaggcctttggatcttgggttgccacaacagtgattttcgcaatcggggaatgactgctctcctcaaagtcagcagctgtgataagaacacaggcgactattacgaagattcttacgaggacataagtgcctacttgttgtccaagaataacgccattgagcccagatcattctcccagaatcctcccgtgcttaaaaggcatcagcgcgaaatcaccagaactactcttcagtctgatcaagaggagattgactatgacgacaccataagcgtggaaatgaagaaggaggatttcgatatctatgacgaagatgagaaccagtctccgcggagctttcagaagaagacgcgacactacttcattgcagcagtcgaaaggctttgggactacggtatgtcatcatcccctcatgtgttgcgcaatagagctcagagtggaagtgttccacagttcaagaaagtcgtctttcaagagtttacagatggcagcttcacacagcctctctatcggggcgagcttaacgaacatttgggactccttggtccctatatccgagccgaagtggaggacaacattatggttacctttaggaatcaagcctctcgcccctacagcttctactcctccctcatcagttatgaggaggatcagagacaaggcgctgaaccacggaagaactttgtgaaaccgaatgagacgaagacctacttctggaaagtacagcaccacatggcccccacaaaagacgaattcgattgcaaagcatgggcgtatttttcagacgttgacttggagaaagatgtacattcaggacttattggtcctttgttggtgtgtcacactaacactctcaatccagcccatggcaggcaggtgacagtccaggaattcgctcttttctttaccatctttgatgagaccaagtcctggtacttcacggaaaacatggagcgcaattgcagagccccctgtaacatacagatggaggaccctacctttaaggaaaattatcggttccacgcaatcaacggatacattatggatacactccctggccttgtgatggctcaggaccaacgaatcaggtggtacctcctcagcatgggttctaatgagaacatacactccattcacttttcaggacatgtgttcactgtccggaagaaagaagagtataagatggccctctacaatttgtatccaggcgtgtttgagaccgttgaaatgcttccctctaaagctggcatctggagagtagagtgcttgatcggagaacatcttcacgcaggtatgagcaccttgttcctcgtgtacagcaacaaatgtcagaccccacttggcatggccagtggacacattcgcgactttcagatcacagcatctggccagtatggacaatgggccccaaagttggctcgcctccattactccggtagcataaatgcgtggtccactaaagaacctttcagctggattaaggtcgatcttcttgcccccatgatcatccacggcattaagacacagggagcgaggcagaaattctcctccctctacatctcacagttcattattatgtatagtttggacggcaagaagtggcaaacttatagaggtaacagtactggaacactcatggtgttcttcggcaacgttgatagctctggcatcaaacacaacatctttaatcctcccataatagctcggtacatcagattgcatccgacccactacagcattaggagtacactccgaatggagcttatgggttgcgacttgaattcctgttcaatgccactcggaatggagtctaaagccatctctgatgcacagataaccgccagtagctactttacgaacatgtttgctacgtggtcaccctctaaggcaaggcttcatttgcaaggccggtctaatgcctggagacctcaggtgaacaacccgaaagaatggctccaggtggactttcagaagaccatgaaagtaacaggtgtcactactcagggagttaagtccttgctcaccagcatgtatgtgaaggagttccttatttcctcatcacaagatggccaccagtggaccctcttctttcagaatggtaaggtcaaagtgtttcagggcaatcaagacagcttcacacccgtggtgaacagtcttgatcctccactcttgacacgataccttcgaatccatccacagtcttgggttcaccagattgcattgcgcatggaagtacttggatgcgaggctcaggacctctac

SEQ ID NO: 142 - protein, 1457 aa, synthetic construct
  REGION 1..1457: note = Variant of human B-domain deleted Factor VIII
MQIELSTCFFLCLLRFCFSATRRYYLGAVELSWDYMQSDLGELPVDARFPPRVPKSFPFNTSVVYKKTLFVEFTDHLFNIAKPRPPWMGLLGPTIQAEVYDTVVITLKNMASHPVSLHAVGVSYWKASEGAEYDDQTSQREKEDDKVFPGGSHTYVWQVLKENGPMASDPLCLTYSYLSHVDLVKDLNSGLIGALLVCREGSLAKEKTQTLHKFILLFAVFDEGKSWHSETKNSLMQDRDAASARAWPKMHTVNGYVNRSLPGLIGCHRKSVYWHVIGMGTTPEVHSIFLEGHTFLVRNHRQASLEISPITFLTAQTLLMDLGQFLLFCHISSHQHDGMEAYVKVDSCPEEPQLRMKNGEEAEDYDDDLTDSEMDVVRFDDDNSPSFIQIRSVAKKHPKTWVHYIAAEEEDWDYAPLVLAPDDRSYKSQYLNNGPQRIGRKYKKVRFMAYTDETFKTREAIQHESGILGPLLYGEVGDTLLIIFKNQASRPYNIYPHGITDVRPLYSRRLPKGVKHLKDFPILPGEIFKYKWTVTVEDGPTKSDPRCLTRYYSSFVNMERDLASGLIGPLLICYKESVDQRGNQIMSDKRNVILFSVFDENRSWYLTENIQRFLPNPAGVQLEDPEFQASNIMHSINGYVFDSLQLSVCLHEVAYWYILSIGAQTDFLSVFFSGYTFKHKMVYEDTLTLFPFSGETVFMSMENPGLWILGCHNSDFRNRGMTALLKVSSCDKNTGDYYEDSYEDISAYLLSKNNAIEPRSFSQNPPVLKRHQREITRTTLQSDQEEIDYDDTISVEMKKEDFDIYDEDENQSPRSFQKKTRHYFIAAVERLWDYGMSSSPHVLRNRAQSGSVPQFKKVVFQEFTDGSFTQPLYRGELNEHLGLLGPYIRAEVEDNIMVTFRNQASRPYSFYSSLISYEEDQRQGAEPRKNFVKPNETKTYFWKVQHHMAPTKDEFDCKAWAYFSDVDLEKDVHSGLIGPLLVCHTNTLNPAHGRQVTVQEFALFFTIFDETKSWYFTENMERNCRAPCNIQMEDPTFKENYRFHAINGYIMDTLPGLVMAQDQRIRWYLLSMGSNENIHSIHFSGHVFTVRKKEEYKMALYNLYPGVFETVEMLPSKAGIWRVECLIGEHLHAGMSTLFLVYSNKCQTPLGMASGHIRDFQITASGQYGQWAPKLARLHYSGSINAWSTKEPFSWIKVDLLAPMIIHGIKTQGARQKFSSLYISQFIIMYSLDGKKWQTYRGNSTGTLMVFFGNVDSSGIKHNIFNPPIIARYIRLHPTHYSIRSTLRMELMGCDLNSCSMPLGMESKAISDAQITASSYFTNMFATWSPSKARLHLQGRSNAWRPQVNNPKEWLQVDFQKTMKVTGVTTQGVKSLLTSMYVKEFLISSSQDGHQWTLFFQNGKVKVFQGNQDSFTPVVNSLDPPLLTRYLRIHPQSWVHQIALRMEVLGCEAQDLY

SEQ ID NO: 143 - DNA, 4371 bp, synthetic construct
  misc_feature 1..4371: note = Variant of human B-domain deleted Factor VIII
  source 1..4371: mol_type = other DNA
atgcagattgaactgtctacctgcttcttcctctgtttgctgaggttctgctttagcgccactagacggtactaccttggcgctgtggagctgtcctgggactatatgcagagtgatttgggagagcttcccgtcgacgcacgatttcctcctcgcgttccaaagtcatttcccttcaactcgagcgtggtgtacaagaagacgctcttcgtcgaattcaccgatcacctgttcaatatcgccaaacccagaccaccatggatgggtcttttggggcctaccatacaagcggaggtgtatgacacagttgttatcactctcaagaacatggcttctcatccggtaagtcttcacgcagtgggcgtgtcctactggaaagcttcagaaggagccgagtatgatgatcagacatcccagagggagaaagaagacgacaaggtatttccaggtgggtctcatacctatgtgtggcaagtgctcaaagagaatggccctatggcaagcgatccgctctgtttgacttacagctacctttcacacgttgacctcgtcaaggacctcaactccgggttgattggagccttgttggtatgcagggaaggatctcttgccaaagagaagacacagaccctccacaagtttatccttctctttgctgtgttcgatgagggcaaaagttggcatagcgaaacgaagaattccctcatgcaggatcgcgacgcagccagcgccagagcttggcccaagatgcacactgtgaacggatatgtcaataggtcacttcctggcttgattgggtgtcatcggaaaagtgtctactggcacgtgatcggaatggggacaacaccagaggtccactccatatttctcgaaggccataccttccttgttcgaaaccacagacaggcatccttggagatctctcccattacctttctcactgcccaaacgctccttatggacttgggtcagttccttctcttctgccatatcagctcacaccagcatgatggtatggaagcttatgtgaaagtcgacagttgtcctgaggagccacagttgcgcatgaagaataatgaagaagccgaggattacgacgacgatctcaccgattctgagatggacgtggtgaggtttgatgacgacaactctccctccttcattcaaatccggagcgtggcgaagaaacaccccaagacttgggtccactatatagcggcggaagaggaggattgggattacgctcctcttgtattggcaccagatgaccgctcatacaaaagccagtacctcaacaacggaccgcagagaattggccggaagtataagaaagtgcgatttatggcctatacagacgaaacctttaagacaagggaggccatccagcatgagagtgggattttgggacctcttctttacggcgaagttggtgataccctcctcatcatcttcaagaatcaagcttctcgcccctataacatttacccacacgggatcactgacgttaggcctttgtatagcagaagacttcccaaaggcgtgaagcatctcaaagacttccccattttgccaggcgagatctttaagtacaaatggaccgtcacagtggaagatggaccgactaaatcagaccctcgatgccttacgcggtactattcctccttcgtgaatatggagagagatttggcaagcggactcataggaccactcctcatctgttacaaggaatctgtagaccagaggggtaaccagattatgagtgataaacgcaatgtgatcctttttagcgtcttcgacgagaaccggtcctggtacttgaccgagaatatacaaaggttccttcccaaccccgcaggcgttcagttggaagaccctgagtttcaggccagcaatattatgcactcaatcaacggctatgtgtttgatagtctccagctttctgtttgcctccatgaagtagcctattggtacatcttgtcaattggtgctcaaacagacttcctctccgtcttcttctccggctacacctttaagcacaagatggtgtatgaggacactctcacactctttccattttctggagaaaccgtgttcatgagcatggagaatccaggcctttggatcttgggttgccacaacagtgattttcgcaatcggggaatgactgctctcctcaaagtcagcagctgtgataagaacacaggcgactattacgaagattcttacgaggacataagtgcctacttgttgtccaagaataacgccattgagcccagatcattctcccagaatcctcccgtgcttaaaaggcatcagcgcgaaatcaccagaactactcttcagtctgatcaagaggagattgactatgacgacaccataagcgtggaaatgaagaaggaggatttcgatatctatgacgaagatgagaaccagtctccgcggagctttcagaagaagacgcgacactacttcattgcagcagtcgaaaggctttgggactacggtatgtcatcatcccctcatgtgttgcgcaatagagctcagagtggaagtgttccacagttcaagaaagtcgtctttcaagagtttacagatggcagcttcacacagcctctctatcggggcgagcttaacgaacatttgggactccttggtccctatatccgagccgaagtggaggacaacattatggttacctttaggaatcaagcctctcgcccctacagcttctactcctccctcatcagttatgaggaggatcagagacaaggcgctgaaccacggaagaactttgtgaaaccgaatgagacgaagacctacttctggaaagtacagcaccacatggcccccacaaaagacgaattcgattgcaaagcatgggcgtatttttcagacgttgacttggagaaagatgtacattcaggacttattggtcctttgttggtgtgtcacactaacactctcaatccagcccatggcaggcaggtgacagtccaggaattcgctcttttctttaccatctttgatgagaccaagtcctggtacttcacggaaaacatggagcgcaattgcagagccccctgtaacatacagatggaggaccctacctttaaggaaaattatcggttccacgcaatcaacggatacattatggatacactccctggccttgtgatggctcaggaccaacgaatcaggtggtacctcctcagcatgggttctaatgagaacatacactccattcacttttcaggacatgtgttcactgtccggaagaaagaagagtataagatggccctctacaatttgtatccaggcgtgtttgagaccgttgaaatgcttccctctaaagctggcatctggagagtagagtgcttgatcggagaacatcttcacgcaggtatgagcaccttgttcctcgtgtacagcaacaaatgtcagaccccacttggcatggccagtggacacattcgcgactttcagatcacagcatctggccagtatggacaatgggccccaaagttggctcgcctccattactccggtagcataaatgcgtggtccactaaagaacctttcagctggattaaggtcgatcttcttgcccccatgatcatccacggcattaagacacagggagcgaggcagaaattctcctccctctacatctcacagttcattattatgtatagtttggacggcaagaagtggcaaacttatagaggtaacagtactggaacactcatggtgttcttcggcaacgttgatagctctggcatcaaacacaacatctttaatcctcccataatagctcggtacatcagattgcatccgacccactacagcattaggagtacactccgaatggagcttatgggttgcgacttgaattcctgttcaatgccactcggaatggagtctaaagccatctctgatgcacagataaccgccagtagctactttacgaacatgtttgctacgtggtcaccctctaaggcaaggcttcatttgcaaggccggtctaatgcctggagacctcaggtgaacaacccgaaagaatggctccaggtggactttcagaagaccatgaaagtaacaggtgtcactactcagggagttaagtccttgctcaccagcatgtatgtgaaggagttccttatttcctcatcacaagatggccaccagtggaccctcttctttcagaatggtaaggtcaaagtgtttcagggcaatcaagacagcttcacacccgtggtgaacagtcttgatcctccactcttgacacgataccttcgaatccatccacagtcttgggttcaccagattgcattgcgcatggaagtacttggatgcgaggctcaggacctctac

SEQ ID NO: 144 - protein, 1457 aa, synthetic construct
  REGION 1..1457: note = Variant of human B-domain deleted Factor VIII
MQIELSTCFFLCLLRFCFSATRRYYLGAVELSWDYMQSDLGELPVDARFPPRVPKSFPFNSSVVYKKTLFVEFTDHLFNIAKPRPPWMGLLGPTIQAEVYDTVVITLKNMASHPVSLHAVGVSYWKASEGAEYDDQTSQREKEDDKVFPGGSHTYVWQVLKENGPMASDPLCLTYSYLSHVDLVKDLNSGLIGALLVCREGSLAKEKTQTLHKFILLFAVFDEGKSWHSETKNSLMQDRDAASARAWPKMHTVNGYVNRSLPGLIGCHRKSVYWHVIGMGTTPEVHSIFLEGHTFLVRNHRQASLEISPITFLTAQTLLMDLGQFLLFCHISSHQHDGMEAYVKVDSCPEEPQLRMKNNEEAEDYDDDLTDSEMDVVRFDDDNSPSFIQIRSVAKKHPKTWVHYIAAEEEDWDYAPLVLAPDDRSYKSQYLNNGPQRIGRKYKKVRFMAYTDETFKTREAIQHESGILGPLLYGEVGDTLLIIFKNQASRPYNIYPHGITDVRPLYSRRLPKGVKHLKDFPILPGEIFKYKWTVTVEDGPTKSDPRCLTRYYSSFVNMERDLASGLIGPLLICYKESVDQRGNQIMSDKRNVILFSVFDENRSWYLTENIQRFLPNPAGVQLEDPEFQASNIMHSINGYVFDSLQLSVCLHEVAYWYILSIGAQTDFLSVFFSGYTFKHKMVYEDTLTLFPFSGETVFMSMENPGLWILGCHNSDFRNRGMTALLKVSSCDKNTGDYYEDSYEDISAYLLSKNNAIEPRSFSQNPPVLKRHQREITRTTLQSDQEEIDYDDTISVEMKKEDFDIYDEDENQSPRSFQKKTRHYFIAAVERLWDYGMSSSPHVLRNRAQSGSVPQFKKVVFQEFTDGSFTQPLYRGELNEHLGLLGPYIRAEVEDNIMVTFRNQASRPYSFYSSLISYEEDQRQGAEPRKNFVKPNETKTYFWKVQHHMAPTKDEFDCKAWAYFSDVDLEKDVHSGLIGPLLVCHTNTLNPAHGRQVTVQEFALFFTIFDETKSWYFTENMERNCRAPCNIQMEDPTFKENYRFHAINGYIMDTLPGLVMAQDQRIRWYLLSMGSNENIHSIHFSGHVFTVRKKEEYKMALYNLYPGVFETVEMLPSKAGIWRVECLIGEHLHAGMSTLFLVYSNKCQTPLGMASGHIRDFQITASGQYGQWAPKLARLHYSGSINAWSTKEPFSWIKVDLLAPMIIHGIKTQGARQKFSSLYISQFIIMYSLDGKKWQTYRGNSTGTLMVFFGNVDSSGIKHNIFNPPIIARYIRLHPTHYSIRSTLRMELMGCDLNSCSMPLGMESKAISDAQITASSYFTNMFATWSPSKARLHLQGRSNAWRPQVNNPKEWLQVDFQKTMKVTGVTTQGVKSLLTSMYVKEFLISSSQDGHQWTLFFQNGKVKVFQGNQDSFTPVVNSLDPPLLTRYLRIHPQSWVHQIALRMEVLGCEAQDLY

SEQ ID NO: 145 - DNA, 4371 bp, synthetic construct
  misc_feature 1..4371: note = Variant of human B-domain deleted Factor VIII
  source 1..4371: mol_type = other DNA
atgcagattgaactgtctacctgcttcttcctctgtttgctgaggttctgctttagcgccactagacggtactaccttggcgctgtggagctgtcctgggactatatgcagagtgatttgggagagcttcccgtcgacgcacgatttcctcctcgcgttccaaagtcatttcccttcaacacaagcgtggtgtacaagaagacgctcttcgtcgaattcaccgatcacctgttcaatatcgccaaacccagaccaccatggatgggtcttttggggcctaccatacaagcggaggtgtatgacacagttgttatcactctcaagaacatggcttctcatccggtaagtcttcacgcagtgggcgtgtcctactggaaagcttcagaaggagccgagtatgatgatcagacatcccagagggagaaagaagacgacaaggtatttccaggtgggtctcatacctatgtgtggcaagtgctcaaagagaatggccctatggcaagcgatccgctctgtttgacttacagctacctttcacacgttgacctcgtcaaggacctcaactccgggttgattggagccttgttggtatgcagggaaggatctcttgccaaagagaagacacagaccctccacaagtttatccttctctttgctgtgttcgatgagggcaaaagttggcatagcgaaacgaagaattccctcatgcaggatcgcgacgcagccagcgccagagcttggcccaagatgcacactgtgaacggatatgtcaataggtcacttcctggcttgattgggtgtcatcggaaaagtgtctactggcacgtgatcggaatggggacaacaccagaggtccactccatatttctcgaaggccataccttccttgttcgaaaccacagacaggcatccttggagatctctcccattacctttctcactgcccaaacgctccttatggacttgggtcagttccttctcttctgccatatcagctcacaccagcatgatggtatggaagcttatgtgaaagtcgacagttgtcctgaggagccacagttgcgcatgaagaataatgaagaagccgaggattacgacgacgatctcaccgattctgagatggacgtggtgaggtttgatgacgacaactctccctccttcattcaaatccggagcgtggcgaagaaacaccccaagacttgggtccactatatagcggcggaagaggaggattgggattacgctcctcttgtattggcaccagatgaccgctcatacaaaagccagtacctcaacaacggaccgcagagaattggccggaagtataagaaagtgcgatttatggcctatacagacgaaacctttaagacaagggaggccatccagcatgagagtgggattttgggacctcttctttacggcgaagttggtgataccctcctcatcatcttcaagaatcaagcttctcgcccctataacatttacccacacgggatcactgacgttaggcctttgtatagcagaagacttcccaaaggcgtgaagcatctcaaagacttccccattttgccaggcgagatctttaagtacaaatggaccgtcacagtggaagatggaccgactaaatcagaccctcgatgccttacgcggtactattcctccttcgtgaatatggagagagatttggcaagcggactcataggaccactcctcatctgttacaaggaatctgtagaccagaggggtaaccagattatgagtgataaacgcaatgtgatcctttttagcgtcttcgacgagaaccggtcctggtacttgaccgagaatatacaaaggttccttcccaaccccgcaggcgttcagttggaagaccctgagtttcaggccagcaatattatgcactcaatcaacggctatgtgtttgatagtctccagctttctgtttgcctccatgaagtagcctattggtacatcttgtcaattggtgctcaaacagacttcctctccgtcttcttctccggctacacctttaagcacaagatggtgtatgaggacactctcacactctttccattttctggagaaaccgtgttcatgagcatggagaatccaggcctttggatcttgggttgccacaacagtgattttcgcaatcggggaatgactgctctcctcaaagtcagcagctgtgataagaacacaggcgactattacgaagattcttacgaggacataagtgcctacttgttgtccaagaataacgccattgagcccagatcattctcccagaatcctcccgtgcttaaaaggcatcagcgcgaaatcaccagaactactcttcagtctgatcaagaggagattgactatgacgacaccataagcgtggaaatgaagaaggaggatttcgatatctatgacgaagatgagaaccagtctccgcggagctttcagaagaagacgcgacactacttcattgcagcagtcgaaaggctttgggactacggtatgtcatcatcccctcatgtgttgcgcaatagagctcagagtggaagtgttccacagttcaagaaagtcgtctttcaagagtttacagatggcagcttcacacagcctctctatcggggcgagcttaacgaacatttgggactccttggtccctatatccgagccgaagtggaggacaacattatggttacctttaggaatcaagcctctcgcccctacagcttctactcctccctcatcagttatgaggaggatcagagacaaggcgctgaaccacggaagaactttgtgaaaccgaatgagacgaagacctacttctggaaagtacagcaccacatggcccccacaaaagacgaattcgattgcaaagcatgggcgtatttttcagacgttgacttggagaaagatgtacattcaggacttattggtcctttgttggtgtgtcacactaacactctcaatccagcccatggcaggcaggtgacagtccaggaattcgctcttttctttaccatctttgatgagaccaagtcctggtacttcacggaaaacatggagcgcaattgcagagccccctgtaacatacagatggaggaccctacctttaaggaaaattatcggttccacgcaatcaacggatacattatggatacactccctggccttgtgatggctcaggaccaacgaatcaggtggtacctcctcagcatgggttctaatgagaacatacactccattcacttttcaggacatgtgttcactgtccggaagaaagaagagtataagatggccctctacaatttgtatccaggcgtgtttgagaccgttgaaatgcttccctctaaagctggcatctggagagtagagtgcttgatcggagaacatcttcacgcaggtatgagcaccttgttcctcgtgtacagcaacaaatgtcagaccccacttggcatggccagtggacacattcgcgactttcagatcacagcatctggccagtatggacaatgggccccaaagttggctcgcctccattactccggtagcataaatgcgtggtccactaaagaacctttcagctggattaaggtcgatcttcttgcccccatgatcatccacggcattaagacacagggagcgaggcagaaattctcctccctctacatctcacagttcattattatgtatagtttggacggcaagaagtggcaaacttatagaggtaacagtactggaacactcatggcgttcttcggcaacgttgatagctctggcatcaaacacaacatctttaatcctcccataatagctcggtacatcagattgcatccgacccactacagcattaggagtacactccgaatggagcttatgggttgcgacttgaattcctgttcaatgccactcggaatggagtctaaagccatctctgatgcacagataaccgccagtagctactttacgaacatgtttgctacgtggtcaccctctaaggcaaggcttcatttgcaaggccggtctaatgcctggagacctcaggtgaacaacccgaaagaatggctccaggtggactttcagaagaccatgaaagtaacaggtgtcactactcagggagttaagtccttgctcaccagcatgtatgtgaaggagttccttatttcctcatcacaagatggccaccagtggaccctcttctttcagaatggtaaggtcaaagtgtttcagggcaatcaagacagcttcacacccgtggtgaacagtcttgatcctccactcttgacacgataccttcgaatccatccacagtcttgggttcaccagattgcattgcgcatggaagtacttggatgcgaggctcaggacctctac

SEQ ID NO: 146 - protein, 1457 aa, synthetic construct
  REGION 1..1457: note = Variant of human B-domain deleted Factor VIII
MQIELSTCFFLCLLRFCFSATRRYYLGAVELSWDYMQSDLGELPVDARFPPRVPKSFPFNTSVVYKKTLFVEFTDHLFNIAKPRPPWMGLLGPTIQAEVYDTVVITLKNMASHPVSLHAVGVSYWKASEGAEYDDQTSQREKEDDKVFPGGSHTYVWQVLKENGPMASDPLCLTYSYLSHVDLVKDLNSGLIGALLVCREGSLAKEKTQTLHKFILLFAVFDEGKSWHSETKNSLMQDRDAASARAWPKMHTVNGYVNRSLPGLIGCHRKSVYWHVIGMGTTPEVHSIFLEGHTFLVRNHRQASLEISPITFLTAQTLLMDLGQFLLFCHISSHQHDGMEAYVKVDSCPEEPQLRMKNNEEAEDYDDDLTDSEMDVVRFDDDNSPSFIQIRSVAKKHPKTWVHYIAAEEEDWDYAPLVLAPDDRSYKSQYLNNGPQRIGRKYKKVRFMAYTDETFKTREAIQHESGILGPLLYGEVGDTLLIIFKNQASRPYNIYPHGITDVRPLYSRRLPKGVKHLKDFPILPGEIFKYKWTVTVEDGPTKSDPRCLTRYYSSFVNMERDLASGLIGPLLICYKESVDQRGNQIMSDKRNVILFSVFDENRSWYLTENIQRFLPNPAGVQLEDPEFQASNIMHSINGYVFDSLQLSVCLHEVAYWYILSIGAQTDFLSVFFSGYTFKHKMVYEDTLTLFPFSGETVFMSMENPGLWILGCHNSDFRNRGMTALLKVSSCDKNTGDYYEDSYEDISAYLLSKNNAIEPRSFSQNPPVLKRHQREITRTTLQSDQEEIDYDDTISVEMKKEDFDIYDEDENQSPRSFQKKTRHYFIAAVERLWDYGMSSSPHVLRNRAQSGSVPQFKKVVFQEFTDGSFTQPLYRGELNEHLGLLGPYIRAEVEDNIMVTFRNQASRPYSFYSSLISYEEDQRQGAEPRKNFVKPNETKTYFWKVQHHMAPTKDEFDCKAWAYFSDVDLEKDVHSGLIGPLLVCHTNTLNPAHGRQVTVQEFALFFTIFDETKSWYFTENMERNCRAPCNIQMEDPTFKENYRFHAINGYIMDTLPGLVMAQDQRIRWYLLSMGSNENIHSIHFSGHVFTVRKKEEYKMALYNLYPGVFETVEMLPSKAGIWRVECLIGEHLHAGMSTLFLVYSNKCQTPLGMASGHIRDFQITASGQYGQWAPKLARLHYSGSINAWSTKEPFSWIKVDLLAPMIIHGIKTQGARQKFSSLYISQFIIMYSLDGKKWQTYRGNSTGTLMAFFGNVDSSGIKHNIFNPPIIARYIRLHPTHYSIRSTLRMELMGCDLNSCSMPLGMESKAISDAQITASSYFTNMFATWSPSKARLHLQGRSNAWRPQVNNPKEWLQVDFQKTMKVTGVTTQGVKSLLTSMYVKEFLISSSQDGHQWTLFFQNGKVKVFQGNQDSFTPVVNSLDPPLLTRYLRIHPQSWVHQIALRMEVLGCEAQDLY

SEQ ID NO: 147 - DNA, 4371 bp, synthetic construct
  misc_feature 1..4371: note = Variant of human B-domain deleted Factor VIII
  source 1..4371: mol_type = other DNA
atgcagattgaactgtctacctgcttcttcctctgtttgctgaggttctgctttagcgccactagacggtactaccttggcgctgtggagctgtcctgggactatatgcagagtgatttgggagagcttcccgtcgacgcacgatttcctcctcgcgttccaaagtcatttcccttcaacacaagcgtggtgtacaagaagacgctcttcgtcgaattcaccgatcacctgttcaatatcgccaaacccagaccaccatggatgggtcttttggggcctaccatacaagcggaggtgtatgacacagttgttatcactctcaagaacatggcttctcatccggtaagtcttcacgcagtgggcgtgtcctactggaaagcttcagaaggagccgagtatgatgatcagacatcccagagggagaaagaagacgacaaggtatttccaggtgggtctcatacctatgtgtggcaagtgctcaaagagaatggccctatggcaagcgatccgctctgtttgacttacagctacctttcacacgttgacctcgtcaaggacctcaactccgggttgattggagccttgttggtatgcagggaaggatctcttgccaaagagaagacacagaccctccacaagtttatccttctctttgctgtgttcgatgagggcaaaagttggcatagcgaaacgaagaattccctcatgcaggatcgcgacgcagccagcgccagagcttggcccaagatgcacactgtgaacggatatgtcaataggtcacttcctggcttgattgggtgtcatcggaaaagtgtctactggcacgtgatcggaatggggacaacaccagaggtccactccatatttctcgaaggccataccttccttgttcgaaaccacagacaggcatccttggagatctctcccattacctttctcactgcccaaacgctccttatggacttgggtcagttccttctcttctgccatatcagctcacaccagcatgatggtatggaagcttatgtgaaagtcgacagttgtcctgaggagccacagttgcgcatgaagaataatgaagaagttgaggattacgacgacgatctcaccgattctgagatggacgtggtgaggtttgatgacgacaactctccctccttcattcaaatccggagcgtggcgaagaaacaccccaagacttgggtccactatatagcggcggaagaggaggattgggattacgctcctcttgtattggcaccagatgaccgctcatacaaaagccagtacctcaacaacggaccgcagagaattggccggaagtataagaaagtgcgatttatggcctatacagacgaaacctttaagacaagggaggccatccagcatgagagtgggattttgggacctcttctttacggcgaagttggtgataccctcctcatcatcttcaagaatcaagcttctcgcccctataacatttacccacacgggatcactgacgttaggcctttgtatagcagaagacttcccaaaggcgtgaagcatctcaaagacttccccattttgccaggcgagatctttaagtacaaatggaccgtcacagtggaagatggaccgactaaatcagaccctcgatgccttacgcggtactattcctccttcgtgaatatggagagagatttggcaagcggactcataggaccactcctcatctgttacaaggaatctgtagaccagaggggtaaccagattatgagtgataaacgcaatgtgatcctttttagcgtcttcgacgagaaccggtcctggtacttgaccgagaatatacaaaggttccttcccaaccccgcaggcgttcagttggaagaccctgagtttcaggccagcaatattatgcactcaatcaacggctatgtgtttgatagtctccagctttctgtttgcctccatgaagtagcctattggtacatcttgtcaattggtgctcaaacagacttcctctccgtcttcttctccggctacacctttaagcacaagatggtgtatgaggacactctcacactctttccattttctggagaaaccgtgttcatgagcatggagaatccaggcctttggatcttgggttgccacaacagtgattttcgcaatcggggaatgactgctctcctcaaagtcagcagctgtgataagaacacaggcgactattacgaagattcttacgaggacataagtgcctacttgttgtccaagaataacgccattgagcccagatcattctcccagaatcctcccgtgcttaaaaggcatcagcgcgaaatcaccagaactactcttcagtctgatcaagaggagattgactatgacgacaccataagcgtggaaatgaagaaggaggatttcgatatctatgacgaagatgagaaccagtctccgcggagctttcagaagaagacgcgacactacttcattgcagcagtcgaaaggctttgggactacggtatgtcatcatcccctcatgtgttgcgcaatagagctcagagtggaagtgttccacagttcaagaaagtcgtctttcaagagtttacagatggcagcttcacacagcctctctatcggggcgagcttaacgaacatttgggactccttggtccctatatccgagccgaagtggaggacaacattatggttacctttaggaatcaagcctctcgcccctacagcttctactcctccctcatcagttatgaggaggatcagagacaaggcgctgaaccacggaagaactttgtgaaaccgaatgagacgaagacctacttctggaaagtacagcaccacatggcccccacaaaagacgaattcgattgcaaagcatgggcgtatttttcagacgttgacttggagaaagatgtacattcaggacttattggtcctttgttggtgtgtcacactaacactctcaatccagcccatggcaggcaggtgacagtccaggaattcgctcttttctttaccatctttgatgagaccaagtcctggtacttcacggaaaacatggagcgcaattgcagagccccctgtaacatacagatggaggaccctacctttaaggaaaattatcggttccacgcaatcaacggatacattatggatacactccctggccttgtgatggctcaggaccaacgaatcaggtggtacctcctcagcatgggttctaatgagaacatacactccattcacttttcaggacatgtgttcactgtccggaagaaagaagagtataagatggccctctacaatttgtatccaggcgtgtttgagaccgttgaaatgcttccctctaaagctggcatctggagagtagagtgcttgatcggagaacatcttcacgcaggtatgagcaccttgttcctcgtgtacagcaacaaatgtcagaccccacttggcatggccagtggacacattcgcgactttcagatcacagcatctggccagtatggacaatgggccccaaagttggctcgcctccattactccggtagcataaatgcgtggtccactaaagaacctttcagctggattaaggtcgatcttcttgcccccatgatcatccacggcattaagacacagggagcgaggcagaaattctcctccctctacatctcacagttcattattatgtatagtttggacggcaagaagtggcaaacttatagaggtaacagtactggaacactcatggtgttcttcggcaacgttgatagctctggcatcaaacacaacatctttaatcctcccataatagctcggtacatcagattgcatccgacccactacagcattaggagtacactccgaatggagcttatgggttgcgacttgaattcctgttcaatgccactcggaatggagtctaaagccatctctgatgcacagataaccgccagtagctactttacgaacatgtttgctacgtggtcaccctctaaggcaaggcttcatttgcaaggccggtctaatgcctggagacctcaggtgaacaacccgaaagaatggctccaggtggactttcagaagaccatgaaagtaacaggtgtcactactcagggagttaagtccttgctcaccagcatgtatgtgaaggagttccttatttcctcatcacaagatggccaccagtggaccctcttctttcagaatggtaaggtcaaagtgtttcagggcaatcaagacagcttcacacccgtggtgaacagtcttgatcctccactcttgacacgataccttcgaatccatccacagtcttgggttcaccagattgcattgcgcatggaagtacttggatgcgaggctcaggacctctac

SEQ ID NO: 148 - protein, 1457 aa, synthetic construct
  REGION 1..1457: note = Variant of human B-domain deleted Factor VIII
MQIELSTCFFLCLLRFCFSATRRYYLGAVELSWDYMQSDLGELPVDARFPPRVPKSFPFNTSVVYKKTLFVEFTDHLFNIAKPRPPWMGLLGPTIQAEVYDTVVITLKNMASHPVSLHAVGVSYWKASEGAEYDDQTSQREKEDDKVFPGGSHTYVWQVLKENGPMASDPLCLTYSYLSHVDLVKDLNSGLIGALLVCREGSLAKEKTQTLHKFILLFAVFDEGKSWHSETKNSLMQDRDAASARAWPKMHTVNGYVNRSLPGLIGCHRKSVYWHVIGMGTTPEVHSIFLEGHTFLVRNHRQASLEISPITFLTAQTLLMDLGQFLLFCHISSHQHDGMEAYVKVDSCPEEPQLRMKNNEEVEDYDDDLTDSEMDVVRFDDDNSPSFIQIRSVAKKHPKTWVHYIAAEEEDWDYAPLVLAPDDRSYKSQYLNNGPQRIGRKYKKVRFMAYTDETFKTREAIQHESGILGPLLYGEVGDTLLIIFKNQASRPYNIYPHGITDVRPLYSRRLPKGVKHLKDFPILPGEIFKYKWTVTVEDGPTKSDPRCLTRYYSSFVNMERDLASGLIGPLLICYKESVDQRGNQIMSDKRNVILFSVFDENRSWYLTENIQRFLPNPAGVQLEDPEFQASNIMHSINGYVFDSLQLSVCLHEVAYWYILSIGAQTDFLSVFFSGYTFKHKMVYEDTLTLFPFSGETVFMSMENPGLWILGCHNSDFRNRGMTALLKVSSCDKNTGDYYEDSYEDISAYLLSKNNAIEPRSFSQNPPVLKRHQREITRTTLQSDQEEIDYDDTISVEMKKEDFDIYDEDENQSPRSFQKKTRHYFIAAVERLWDYGMSSSPHVLRNRAQSGSVPQFKKVVFQEFTDGSFTQPLYRGELNEHLGLLGPYIRAEVEDNIMVTFRNQASRPYSFYSSLISYEEDQRQGAEPRKNFVKPNETKTYFWKVQHHMAPTKDEFDCKAWAYFSDVDLEKDVHSGLIGPLLVCHTNTLNPAHGRQVTVQEFALFFTIFDETKSWYFTENMERNCRAPCNIQMEDPTFKENYRFHAINGYIMDTLPGLVMAQDQRIRWYLLSMGSNENIHSIHFSGHVFTVRKKEEYKMALYNLYPGVFETVEMLPSKAGIWRVECLIGEHLHAGMSTLFLVYSNKCQTPLGMASGHIRDFQITASGQYGQWAPKLARLHYSGSINAWSTKEPFSWIKVDLLAPMIIHGIKTQGARQKFSSLYISQFIIMYSLDGKKWQTYRGNSTGTLMVFFGNVDSSGIKHNIFNPPIIARYIRLHPTHYSIRSTLRMELMGCDLNSCSMPLGMESKAISDAQITASSYFTNMFATWSPSKARLHLQGRSNAWRPQVNNPKEWLQVDFQKTMKVTGVTTQGVKSLLTSMYVKEFLISSSQDGHQWTLFFQNGKVKVFQGNQDSFTPVVNSLDPPLLTRYLRIHPQSWVHQIALRMEVLGCEAQDLY

SEQ ID NO: 149 - DNA, 4371 bp, synthetic construct
  misc_feature 1..4371: note = Variant of human B-domain deleted Factor VIII
  source 1..4371: mol_type = other DNA
atgcagattgaactgtctacctgcttcttcctctgtttgctgaggttctgctttagcgccactagacggtactaccttggcgctgtggagctgtcctgggactatatgcagagtgatttgggagagcttcccgtcgacgcacgatttcctcctcgcgttccaaagtcatttcccttcaacacaagcgtggtgtacaagaagacgctcttcgtcgaattcaccgatcacctgttcaatatcgccaaacccagaccaccatggatgggtcttttggggcctaccatacaagcggaggtgtatgacacagttgttatcactctcaagaacatggcttctcatccggtaagtcttcacgcagtgggcgtgtcctactggaaagcttcagaaggagccgagtatgatgatcagacatcccagagggagaaagaagacgacaaggtatttccaggtgggtctcatacctatgtgtggcaagtgctcaaagagaatggccctatggcaagcgatccgctctgtttgacttacagctacctttcacacgttgacctcgtcaaggacctcaactccgggttgattggagccttgttggtatgcagggaaggatctcttgccaaagagaagacacagaccctccacaagtttatccttctctttgctgtgttcgatgagggcaaaagttggcatagcgaaacgaagaattccctcatgcaggatcgcgacgcagccagcgccagagcttggcccaagatgcacactgtgaacggatatgtcaataggtcacttcctggcttgattgggtgtcatcggaaaagtgtctactggcacgtgatcggaatggggacaacaccagaggtccactccatatttctcgaaggccataccttccttgttcgaaaccacagacaggcatccttggagatctctcccattacctttctcactgcccaaacgctccttatggacttgggtcagttccttctcttctgccatatcagctcacaccagcatgatggtatggaagcttatgtgaaagtcgacagttgtcctgaggagccacagttgcgcatgaagaatgaggaagaagccgaggattacgacgacgatctcaccgattctgagatggacgtggtgaggtttgatgacgacaactctccctccttcattcaaatccggagcgtggcgaagaaacaccccaagacttgggtccactatatagcggcggaagaggaggattgggattacgctcctcttgtattggcaccagatgaccgctcatacaaaagccagtacctcaacaacggaccgcagagaattggccggaagtataagaaagtgcgatttatggcctatacagacgaaacctttaagacaagggaggccatccagcatgagagtgggattttgggacctcttctttacggcgaagttggtgataccctcctcatcatcttcaagaatcaagcttctcgcccctataacatttacccacacgggatcactgacgttaggcctttgtatagcagaagacttcccaaaggcgtgaagcatctcaaagacttccccattttgccaggcgagatctttaagtacaaatggaccgtcacagtggaagatggaccgactaaatcagaccctcgatgccttacgcggtactattcctccttcgtgaatatggagagagatttggcaagcggactcataggaccactcctcatctgttacaaggaatctgtagaccagaggggtaaccagattatgagtgataaacgcaatgtgatcctttttagcgtcttcgacgagaaccggtcctggtacttgaccgagaatatacaaaggttccttcccaaccccgcaggcgttcagttggaagaccctgagtttcaggccagcaatattatgcactcaatcaacggctatgtgtttgatagtctccagctttctgtttgcctccatgaagtagcctattggtacatcttgtcaattggtgctcaaacagacttcctctccgtcttcttctccggctacacctttaagcacaagatggtgtatgaggacactctcacactctttccattttctggagaaaccgtgttcatgagcatggagaatccaggcctttggatcttgggttgccacaacagtgattttcgcaatcggggaatgactgctctcctcaaagtcagcagctgtgataagaacacaggcgactattacgaagattcttacgaggacataagtgcctacttgttgtccaagaataacgccattgagcccagatcattctcccagaatcctcccgtgcttaaaaggcatcagcgcgaaatcaccagaactactcttcagtctgatcaagaggagattgactatgacgacaccataagcgtggaaatgaagaaggaggatttcgatatctatgacgaagatgagaaccagtctccgcggagctttcagaagaagacgcgacactacttcattgcagcagtcgaaaggctttgggactacggtatgtcatcatcccctcatgtgttgcgcaatagagctcagagtggaagtgttccacagttcaagaaagtcgtctttcaagagtttacagatggcagcttcacacagcctctctatcggggcgagcttaacgaacatttgggactccttggtccctatatccgagccgaagtggaggacaacattatggttacctttaggaatcaagcctctcgcccctacagcttctactcctccctcatcagttatgaggaggatcagagacaaggcgctgaaccacggaagaactttgtgaaaccgaatgagacgaagacctacttctggaaagtacagcaccacatggcccccacaaaagacgaattcgattgcaaagcatgggcgtatttttcagacgttgacttggagaaagatgtacattcaggacttattggtcctttgttggtgtgtcacactaacactctcaatccagcccatggcaggcaggtgacagtccaggaattcgctcttttctttaccatctttgatgagaccaagtcctggtacttcacggaaaacatggagcgcaattgcagagccccctgtaacatacagatggaggaccctacctttaaggaaaattatcggttccacgcaatcaacggatacattatggatacactccctggccttgtgatggctcaggaccaacgaatcaggtggtacctcctcagcatgggttctaatgagaacatacactccattcacttttcaggacatgtgttcactgtccggaagaaagaagagtataagatggccctctacaatttgtatccaggcgtgtttgagaccgttgaaatgcttccctctaaagctggcatctggagagtagagtgcttgatcggagaacatcttcacgcaggtatgagcaccttgttcctcgtgtacagcaacaaatgtcagaccccacttggcatggccagtggacacattcgcgactttcagatcacagcatctggccagtatggacaatgggccccaaagttggctcgcctccattactccggtagcataaatgcgtggtccactaaagaacctttcagctggattaaggtcgatcttcttgcccccatgatcatccacggcattaagacacagggagcgaggcagaaattctcctccctctacatctcacagttcattattatgtatagtttggacggcaagaagtggcaaacttatagaggtaacagtactggaacactcatggtgttcttcggcaacgttgatagctctggcatcaaacacaacatctttaatcctcccataatagctcggtacatcagattgcatccgacccactacagcattaggagtacactccgaatggagcttatgggttgcgacttgaattcctgttcaatgccactcggaatggagtctaaagccatctctgatgcacagataaccgccagtagctactttacgaacatgtttgctacgtggtcaccctctaaggcaaggcttcatttgcaaggccggtctaatgcctggagacctcaggtgaacaacccgaaagaatggctccaggtggactttcagaagaccatgaaagtaacaggtgtcactactcagggagttaagtccttgctcaccagcatgtatgtgaaggagttccttatttcctcatcacaagatggccaccagtggaccctcttctttcagaatggtaaggtcaaagtgtttcagggcaatcaagacagcttcacacccgtggtgaacagtcttgatcctccactcttgacacgataccttcgaatccatccacagtcttgggttcaccagattgcattgcgcatggaagtacttggatgcgaggctcaggacctctac

SEQ ID NO: 150 - protein, 1457 aa, synthetic construct
  REGION 1..1457: note = Variant of human B-domain deleted Factor VIII
MQIELSTCFFLCLLRFCFSATRRYYLGAVELSWDYMQSDLGELPVDARFPPRVPKSFPFNTSVVYKKTLFVEFTDHLFNIAKPRPPWMGLLGPTIQAEVYDTVVITLKNMASHPVSLHAVGVSYWKASEGAEYDDQTSQREKEDDKVFPGGSHTYVWQVLKENGPMASDPLCLTYSYLSHVDLVKDLNSGLIGALLVCREGSLAKEKTQTLHKFILLFAVFDEGKSWHSETKNSLMQDRDAASARAWPKMHTVNGYVNRSLPGLIGCHRKSVYWHVIGMGTTPEVHSIFLEGHTFLVRNHRQASLEISPITFLTAQTLLMDLGQFLLFCHISSHQHDGMEAYVKVDSCPEEPQLRMKNEEEAEDYDDDLTDSEMDVVRFDDDNSPSFIQIRSVAKKHPKTWVHYIAAEEEDWDYAPLVLAPDDRSYKSQYLNNGPQRIGRKYKKVRFMAYTDETFKTREAIQHESGILGPLLYGEVGDTLLIIFKNQASRPYNIYPHGITDVRPLYSRRLPKGVKHLKDFPILPGEIFKYKWTVTVEDGPTKSDPRCLTRYYSSFVNMERDLASGLIGPLLICYKESVDQRGNQIMSDKRNVILFSVFDENRSWYLTENIQRFLPNPAGVQLEDPEFQASNIMHSINGYVFDSLQLSVCLHEVAYWYILSIGAQTDFLSVFFSGYTFKHKMVYEDTLTLFPFSGETVFMSMENPGLWILGCHNSDFRNRGMTALLKVSSCDKNTGDYYEDSYEDISAYLLSKNNAIEPRSFSQNPPVLKRHQREITRTTLQSDQEEIDYDDTISVEMKKEDFDIYDEDENQSPRSFQKKTRHYFIAAVERLWDYGMSSSPHVLRNRAQSGSVPQFKKVVFQEFTDGSFTQPLYRGELNEHLGLLGPYIRAEVEDNIMVTFRNQASRPYSFYSSLISYEEDQRQGAEPRKNFVKPNETKTYFWKVQHHMAPTKDEFDCKAWAYFSDVDLEKDVHSGLIGPLLVCHTNTLNPAHGRQVTVQEFALFFTIFDETKSWYFTENMERNCRAPCNIQMEDPTFKENYRFHAINGYIMDTLPGLVMAQDQRIRWYLLSMGSNENIHSIHFSGHVFTVRKKEEYKMALYNLYPGVFETVEMLPSKAGIWRVECLIGEHLHAGMSTLFLVYSNKCQTPLGMASGHIRDFQITASGQYGQWAPKLARLHYSGSINAWSTKEPFSWIKVDLLAPMIIHGIKTQGARQKFSSLYISQFIIMYSLDGKKWQTYRGNSTGTLMVFFGNVDSSGIKHNIFNPPIIARYIRLHPTHYSIRSTLRMELMGCDLNSCSMPLGMESKAISDAQITASSYFTNMFATWSPSKARLHLQGRSNAWRPQVNNPKEWLQVDFQKTMKVTGVTTQGVKSLLTSMYVKEFLISSSQDGHQWTLFFQNGKVKVFQGNQDSFTPVVNSLDPPLLTRYLRIHPQSWVHQIALRMEVLGCEAQDLY

SEQ ID NO: 151 - DNA, 4371 bp, synthetic construct
  misc_feature 1..4371: note = Variant of human B-domain deleted Factor VIII
  source 1..4371: mol_type = other DNA
atgcagattgaactgtctacctgcttcttcctctgtttgctgaggttctgctttagcgccactagacggtactaccttggcgctgtggagctgtcctgggactatatgcagagtgatttgggagagcttcccgtcgacgcacgatttcctcctcgcgttccaaagtcatttcccttcaacacaagcgtggtgtacaagaagacgctcttcgtcgaattcaccgatcacctgttcaatatcgccaaacccagaccaccatggatgggtcttttggggcctaccatacaagcggaggtgtatgacacagttgttatcactctcaagaacatggcttctcatccggtaagtcttcacgcagtgggcgtgtcctactggaaagcttcagaaggagccgagtatgatgatcagacatcccagagggagaaagaagacgacaaggtatttccaggtgggtctcatacctatgtgtggcaagtgctcaaagagaatggccctatggcaagcgatccgctctgtttgacttacagctacctttcacacgttgacctcgtcaaggacctcaactccgggttgattggagccttgttggtatgcagggaaggatctcttgccaaagagaagacacagaccctccacaagtttatccttctctttgctgtgttcgatgagggcaaaagttggcatagcgaaacgaagaattccctcatgcaggatcgcgacgcagccagcgccagagcttggcccaagatgcacactgtgaacggatatgtcaataggtcacttcctggcttgattgggtgtcatcggaaaagtgtctactggcacgtgatcggaatggggacaacaccagaggtccactccatatttctcgaaggccataccttccttgttcgaaaccacagacaggcatccttggagatctctcccattacctttctcactgcccaaacgctccttatggacttgggtcagttccttctcttctgccatatcagctcacaccagcatgatggtatggaagcttatgtgaaagtcgacagttgtcctgaggagccacagttgcgcatgaagaataatgaagaagccgaggattacgacgacgatctcaccgattctgagatggacgtggtgaggtttgatgacgacaactctccctccttcattcaaatccggagcgtggcgaagaaacaccccaagacttgggtccactatatagcggcggaagaggaggattgggattacgctcctcttgtattggcaccagatgaccgctcatacaaaagccagtacctcaacaacggaccgcagagaattggccggaagtataagaaagtgcgatttatggcctatacagacgaaacctttaagacaagggaggccatccagcatgagagtgggattttgggacctcttctttacggcgaagttggtgataccctcctcatcatcttcaagaatcaagcttctcgcccctataacatttacccacacgggatcactgacgttaggcctttgtatagcagaagacttcccaaaggcgtgaagcatctcaaagacttccccattttgccaggcgagatctttaagtacaaatggaccgtcacagtggaagatggaccgactaaatcagaccctcgatgccttacgcggtactattcctccttcgtgaatatggagagagatttggcaagcggactcataggaccactcctcatctgttacaaggaatctgtagaccagaggggtaaccagattatgagtgataaacgcaatgtgatcctttttagcgtcttcgacgagaaccggtcctggtacttgaccgagaatatacaaaggttccttcccaaccccgcaggcgttcagttggaagaccctgagtttcaggccagcaatattatgcactcaatcaacggctatgtgtttgatagtctccagctttctgtttgcctccatgaagtagcctattggtacatcttgtcaattggtgctcaaacagacttcctctccgtcttcttctccggctacacctttaagcacaagatggtgtatgaggacactctcacactctttccattttctggagaaaccgtgttcatgagcatggagaatccaggcctttggatcttgggttgccacaacagtgattggcgcaatcggggaatgactgctctcctcaaagtcagcagctgtgataagaacacaggcgactattacgaagattcttacgaggacataagtgcctacttgttgtccaagaataacgccattgagcccagatcattctcccagaatcctcccgtgcttaaaaggcatcagcgcgaaatcaccagaactactcttcagtctgatcaagaggagattgactatgacgacaccataagcgtggaaatgaagaaggaggatttcgatatctatgacgaagatgagaaccagtctccgcggagctttcagaagaagacgcgacactacttcattgcagcagtcgaaaggctttgggactacggtatgtcatcatcccctcatgtgttgcgcaatagagctcagagtggaagtgttccacagttcaagaaagtcgtctttcaagagtttacagatggcagcttcacacagcctctctatcggggcgagcttaacgaacatttgggactccttggtccctatatccgagccgaagtggaggacaacattatggttacctttaggaatcaagcctctcgcccctacagcttctactcctccctcatcagttatgaggaggatcagagacaaggcgctgaaccacggaagaactttgtgaaaccgaatgagacgaagacctacttctggaaagtacagcaccacatggcccccacaaaagacgaattcgattgcaaagcatgggcgtatttttcagacgttgacttggagaaagatgtacattcaggacttattggtcctttgttggtgtgtcacactaacactctcaatccagcccatggcaggcaggtgacagtccaggaattcgctcttttctttaccatctttgatgagaccaagtcctggtacttcacggaaaacatggagcgcaattgcagagccccctgtaacatacagatggaggaccctacctttaaggaaaattatcggttccacgcaatcaacggatacattatggatacactccctggccttgtgatggctcaggaccaacgaatcaggtggtacctcctcagcatgggttctaatgagaacatacactccattcacttttcaggacatgtgttcactgtccggaagaaagaagagtataagatggccctctacaatttgtatccaggcgtgtttgagaccgttgaaatgcttccctctaaagctggcatctggagagtagagtgcttgatcggagaacatcttcacgcaggtatgagcaccttgttcctcgtgtacagcaacaaatgtcagaccccacttggcatggccagtggacacattcgcgactttcagatcacagcatctggccagtatggacaatgggccccaaagttggctcgcctccattactccggtagcataaatgcgtggtccactaaagaacctttcagctggattaaggtcgatcttcttgcccccatgatcatccacggcattaagacacagggagcgaggcagaaattctcctccctctacatctcacagttcattattatgtatagtttggacggcaagaagtggcaaacttatagaggtaacagtactggaacactcatggtgttcttcggcaacgttgatagctctggcatcaaacacaacatctttaatcctcccataatagctcggtacatcagattgcatccgacccactacagcattaggagtacactccgaatggagcttatgggttgcgacttgaattcctgttcaatgccactcggaatggagtctaaagccatctctgatgcacagataaccgccagtagctactttacgaacatgtttgctacgtggtcaccctctaaggcaaggcttcatttgcaaggccggtctaatgcctggagacctcaggtgaacaacccgaaagaatggctccaggtggactttcagaagaccatgaaagtaacaggtgtcactactcagggagttaagtccttgctcaccagcatgtatgtgaaggagttccttatttcctcatcacaagatggccaccagtggaccctcttctttcagaatggtaaggtcaaagtgtttcagggcaatcaagacagcttcacacccgtggtgaacagtcttgatcctccactcttgacacgataccttcgaatccatccacagtcttgggttcaccagattgcattgcgcatggaagtacttggatgcgaggctcaggacctctac

SEQ ID NO: 152 - protein, 1457 aa, synthetic construct
  REGION 1..1457: note = Variant of human B-domain deleted Factor VIII
MQIELSTCFFLCLLRFCFSATRRYYLGAVELSWDYMQSDLGELPVDARFPPRVPKSFPFNTSVVYKKTLFVEFTDHLFNIAKPRPPWMGLLGPTIQAEVYDTVVITLKNMASHPVSLHAVGVSYWKASEGAEYDDQTSQREKEDDKVFPGGSHTYVWQVLKENGPMASDPLCLTYSYLSHVDLVKDLNSGLIGALLVCREGSLAKEKTQTLHKFILLFAVFDEGKSWHSETKNSLMQDRDAASARAWPKMHTVNGYVNRSLPGLIGCHRKSVYWHVIGMGTTPEVHSIFLEGHTFLVRNHRQASLEISPITFLTAQTLLMDLGQFLLFCHISSHQHDGMEAYVKVDSCPEEPQLRMKNNEEAEDYDDDLTDSEMDVVRFDDDNSPSFIQIRSVAKKHPKTWVHYIAAEEEDWDYAPLVLAPDDRSYKSQYLNNGPQRIGRKYKKVRFMAYTDETFKTREAIQHESGILGPLLYGEVGDTLLIIFKNQASRPYNIYPHGITDVRPLYSRRLPKGVKHLKDFPILPGEIFKYKWTVTVEDGPTKSDPRCLTRYYSSFVNMERDLASGLIGPLLICYKESVDQRGNQIMSDKRNVILFSVFDENRSWYLTENIQRFLPNPAGVQLEDPEFQASNIMHSINGYVFDSLQLSVCLHEVAYWYILSIGAQTDFLSVFFSGYTFKHKMVYEDTLTLFPFSGETVFMSMENPGLWILGCHNSDWRNRGMTALLKVSSCDKNTGDYYEDSYEDISAYLLSKNNAIEPRSFSQNPPVLKRHQREITRTTLQSDQEEIDYDDTISVEMKKEDFDIYDEDENQSPRSFQKKTRHYFIAAVERLWDYGMSSSPHVLRNRAQSGSVPQFKKVVFQEFTDGSFTQPLYRGELNEHLGLLGPYIRAEVEDNIMVTFRNQASRPYSFYSSLISYEEDQRQGAEPRKNFVKPNETKTYFWKVQHHMAPTKDEFDCKAWAYFSDVDLEKDVHSGLIGPLLVCHTNTLNPAHGRQVTVQEFALFFTIFDETKSWYFTENMERNCRAPCNIQMEDPTFKENYRFHAINGYIMDTLPGLVMAQDQRIRWYLLSMGSNENIHSIHFSGHVFTVRKKEEYKMALYNLYPGVFETVEMLPSKAGIWRVECLIGEHLHAGMSTLFLVYSNKCQTPLGMASGHIRDFQITASGQYGQWAPKLARLHYSGSINAWSTKEPFSWIKVDLLAPMIIHGIKTQGARQKFSSLYISQFIIMYSLDGKKWQTYRGNSTGTLMVFFGNVDSSGIKHNIFNPPIIARYIRLHPTHYSIRSTLRMELMGCDLNSCSMPLGMESKAISDAQITASSYFTNMFATWSPSKARLHLQGRSNAWRPQVNNPKEWLQVDFQKTMKVTGVTTQGVKSLLTSMYVKEFLISSSQDGHQWTLFFQNGKVKVFQGNQDSFTPVVNSLDPPLLTRYLRIHPQSWVHQIALRMEVLGCEAQDLY

SEQ ID NO: 153 - DNA, 4371 bp, synthetic construct
  misc_feature 1..4371: note = Variant of human B-domain deleted Factor VIII
  source 1..4371: mol_type = other DNA
atgcagattgaactgtctacctgcttcttcctctgtttgctgaggttctgctttagcgccactagacggtactaccttggcgctgtggagctgtcctgggactatatgcagagtgatttgggagagcttcccgtcgacgcacgatttcctcctcgcgttccaaagtcatttcccttcaacacaagcgtggtgtacaagaagacgctcttcgtcgaattcaccgatcacctgttcaatatcgccaaacccagaccaccatggatgggtcttttggggcctaccatacaagcggaggtgtatgacacagttgttatcactctcaagaacatggcttctcatccggtaagtcttcacgcagtgggcgtgtcctactggaaagcttcagaaggagccgagtatgatgatcagacatcccagagggagaaagaagacgacaaggtatttccaggtgggtctcatacctatgtgtggcaagtgctcaaagagaatggccctatggcaagcgatccgctctgtttgacttacagctacctttcacacgttgacctcgtcaaggacctcaactccgggttgattggagccttgttggtatgcagggaaggatctcttgccaaagagaagacacagaccctccacaagtttatccttctctttgctgtgttcgatgagggcaaaagttggcatagcgaaacgaagaattccctcatgcaggatcgcgacgcagccagcgccagagcttggcccaagatgcacactgtgaacggatatgtcaataggtcacttcctggcttgattgggtgtcatcggaaaagtgtctactggcacgtgatcggaatggggacaacaccagaggtccactccatatttctcgaaggccataccttccttgttcgaaaccacagacaggcatccttggagatctctcccattacctttctcactgcccaaacgctccttatggacttgggtcagttccttctcttctgccatatctggtcacaccagcatgatggtatggaagcttatgtgaaagtcgacagttgtcctgaggagccacagttgcgcatgaagaataatgaagaagccgaggattacgacgacgatctcaccgattctgagatggacgtggtgaggtttgatgacgacaactctccctccttcattcaaatccggagcgtggcgaagaaacaccccaagacttgggtccactatatagcggcggaagaggaggattgggattacgctcctcttgtattggcaccagatgaccgctcatacaaaagccagtacctcaacaacggaccgcagagaattggccggaagtataagaaagtgcgatttatggcctatacagacgaaacctttaagacaagggaggccatccagcatgagagtgggattttgggacctcttctttacggcgaagttggtgataccctcctcatcatcttcaagaatcaagcttctcgcccctataacatttacccacacgggatcactgacgttaggcctttgtatagcagaagacttcccaaaggcgtgaagcatctcaaagacttccccattttgccaggcgagatctttaagtacaaatggaccgtcacagtggaagatggaccgactaaatcagaccctcgatgccttacgcggtactattcctccttcgtgaatatggagagagatttggcaagcggactcataggaccactcctcatctgttacaaggaatctgtagaccagaggggtaaccagattatgagtgataaacgcaatgtgatcctttttagcgtcttcgacgagaaccggtcctggtacttgaccgagaatatacaaaggttccttcccaaccccgcaggcgttcagttggaagaccctgagtttcaggccagcaatattatgcactcaatcaacggctatgtgtttgatagtctccagctttctgtttgcctccatgaagtagcctattggtacatcttgtcaattggtgctcaaacagacttcctctccgtcttcttctccggctacacctttaagcacaagatggtgtatgaggacactctcacactctttccattttctggagaaaccgtgttcatgagcatggagaatccaggcctttggatcttgggttgccacaacagtgattttcgcaatcggggaatgactgctctcctcaaagtcagcagctgtgataagaacacaggcgactattacgaagattcttacgaggacataagtgcctacttgttgtccaagaataacgccattgagcccagatcattctcccagaatcctcccgtgcttaaaaggcatcagcgcgaaatcaccagaactactcttcagtctgatcaagaggagattgactatgacgacaccataagcgtggaaatgaagaaggaggatttcgatatctatgacgaagatgagaaccagtctccgcggagctttcagaagaagacgcgacactacttcattgcagcagtcgaaaggctttgggactacggtatgtcatcatcccctcatgtgttgcgcaatagagctcagagtggaagtgttccacagttcaagaaagtcgtctttcaagagtttacagatggcagcttcacacagcctctctatcggggcgagcttaacgaacatttgggactccttggtccctatatccgagccgaagtggaggacaacattatggttacctttaggaatcaagcctctcgcccctacagcttctactcctccctcatcagttatgaggaggatcagagacaaggcgctgaaccacggaagaactttgtgaaaccgaatgagacgaagacctacttctggaaagtacagcaccacatggcccccacaaaagacgaattcgattgcaaagcatgggcgtatttttcagacgttgacttggagaaagatgtacattcaggacttattggtcctttgttggtgtgtcacactaacactctcaatccagcccatggcaggcaggtgacagtccaggaattcgctcttttctttaccatctttgatgagaccaagtcctggtacttcacggaaaacatggagcgcaattgcagagccccctgtaacatacagatggaggaccctacctttaaggaaaattatcggttccacgcaatcaacggatacattatggatacactccctggccttgtgatggctcaggaccaacgaatcaggtggtacctcctcagcatgggttctaatgagaacatacactccattcacttttcaggacatgtgttcactgtccggaagaaagaagagtataagatggccctctacaatttgtatccaggcgtgtttgagaccgttgaaatgcttccctctaaagctggcatctggagagtagagtgcttgatcggagaacatcttcacgcaggtatgagcaccttgttcctcgtgtacagcaacaaatgtcagaccccacttggcatggccagtggacacattcgcgactttcagatcacagcatctggccagtatggacaatgggccccaaagttggctcgcctccattactccggtagcataaatgcgtggtccactaaagaacctttcagctggattaaggtcgatcttcttgcccccatgatcatccacggcattaagacacagggagcgaggcagaaattctcctccctctacatctcacagttcattattatgtatagtttggacggcaagaagtggcaaacttatagaggtaacagtactggaacactcatggtgttcttcggcaacgttgatagctctggcatcaaacacaacatctttaatcctcccataatagctcggtacatcagattgcatccgacccactacagcattaggagtacactccgaatggagcttatgggttgcgacttgaattcctgttcaatgccactcggaatggagtctaaagccatctctgatgcacagataaccgccagtagctactttacgaacatgtttgctacgtggtcaccctctaaggcaaggcttcatttgcaaggccggtctaatgcctggagacctcaggtgaacaacccgaaagaatggctccaggtggactttcagaagaccatgaaagtaacaggtgtcactactcagggagttaagtccttgctcaccagcatgtatgtgaaggagttccttatttcctcatcacaagatggccaccagtggaccctcttctttcagaatggtaaggtcaaagtgtttcagggcaatcaagacagcttcacacccgtggtgaacagtcttgatcctccactcttgacacgataccttcgaatccatccacagtcttgggttcaccagattgcattgcgcatggaagtacttggatgcgaggctcaggacctctac

SEQ ID NO: 154 - protein, 1457 aa, synthetic construct
  REGION 1..1457: note = Variant of human B-domain deleted Factor VIII
MQIELSTCFFLCLLRFCFSATRRYYLGAVELSWDYMQSDLGELPVDARFPPRVPKSFPFNTSVVYKKTLFVEFTDHLFNIAKPRPPWMGLLGPTIQAEVYDTVVITLKNMASHPVSLHAVGVSYWKASEGAEYDDQTSQREKEDDKVFPGGSHTYVWQVLKENGPMASDPLCLTYSYLSHVDLVKDLNSGLIGALLVCREGSLAKEKTQTLHKFILLFAVFDEGKSWHSETKNSLMQDRDAASARAWPKMHTVNGYVNRSLPGLIGCHRKSVYWHVIGMGTTPEVHSIFLEGHTFLVRNHRQASLEISPITFLTAQTLLMDLGQFLLFCHIWSHQHDGMEAYVKVDSCPEEPQLRMKNNEEAEDYDDDLTDSEMDVVRFDDDNSPSFIQIRSVAKKHPKTWVHYIAAEEEDWDYAPLVLAPDDRSYKSQYLNNGPQRIGRKYKKVRFMAYTDETFKTREAIQHESGILGPLLYGEVGDTLLIIFKNQASRPYNIYPHGITDVRPLYSRRLPKGVKHLKDFPILPGEIFKYKWTVTVEDGPTKSDPRCLTRYYSSFVNMERDLASGLIGPLLICYKESVDQRGNQIMSDKRNVILFSVFDENRSWYLTENIQRFLPNPAGVQLEDPEFQASNIMHSINGYVFDSLQLSVCLHEVAYWYILSIGAQTDFLSVFFSGYTFKHKMVYEDTLTLFPFSGETVFMSMENPGLWILGCHNSDFRNRGMTALLKVSSCDKNTGDYYEDSYEDISAYLLSKNNAIEPRSFSQNPPVLKRHQREITRTTLQSDQEEIDYDDTISVEMKKEDFDIYDEDENQSPRSFQKKTRHYFIAAVERLWDYGMSSSPHVLRNRAQSGSVPQFKKVVFQEFTDGSFTQPLYRGELNEHLGLLGPYIRAEVEDNIMVTFRNQASRPYSFYSSLISYEEDQRQGAEPRKNFVKPNETKTYFWKVQHHMAPTKDEFDCKAWAYFSDVDLEKDVHSGLIGPLLVCHTNTLNPAHGRQVTVQEFALFFTIFDETKSWYFTENMERNCRAPCNIQMEDPTFKENYRFHAINGYIMDTLPGLVMAQDQRIRWYLLSMGSNENIHSIHFSGHVFTVRKKEEYKMALYNLYPGVFETVEMLPSKAGIWRVECLIGEHLHAGMSTLFLVYSNKCQTPLGMASGHIRDFQITASGQYGQWAPKLARLHYSGSINAWSTKEPFSWIKVDLLAPMIIHGIKTQGARQKFSSLYISQFIIMYSLDGKKWQTYRGNSTGTLMVFFGNVDSSGIKHNIFNPPIIARYIRLHPTHYSIRSTLRMELMGCDLNSCSMPLGMESKAISDAQITASSYFTNMFATWSPSKARLHLQGRSNAWRPQVNNPKEWLQVDFQKTMKVTGVTTQGVKSLLTSMYVKEFLISSSQDGHQWTLFFQNGKVKVFQGNQDSFTPVVNSLDPPLLTRYLRIHPQSWVHQIALRMEVLGCEAQDLY

SEQ ID NO: 155 - DNA, 4371 bp, synthetic construct
  misc_feature 1..4371: note = Variant of human B-domain deleted Factor VIII
  source 1..4371: mol_type = other DNA
atgcagattgaactgtctacctgcttcttcctctgtttgctgaggttctgctttagcgccactagacggtactaccttggcgctgtggagctgtcctgggactatatgcagagtgatttgggagagcttcccgtcgacgcacgatttcctcctcgcgttccaaagtcatttcccttcaacacaagcgtggtgtacaagaagacgctcttcgtcgaattcaccgatcacctgttcaatatcgccaaacccagaccaccatggatgggtcttttggggcctaccatacaagcggaggtgtatgacacagttgttatcactctcaagaacatggcttctcatccggtaagtcttcacgcagtgggcgtgtcctactggaaagcttcagaaggagccgagtatgatgatcagacatcccagagggagaaagaagacgacaaggtatttccaggtgggtctcatacctatgtgtggcaagtgctcaaagagaatggccctatggcaagcgatccgctctgtttgacttacagctacctttcacacgttgacctcgtcaaggacctcaactccgggttgattggagccttgttggtatgcagggaaggatctcttgccaaagagaagacacagaccctccacaagtttatccttctctttgctgtgttcgatgagggcaaaagttggcatagcgaaacgaagaattccctcatgcaggatcgcgacgcagccagcgccagagcttggcccaagatgcacactgtgaacggatatgtcaataggtcacttcctggcttgattgggtgtcatcggaaaagtgtctactggcacgtgatcggaatggggacaacaccagaggtccactccatatttctcgaaggccataccttccttgttcgaaaccacagacaggcatccttggagatctctcccattacctttctcactgcccaaacgctccttatggacttgggtcagttccttctcttctgccatatcagctcacaccagcatgatggtatggaagcttatgtgaaagtcgacagttgtcctgaggagccacagttgcgcatgaagaataatgaagaagccgaggattacgacgacgatctcaccgattctgagatggacgtggtgaggtttgatgacgacaactctccctccttcattcaaatccggagcgtggcgaagaaacaccccaagacttgggtccactatatagcggcggaagaggaggattgggattacgctcctcttgtattggcaccagatgaccgctcatacaaaagccagtacctcaacaacggaccgcagagaattggccggaagtataagaaagtgcgatttatggcctatacagacgaaacctttaagacaagggaggccatccagcatgagagtgggattttgggacctcttctttacggcgaagttggtgataccctcctcatcatcttcaagaatcaagcttctcgcccctataacatttacccacacgggatcactgacgttaggcctttgtatagcagaagacttcccaaaggcgtgaagcatctcaaagacttccccattttgccaggcgagatctttaagtacaaatggaccgtcacagtggaagatggaccgactaaatcagaccctcgatgccttacgcggtactattcctccttcgtgaatatggagagagatttggcaagcggactcataggaccactcctcatctgttacaaggaatctgtagaccagaggggtaaccagattatgagtgataaacgcaatgtgatcctttttagcgtcttcgacgagaaccggtcctggtacttgaccgagaatatacaaaggttccttcccaaccccgcaggcgttcagttggaagaccctgagtttcaggccagcaatattatgcactcaatcaacggctatgtgtttgatagtctccagctttctgtttgcctccatgaagtagcctattggtacatcttgtcaattggtgctcaaacagacttcctctccgtcttcttctccggctacacctttaagcacaagatggtgtatgaggacactctcacactctttccattttctggagaaaccgtgttcatgagcatggagaatccaggcctttgggtgttgggttgccacaacagtgattttcgcaatcggggaatgactgctctcctcaaagtcagcagctgtgataagaacacaggcgactattacgaagattcttacgaggacataagtgcctacttgttgtccaagaataacgccattgagcccagatcattctcccagaatcctcccgtgcttaaaaggcatcagcgcgaaatcaccagaactactcttcagtctgatcaagaggagattgactatgacgacaccataagcgtggaaatgaagaaggaggatttcgatatctatgacgaagatgagaaccagtctccgcggagctttcagaagaagacgcgacactacttcattgcagcagtcgaaaggctttgggactacggtatgtcatcatcccctcatgtgttgcgcaatagagctcagagtggaagtgttccacagttcaagaaagtcgtctttcaagagtttacagatggcagcttcacacagcctctctatcggggcgagcttaacgaacatttgggactccttggtccctatatccgagccgaagtggaggacaacattatggttacctttaggaatcaagcctctcgcccctacagcttctactcctccctcatcagttatgaggaggatcagagacaaggcgctgaaccacggaagaactttgtgaaaccgaatgagacgaagacctacttctggaaagtacagcaccacatggcccccacaaaagacgaattcgattgcaaagcatgggcgtatttttcagacgttgacttggagaaagatgtacattcaggacttattggtcctttgttggtgtgtcacactaacactctcaatccagcccatggcaggcaggtgacagtccaggaattcgctcttttctttaccatctttgatgagaccaagtcctggtacttcacggaaaacatggagcgcaattgcagagccccctgtaacatacagatggaggaccctacctttaaggaaaattatcggttccacgcaatcaacggatacattatggatacactccctggccttgtgatggctcaggaccaacgaatcaggtggtacctcctcagcatgggttctaatgagaacatacactccattcacttttcaggacatgtgttcactgtccggaagaaagaagagtataagatggccctctacaatttgtatccaggcgtgtttgagaccgttgaaatgcttccctctaaagctggcatctggagagtagagtgcttgatcggagaacatcttcacgcaggtatgagcaccttgttcctcgtgtacagcaacaaatgtcagaccccacttggcatggccagtggacacattcgcgactttcagatcacagcatctggccagtatggacaatgggccccaaagttggctcgcctccattactccggtagcataaatgcgtggtccactaaagaacctttcagctggattaaggtcgatcttcttgcccccatgatcatccacggcattaagacacagggagcgaggcagaaattctcctccctctacatctcacagttcattattatgtatagtttggacggcaagaagtggcaaacttatagaggtaacagtactggaacactcatggtgttcttcggcaacgttgatagctctggcatcaaacacaacatctttaatcctcccataatagctcggtacatcagattgcatccgacccactacagcattaggagtacactccgaatggagcttatgggttgcgacttgaattcctgttcaatgccactcggaatggagtctaaagccatctctgatgcacagataaccgccagtagctactttacgaacatgtttgctacgtggtcaccctctaaggcaaggcttcatttgcaaggccggtctaatgcctggagacctcaggtgaacaacccgaaagaatggctccaggtggactttcagaagaccatgaaagtaacaggtgtcactactcagggagttaagtccttgctcaccagcatgtatgtgaaggagttccttatttcctcatcacaagatggccaccagtggaccctcttctttcagaatggtaaggtcaaagtgtttcagggcaatcaagacagcttcacacccgtggtgaacagtcttgatcctccactcttgacacgataccttcgaatccatccacagtcttgggttcaccagattgcattgcgcatggaagtacttggatgcgaggctcaggacctctac

SEQ ID NO: 156 - protein, 1457 aa, synthetic construct
  REGION 1..1457: note = Variant of human B-domain deleted Factor VIII
MQIELSTCFFLCLLRFCFSATRRYYLGAVELSWDYMQSDLGELPVDARFPPRVPKSFPFNTSVVYKKTLFVEFTDHLFNIAKPRPPWMGLLGPTIQAEVYDTVVITLKNMASHPVSLHAVGVSYWKASEGAEYDDQTSQREKEDDKVFPGGSHTYVWQVLKENGPMASDPLCLTYSYLSHVDLVKDLNSGLIGALLVCREGSLAKEKTQTLHKFILLFAVFDEGKSWHSETKNSLMQDRDAASARAWPKMHTVNGYVNRSLPGLIGCHRKSVYWHVIGMGTTPEVHSIFLEGHTFLVRNHRQASLEISPITFLTAQTLLMDLGQFLLFCHISSHQHDGMEAYVKVDSCPEEPQLRMKNNEEAEDYDDDLTDSEMDVVRFDDDNSPSFIQIRSVAKKHPKTWVHYIAAEEEDWDYAPLVLAPDDRSYKSQYLNNGPQRIGRKYKKVRFMAYTDETFKTREAIQHESGILGPLLYGEVGDTLLIIFKNQASRPYNIYPHGITDVRPLYSRRLPKGVKHLKDFPILPGEIFKYKWTVTVEDGPTKSDPRCLTRYYSSFVNMERDLASGLIGPLLICYKESVDQRGNQIMSDKRNVILFSVFDENRSWYLTENIQRFLPNPAGVQLEDPEFQASNIMHSINGYVFDSLQLSVCLHEVAYWYILSIGAQTDFLSVFFSGYTFKHKMVYEDTLTLFPFSGETVFMSMENPGLWVLGCHNSDFRNRGMTALLKVSSCDKNTGDYYEDSYEDISAYLLSKNNAIEPRSFSQNPPVLKRHQREITRTTLQSDQEEIDYDDTISVEMKKEDFDIYDEDENQSPRSFQKKTRHYFIAAVERLWDYGMSSSPHVLRNRAQSGSVPQFKKVVFQEFTDGSFTQPLYRGELNEHLGLLGPYIRAEVEDNIMVTFRNQASRPYSFYSSLISYEEDQRQGAEPRKNFVKPNETKTYFWKVQHHMAPTKDEFDCKAWAYFSDVDLEKDVHSGLIGPLLVCHTNTLNPAHGRQVTVQEFALFFTIFDETKSWYFTENMERNCRAPCNIQMEDPTFKENYRFHAINGYIMDTLPGLVMAQDQRIRWYLLSMGSNENIHSIHFSGHVFTVRKKEEYKMALYNLYPGVFETVEMLPSKAGIWRVECLIGEHLHAGMSTLFLVYSNKCQTPLGMASGHIRDFQITASGQYGQWAPKLARLHYSGSINAWSTKEPFSWIKVDLLAPMIIHGIKTQGARQKFSSLYISQFIIMYSLDGKKWQTYRGNSTGTLMVFFGNVDSSGIKHNIFNPPIIARYIRLHPTHYSIRSTLRMELMGCDLNSCSMPLGMESKAISDAQITASSYFTNMFATWSPSKARLHLQGRSNAWRPQVNNPKEWLQVDFQKTMKVTGVTTQGVKSLLTSMYVKEFLISSSQDGHQWTLFFQNGKVKVFQGNQDSFTPVVNSLDPPLLTRYLRIHPQSWVHQIALRMEVLGCEAQDLY

SEQ ID NO: 157 - DNA, 4371 bp, synthetic construct
  misc_feature 1..4371: note = Variant of human B-domain deleted Factor VIII
  source 1..4371: mol_type = other DNA
atgcagattgaactgtctacctgcttcttcctctgtttgctgaggttctgctttagcgccactagacggtactaccttggcgctgtggagctgtcctgggactatatgcagagtgatttgggagagcttcccgtcgacgcacgatttcctcctcgcgttccaaagtcatttcccttcaacacaagccatgtgtacaagaagacgctcttcgtcgaattcaccgatcacctgttcaatatcgccaaacccagaccaccatggatgggtcttttggggcctaccatacaagcggaggtgtatgacacagttgttatcactctcaagaacatggcttctcatccggtaagtcttcacgcagtgggcgtgtcctactggaaagcttcagaaggagccgagtatgatgatcagacatcccagagggagaaagaagacgacaaggtatttccaggtgggtctcatacctatgtgtggcaagtgctcaaagagaatggccctatggcaagcgatccgctctgtttgacttacagctacctttcacacgttgacctcgtcaaggacctcaactccgggttgattggagccttgttggtatgcagggaaggatctcttgccaaagagaagacacagaccctccacaagtttatccttctctttgctgtgttcgatgagggcaaaagttggcatagcgaaacgaagaattccctcatgcaggatcgcgacgcagccagcgccagagcttggcccaagatgcacactgtgaacggatatgtcaataggtcacttcctggcttgattgggtgtcatcggaaaagtgtctactggcacgtgatcggaatggggacaacaccagaggtccactccatatttctcgaaggccataccttccttgttcgaaaccacagacaggcatccttggagatctctcccattacctttctcactgcccaaacgctccttatggacttgggtcagttccttctcttctgccatatcagctcacaccagcatgatggtatggaagcttatgtgaaagtcgacagttgtcctgaggagccacagttgcgcatgaagaataatgaagaagccgaggattacgacgacgatctcaccgattctgagatggacgtggtgaggtttgatgacgacaactctccctccttcattcaaatccggagcgtggcgaagaaacaccccaagacttgggtccactatatagcggcggaagaggaggattgggattacgctcctcttgtattggcaccagatgaccgctcatacaaaagccagtacctcaacaacggaccgcagagaattggccggaagtataagaaagtgcgatttatggcctatacagacgaaacctttaagacaagggaggccatccagcatgagagtgggattttgggacctcttctttacggcgaagttggtgataccctcctcatcatcttcaagaatcaagcttctcgcccctataacatttacccacacgggatcactgacgttaggcctttgtatagcagaagacttcccaaaggcgtgaagcatctcaaagacttccccattttgccaggcgagatctttaagtacaaatggaccgtcacagtggaagatggaccgactaaatcagaccctcgatgccttacgcggtactattcctccttcgtgaatatggagagagatttggcaagcggactcataggaccactcctcatctgttacaaggaatctgtagaccagaggggtaaccagattatgagtgataaacgcaatgtgatcctttttagcgtcttcgacgagaaccggtcctggtacttgaccgagaatatacaaaggttccttcccaaccccgcaggcgttcagttggaagaccctgagtttcaggccagcaatattatgcactcaatcaacggctatgtgtttgatagtctccagctttctgtttgcctccatgaagtagcctattggtacatcttgtcaattggtgctcaaacagacttcctctccgtcttcttctccggctacacctttaagcacaagatggtgtatgaggacactctcacactctttccattttctggagaaaccgtgttcatgagcatggagaatccaggcctttggatcttgggttgccacaacagtgattttcgcaatcggggaatgactgctctcctcaaagtcagcagctgtgataagaacacaggcgactattacgaagattcttacgaggacataagtgcctacttgttgtccaagaataacgccattgagcccagatcattctcccagaatcctcccgtgcttaaaaggcatcagcgcgaaatcaccagaactactcttcagtctgatcaagaggagattgactatgacgacaccataagcgtggaaatgaagaaggaggatttcgatatctatgacgaagatgagaaccagtctccgcggagctttcagaagaagacgcgacactacttcattgcagcagtcgaaaggctttgggactacggtatgtcatcatcccctcatgtgttgcgcaatagagctcagagtggaagtgttccacagttcaagaaagtcgtctttcaagagtttacagatggcagcttcacacagcctctctatcggggcgagcttaacgaacatttgggactccttggtccctatatccgagccgaagtggaggacaacattatggttacctttaggaatcaagcctctcgcccctacagcttctactcctccctcatcagttatgaggaggatcagagacaaggcgctgaaccacggaagaactttgtgaaaccgaatgagacgaagacctacttctggaaagtacagcaccacatggcccccacaaaagacgaattcgattgcaaagcatgggcgtatttttcagacgttgacttggagaaagatgtacattcaggacttattggtcctttgttggtgtgtcacactaacactctcaatccagcccatggcaggcaggtgacagtccaggaattcgctcttttctttaccatctttgatgagaccaagtcctggtacttcacggaaaacatggagcgcaattgcagagccccctgtaacatacagatggaggaccctacctttaaggaaaattatcggttccacgcaatcaacggatacattatggatacactccctggccttgtgatggctcaggaccaacgaatcaggtggtacctcctcagcatgggttctaatgagaacatacactccattcacttttcaggacatgtgttcactgtccggaagaaagaagagtataagatggccctctacaatttgtatccaggcgtgtttgagaccgttgaaatgcttccctctaaagctggcatctggagagtagagtgcttgatcggagaacatcttcacgcaggtatgagcaccttgttcctcgtgtacagcaacaaatgtcagaccccacttggcatggccagtggacacattcgcgactttcagatcacagcatctggccagtatggacaatgggccccaaagttggctcgcctccattactccggtagcataaatgcgtggtccactaaagaacctttcagctggattaaggtcgatcttcttgcccccatgatcatccacggcattaagacacagggagcgaggcagaaattctcctccctctacatctcacagttcattattatgtatagtttggacggcaagaagtggcaaacttatagaggtaacagtactggaacactcatggtgttcttcggcaacgttgatagctctggcatcaaacacaacatctttaatcctcccataatagctcggtacatcagattgcatccgacccactacagcattaggagtacactccgaatggagcttatgggttgcgacttgaattcctgttcaatgccactcggaatggagtctaaagccatctctgatgcacagataaccgccagtagctactttacgaacatgtttgctacgtggtcaccctctaaggcaaggcttcatttgcaaggccggtctaatgcctggagacctcaggtgaacaacccgaaagaatggctccaggtggactttcagaagaccatgaaagtaacaggtgtcactactcagggagttaagtccttgctcaccagcatgtatgtgaaggagttccttatttcctcatcacaagatggccaccagtggaccctcttctttcagaatggtaaggtcaaagtgtttcagggcaatcaagacagcttcacacccgtggtgaacagtcttgatcctccactcttgacacgataccttcgaatccatccacagtcttgggttcaccagattgcattgcgcatggaagtacttggatgcgaggctcaggacctctac

SEQ ID NO: 158 - protein, 1457 aa, synthetic construct
  REGION 1..1457: note = Variant of human B-domain deleted Factor VIII
MQIELSTCFFLCLLRFCFSATRRYYLGAVELSWDYMQSDLGELPVDARFPPRVPKSFPFNTSHVYKKTLFVEFTDHLFNIAKPRPPWMGLLGPTIQAEVYDTVVITLKNMASHPVSLHAVGVSYWKASEGAEYDDQTSQREKEDDKVFPGGSHTYVWQVLKENGPMASDPLCLTYSYLSHVDLVKDLNSGLIGALLVCREGSLAKEKTQTLHKFILLFAVFDEGKSWHSETKNSLMQDRDAASARAWPKMHTVNGYVNRSLPGLIGCHRKSVYWHVIGMGTTPEVHSIFLEGHTFLVRNHRQASLEISPITFLTAQTLLMDLGQFLLFCHISSHQHDGMEAYVKVDSCPEEPQLRMKNNEEAEDYDDDLTDSEMDVVRFDDDNSPSFIQIRSVAKKHPKTWVHYIAAEEEDWDYAPLVLAPDDRSYKSQYLNNGPQRIGRKYKKVRFMAYTDETFKTREAIQHESGILGPLLYGEVGDTLLIIFKNQASRPYNIYPHGITDVRPLYSRRLPKGVKHLKDFPILPGEIFKYKWTVTVEDGPTKSDPRCLTRYYSSFVNMERDLASGLIGPLLICYKESVDQRGNQIMSDKRNVILFSVFDENRSWYLTENIQRFLPNPAGVQLEDPEFQASNIMHSINGYVFDSLQLSVCLHEVAYWYILSIGAQTDFLSVFFSGYTFKHKMVYEDTLTLFPFSGETVFMSMENPGLWILGCHNSDFRNRGMTALLKVSSCDKNTGDYYEDSYEDISAYLLSKNNAIEPRSFSQNPPVLKRHQREITRTTLQSDQEEIDYDDTISVEMKKEDFDIYDEDENQSPRSFQKKTRHYFIAAVERLWDYGMSSSPHVLRNRAQSGSVPQFKKVVFQEFTDGSFTQPLYRGELNEHLGLLGPYIRAEVEDNIMVTFRNQASRPYSFYSSLISYEEDQRQGAEPRKNFVKPNETKTYFWKVQHHMAPTKDEFDCKAWAYFSDVDLEKDVHSGLIGPLLVCHTNTLNPAHGRQVTVQEFALFFTIFDETKSWYFTENMERNCRAPCNIQMEDPTFKENYRFHAINGYIMDTLPGLVMAQDQRIRWYLLSMGSNENIHSIHFSGHVFTVRKKEEYKMALYNLYPGVFETVEMLPSKAGIWRVECLIGEHLHAGMSTLFLVYSNKCQTPLGMASGHIRDFQITASGQYGQWAPKLARLHYSGSINAWSTKEPFSWIKVDLLAPMIIHGIKTQGARQKFSSLYISQFIIMYSLDGKKWQTYRGNSTGTLMVFFGNVDSSGIKHNIFNPPIIARYIRLHPTHYSIRSTLRMELMGCDLNSCSMPLGMESKAISDAQITASSYFTNMFATWSPSKARLHLQGRSNAWRPQVNNPKEWLQVDFQKTMKVTGVTTQGVKSLLTSMYVKEFLISSSQDGHQWTLFFQNGKVKVFQGNQDSFTPVVNSLDPPLLTRYLRIHPQSWVHQIALRMEVLGCEAQDLY

SEQ ID NO: 159 - DNA, 4371 bp, synthetic construct
  misc_feature 1..4371: note = Variant of human B-domain deleted Factor VIII
  source 1..4371: mol_type = other DNA
atgcagattgaactgtctacctgcttcttcctctgtttgctgaggttctgctttagcgccactagacggtactaccttggcgctgtggagctgtcctgggactatatgcagagtgatttgggagagcttcccgtcgacgcacgatttcctcctcgcgttccaaagtcatttcccttcaacacaagcgtggtgtacaagaagacgctcttcgtcgaattcaccgatcacctgttcaatatcgccaaacccagaccaccatggatgggtcttttggggcctaccatacaagcggaggtgtatgacacagttgttatcactctcaagaacatggcttctcatccggtaagtcttcacgcagtgggcgtgtcctactggaaagcttcagaaggagccgagtatgatgatcagacatcccagagggagaaagaagacgacaaggtatttccaggtgggtctcatacctatgtgtggcaagtgctcaaagagaatggccctatggcaagcgatccgctctgtttgacttacagctacctttcacacgttgacctcgtcaaggacctcaactccgggttgattggagccttgttggtatgcagggaaggatctcttgccaaagagaagacacagaccctccacaagtttatccttctctttgctgtgttcgatgagggcaaaagttggcatagcgaaacgaagaattccctcatgcaggatcgcgacgcagccagcgccagagcttggcccaagatgcacactgtgaacggatatgtcaataggtcacttcctggcttgattgggtgtcatcggaaaagtgtctactggcacgtgatcggaatggggacaacaccagaggtccactccatatttctcgaaggccataccttccttgttcgaaaccacagacaggcatccttggagatctctcccattacctttctcactgcccaaacgctccttatggacttgggtcagttccttctcttctgccatatcagctcacaccagcatgatggtatggaagcttatgtgaaagtcgacagttgtcctgaggagccacagttgcgcatgaagaataatgaagaagccgaggattacgacgacgatctcaccgattctgagatggacgtggtgaggtttgatgacgacaactctccctccttcattcaaatccggagcgtggcgaagaaacaccccaagacttgggtccactatatagcggcggaagaggaggattgggattacgctcctcttgtattggcaccagatgaccgctcatacaaaagccagtacctcaacaacggaccgcagagaattggccggaagtataagaaagtgcgatttatggcctatacagacgaaacctttaagacaagggaggccatccagcatgagagtgggattttgggacctcttctttacggcgaagttggtgataccctcctcatcatcttcaagaatcaagcttctcgcccctataacatttacccacacgggatcactgacgttaggcctttgtatagcagaagacttcccaaaggcgtgaagcatctcaaagacttccccattttgccaggcgagatctttaagtacaaatggaccgtcacagtggaagatggaccgactaaatcagaccctcgatgccttacgcggtactattcctccttcgtgaatatggagagagatttggcaagcggactcataggaccactcctcatctgttacaaggaatctgtagaccagaggggtaaccagattatgagtgataaacgcaatgtgatcctttttagcgtcttcgacgagaaccggtcctggtacttgaccgagaatatacaaaggttccttcccaaccccgcaggcgttcagttggaagaccctgagtttcaggccagcaatattatgcactcaatcaacggctatgtgtttgatagtctccagctttctgtttgcctccatgaagtagcctattggtacatcttgtcaattggtgctcaaacagacttcctctccgtcttcttctccggctacacctttaagcacaagatggtgtatgaggacactctcacactctttccattttctggagaaaccgtgttcatgagcatggagaatccaggcctttggatcttgggttgccacaacagtgattttcgcaatcggggaatgactgctctcctcaaagtcagcagctgtgataagaacacaggcgactattacgaagattcttacgaggacataagtgcctacttgttgtccaagaataacgccattgagcccagatcattctcccagaatcctcccgtgcttaaaaggcatcagcgcgaaatcaccagaactactcttcagtctgatcaagaggagattgactatgacgacaccataagcgtggaatgtaagaaggaggatttcgatatctatgacgaagatgagaaccagtctccgcggagctttcagaagaagacgcgacactacttcattgcagcagtcgaaaggctttgggactacggtatgtcatcatcccctcatgtgttgcgcaatagagctcagagtggaagtgttccacagttcaagaaagtcgtctttcaagagtttacagatggcagcttcacacagcctctctatcggggcgagcttaacgaacatttgggactccttggtccctatatccgagccgaagtggaggacaacattatggttacctttaggaatcaagcctctcgcccctacagcttctactcctccctcatcagttatgaggaggatcagagacaaggcgctgaaccacggaagaactttgtgaaaccgaatgagacgaagacctacttctggaaagtacagcaccacatggcccccacaaaagacgaattcgattgcaaagcatgggcgtatttttcagacgttgacttggagaaagatgtacattcaggacttattggtcctttgttggtgtgtcacactaacactctcaatccagcccatggcaggcaggtgacagtccaggaattcgctcttttctttaccatctttgatgagaccaagtcctggtacttcacggaaaacatggagcgcaattgcagagccccctgtaacatacagatggaggaccctacctttaaggaaaattatcggttccacgcaatcaacggatacattatggatacactccctggccttgtgatggctcaggaccaacgaatcaggtggtacctcctcagcatgggttctaatgagaacatacactccattcacttttcaggacatgtgttcactgtccggaagaaagaagagtataagatggccctctacaatttgtatccaggcgtgtttgagaccgttgaaatgcttccctctaaagctggcatctggagagtagagtgcttgatcggagaacatcttcacgcaggtatgagcaccttgttcctcgtgtacagcaacaaatgtcagaccccacttggcatggccagtggacacattcgcgactttcagatcacagcatctggccagtatggacaatgggccccaaagttggctcgcctccattactccggtagcataaatgcgtggtccactaaagaacctttcagctggattaaggtcgatcttcttgcccccatgatcatccacggcattaagacacagggagcgaggcagaaattctcctccctctacatctcacagttcattattatgtatagtttggacggcaagaagtggcaaacttatagaggtaacagtactggaacactcatggtgttcttcggcaacgttgatagctctggcatcaaacacaacatctttaatcctcccataatagctcggtacatcagattgcatccgacccactacagcattaggagtacactccgaatggagcttatgggttgcgacttgaattcctgttcaatgccactcggaatggagtctaaagccatctctgatgcacagataaccgccagtagctactttacgaacatgtttgctacgtggtcaccctctaaggcaaggcttcatttgcaaggccggtctaatgcctggagacctcaggtgaacaacccgaaagaatggctccaggtggactttcagaagaccatgaaagtaacaggtgtcactactcagggagttaagtccttgctcaccagcatgtatgtgaaggagttccttatttcctcatcacaagatggccaccagtggaccctcttctttcagaatggtaaggtcaaagtgtttcagggcaatcaagacagcttcacacccgtggtgaacagtcttgatcctccactcttgacacgataccttcgaatccatccacagtcttgggttcaccagattgcattgcgcatggaagtacttggatgcgaggctcaggacctctac

SEQ ID NO: 160 - protein, 1457 aa, synthetic construct
  REGION 1..1457: note = Variant of human B-domain deleted Factor VIII
MQIELSTCFFLCLLRFCFSATRRYYLGAVELSWDYMQSDLGELPVDARFPPRVPKSFPFNTSVVYKKTLFVEFTDHLFNIAKPRPPWMGLLGPTIQAEVYDTVVITLKNMASHPVSLHAVGVSYWKASEGAEYDDQTSQREKEDDKVFPGGSHTYVWQVLKENGPMASDPLCLTYSYLSHVDLVKDLNSGLIGALLVCREGSLAKEKTQTLHKFILLFAVFDEGKSWHSETKNSLMQDRDAASARAWPKMHTVNGYVNRSLPGLIGCHRKSVYWHVIGMGTTPEVHSIFLEGHTFLVRNHRQASLEISPITFLTAQTLLMDLGQFLLFCHISSHQHDGMEAYVKVDSCPEEPQLRMKNNEEAEDYDDDLTDSEMDVVRFDDDNSPSFIQIRSVAKKHPKTWVHYIAAEEEDWDYAPLVLAPDDRSYKSQYLNNGPQRIGRKYKKVRFMAYTDETFKTREAIQHESGILGPLLYGEVGDTLLIIFKNQASRPYNIYPHGITDVRPLYSRRLPKGVKHLKDFPILPGEIFKYKWTVTVEDGPTKSDPRCLTRYYSSFVNMERDLASGLIGPLLICYKESVDQRGNQIMSDKRNVILFSVFDENRSWYLTENIQRFLPNPAGVQLEDPEFQASNIMHSINGYVFDSLQLSVCLHEVAYWYILSIGAQTDFLSVFFSGYTFKHKMVYEDTLTLFPFSGETVFMSMENPGLWILGCHNSDFRNRGMTALLKVSSCDKNTGDYYEDSYEDISAYLLSKNNAIEPRSFSQNPPVLKRHQREITRTTLQSDQEEIDYDDTISVECKKEDFDIYDEDENQSPRSFQKKTRHYFIAAVERLWDYGMSSSPHVLRNRAQSGSVPQFKKVVFQEFTDGSFTQPLYRGELNEHLGLLGPYIRAEVEDNIMVTFRNQASRPYSFYSSLISYEEDQRQGAEPRKNFVKPNETKTYFWKVQHHMAPTKDEFDCKAWAYFSDVDLEKDVHSGLIGPLLVCHTNTLNPAHGRQVTVQEFALFFTIFDETKSWYFTENMERNCRAPCNIQMEDPTFKENYRFHAINGYIMDTLPGLVMAQDQRIRWYLLSMGSNENIHSIHFSGHVFTVRKKEEYKMALYNLYPGVFETVEMLPSKAGIWRVECLIGEHLHAGMSTLFLVYSNKCQTPLGMASGHIRDFQITASGQYGQWAPKLARLHYSGSINAWSTKEPFSWIKVDLLAPMIIHGIKTQGARQKFSSLYISQFIIMYSLDGKKWQTYRGNSTGTLMVFFGNVDSSGIKHNIFNPPIIARYIRLHPTHYSIRSTLRMELMGCDLNSCSMPLGMESKAISDAQITASSYFTNMFATWSPSKARLHLQGRSNAWRPQVNNPKEWLQVDFQKTMKVTGVTTQGVKSLLTSMYVKEFLISSSQDGHQWTLFFQNGKVKVFQGNQDSFTPVVNSLDPPLLTRYLRIHPQSWVHQIALRMEVLGCEAQDLY

SEQ ID NO: 161 - DNA, 4371 bp, synthetic construct
  misc_feature 1..4371: note = Variant of human B-domain deleted Factor VIII
  source 1..4371: mol_type = other DNA
atgcagattgaactgtctacctgcttcttcctctgtttgctgaggttctgctttagcgccactagacggtactaccttggcgctgtggagctgtcctgggactatatgcagagtgatttgggagagcttcccgtcgacgcacgatttcctcctcgcgttccaaagtcatttcccttcaaccagagcgtggtgtacaagaagacgctcttcgtcgaattcaccgatcacctgttcaatatcgccaaacccagaccaccatggatgggtcttttggggcctaccatacaagcggaggtgtatgacacagttgttatcactctcaagaacatggcttctcatccggtaagtcttcacgcagtgggcgtgtcctactggaaagcttcagaaggagccgagtatgatgatcagacatcccagagggagaaagaagacgacaaggtatttccaggtgggtctcatacctatgtgtggcaagtgctcaaagagaatggccctatggcaagcgatccgctctgtttgacttacagctacctttcacacgttgacctcgtcaaggacctcaactccgggttgattggagccttgttggtatgcagggaaggatctcttgccaaagagaagacacagaccctccacaagtttatccttctctttgctgtgttcgatgagggcaaaagttggcatagcgaaacgaagaattccctcatgcaggatcgcgacgcagccagcgccagagcttggcccaagatgcacactgtgaacggatatgtcaataggtcacttcctggcttgattgggtgtcatcggaaaagtgtctactggcacgtgatcggaatggggacaacaccagaggtccactccatatttctcgaaggccataccttccttgttcgaaaccacagacaggcatccttggagatctctcccattacctttctcactgcccaaacgctccttatggacttgggtcagttccttctcttctgccatatcagctcacaccagcatgatggtatggaagcttatgtgaaagtcgacagttgtcctgaggagccacagttgcgcatgaagaataatgaagaagccgaggattacgacgacgatctcaccgattctgagatggacgtggtgaggtttgatgacgacaactctccctccttcattcaaatccggagcgtggcgaagaaacaccccaagacttgggtccactatatagcggcggaagaggaggattgggattacgctcctcttgtattggcaccagatgaccgctcatacaaaagccagtacctcaacaacggaccgcagagaattggccggaagtataagaaagtgcgatttatggcctatacagacgaaacctttaagacaagggaggccatccagcatgagagtgggattttgggacctcttctttacggcgaagttggtgataccctcctcatcatcttcaagaatcaagcttctcgcccctataacatttacccacacgggatcactgacgttaggcctttgtatagcagaagacttcccaaaggcgtgaagcatctcaaagacttccccattttgccaggcgagatctttaagtacaaatggaccgtcacagtggaagatggaccgactaaatcagaccctcgatgccttacgcggtactattcctccttcgtgaatatggagagagatttggcaagcggactcataggaccactcctcatctgttacaaggaatctgtagaccagaggggtaaccagattatgagtgataaacgcaatgtgatcctttttagcgtcttcgacgagaaccggtcctggtacttgaccgagaatatacaaaggttccttcccaaccccgcaggcgttcagttggaagaccctgagtttcaggccagcaatattatgcactcaatcaacggctatgtgtttgatagtctccagctttctgtttgcctccatgaagtagcctattggtacatcttgtcaattggtgctcaaacagacttcctctccgtcttcttctccggctacacctttaagcacaagatggtgtatgaggacactctcacactctttccattttctggagaaaccgtgttcatgagcatggagaatccaggcctttggatcttgggttgccacaacagtgattttcgcaatcggggaatgactgctctcctcaaagtcagcagctgtgataagaacacaggcgactattacgaagattcttacgaggacataagtgcctacttgttgtccaagaataacgccattgagcccagatcattctcccagaatcctcccgtgcttaaaaggcatcagcgcgaaatcaccagaactactcttcagtctgatcaagaggagattgactatgacgacaccataagcgtggaaatgaagaaggaggatttcgatatctatgacgaagatgagaaccagtctccgcggagctttcagaagaagacgcgacactacttcattgcagcagtcgaaaggctttgggactacggtatgtcatcatcccctcatgtgttgcgcaatagagctcagagtggaagtgttccacagttcaagaaagtcgtctttcaagagtttacagatggcagcttcacacagcctctctatcggggcgagcttaacgaacatttgggactccttggtccctatatccgagccgaagtggaggacaacattatggttacctttaggaatcaagcctctcgcccctacagcttctactcctccctcatcagttatgaggaggatcagagacaaggcgctgaaccacggaagaactttgtgaaaccgaatgagacgaagacctacttctggaaagtacagcaccacatggcccccacaaaagacgaattcgattgcaaagcatgggcgtatttttcagacgttgacttggagaaagatgtacattcaggacttattggtcctttgttggtgtgtcacactaacactctcaatccagcccatggcaggcaggtgacagtccaggaattcgctcttttctttaccatctttgatgagaccaagtcctggtacttcacggaaaacatggagcgcaattgcagagccccctgtaacatacagatggaggaccctacctttaaggaaaattatcggttccacgcaatcaacggatacattatggatacactccctggccttgtgatggctcaggaccaacgaatcaggtggtacctcctcagcatgggttctaatgagaacatacactccattcacttttcaggacatgtgttcactgtccggaagaaagaagagtataagatggccctctacaatttgtatccaggcgtgtttgagaccgttgaaatgcttccctctaaagctggcatctggagagtagagtgcttgatcggagaacatcttcacgcaggtatgagcaccttgttcctcgtgtacagcaacaaatgtcagaccccacttggcatggccagtggacacattcgcgactttcagatcacagcatctggccagtatggacaatgggccccaaagttggctcgcctccattactccggtagcataaatgcgtggtccactaaagaacctttcagctggattaaggtcgatcttcttgcccccatgatcatccacggcattaagacacagggagcgaggcagaaattctcctccctctacatctcacagttcattattatgtatagtttggacggcaagaagtggcaaacttatagaggtaacagtactggaacactcatggtgttcttcggcaacgttgatagctctggcatcaaacacaacatctttaatcctcccataatagctcggtacatcagattgcatccgacccactacagcattaggagtacactccgaatggagcttatgggttgcgacttgaattcctgttcaatgccactcggaatggagtctaaagccatctctgatgcacagataaccgccagtagctactttacgaacatgtttgctacgtggtcaccctctaaggcaaggcttcatttgcaaggccggtctaatgcctggagacctcaggtgaacaacccgaaagaatggctccaggtggactttcagaagaccatgaaagtaacaggtgtcactactcagggagttaagtccttgctcaccagcatgtatgtgaaggagttccttatttcctcatcacaagatggccaccagtggaccctcttctttcagaatggtaaggtcaaagtgtttcagggcaatcaagacagcttcacacccgtggtgaacagtcttgatcctccactcttgacacgataccttcgaatccatccacagtcttgggttcaccagattgcattgcgcatggaagtacttggatgcgaggctcaggacctctac

SEQ ID NO: 162 - protein, 1457 aa, synthetic construct
  REGION 1..1457: note = Variant of human B-domain deleted Factor VIII
MQIELSTCFFLCLLRFCFSATRRYYLGAVELSWDYMQSDLGELPVDARFPPRVPKSFPFNQSVVYKKTLFVEFTDHLFNIAKPRPPWMGLLGPTIQAEVYDTVVITLKNMASHPVSLHAVGVSYWKASEGAEYDDQTSQREKEDDKVFPGGSHTYVWQVLKENGPMASDPLCLTYSYLSHVDLVKDLNSGLIGALLVCREGSLAKEKTQTLHKFILLFAVFDEGKSWHSETKNSLMQDRDAASARAWPKMHTVNGYVNRSLPGLIGCHRKSVYWHVIGMGTTPEVHSIFLEGHTFLVRNHRQASLEISPITFLTAQTLLMDLGQFLLFCHISSHQHDGMEAYVKVDSCPEEPQLRMKNNEEAEDYDDDLTDSEMDVVRFDDDNSPSFIQIRSVAKKHPKTWVHYIAAEEEDWDYAPLVLAPDDRSYKSQYLNNGPQRIGRKYKKVRFMAYTDETFKTREAIQHESGILGPLLYGEVGDTLLIIFKNQASRPYNIYPHGITDVRPLYSRRLPKGVKHLKDFPILPGEIFKYKWTVTVEDGPTKSDPRCLTRYYSSFVNMERDLASGLIGPLLICYKESVDQRGNQIMSDKRNVILFSVFDENRSWYLTENIQRFLPNPAGVQLEDPEFQASNIMHSINGYVFDSLQLSVCLHEVAYWYILSIGAQTDFLSVFFSGYTFKHKMVYEDTLTLFPFSGETVFMSMENPGLWILGCHNSDFRNRGMTALLKVSSCDKNTGDYYEDSYEDISAYLLSKNNAIEPRSFSQNPPVLKRHQREITRTTLQSDQEEIDYDDTISVEMKKEDFDIYDEDENQSPRSFQKKTRHYFIAAVERLWDYGMSSSPHVLRNRAQSGSVPQFKKVVFQEFTDGSFTQPLYRGELNEHLGLLGPYIRAEVEDNIMVTFRNQASRPYSFYSSLISYEEDQRQGAEPRKNFVKPNETKTYFWKVQHHMAPTKDEFDCKAWAYFSDVDLEKDVHSGLIGPLLVCHTNTLNPAHGRQVTVQEFALFFTIFDETKSWYFTENMERNCRAPCNIQMEDPTFKENYRFHAINGYIMDTLPGLVMAQDQRIRWYLLSMGSNENIHSIHFSGHVFTVRKKEEYKMALYNLYPGVFETVEMLPSKAGIWRVECLIGEHLHAGMSTLFLVYSNKCQTPLGMASGHIRDFQITASGQYGQWAPKLARLHYSGSINAWSTKEPFSWIKVDLLAPMIIHGIKTQGARQKFSSLYISQFIIMYSLDGKKWQTYRGNSTGTLMVFFGNVDSSGIKHNIFNPPIIARYIRLHPTHYSIRSTLRMELMGCDLNSCSMPLGMESKAISDAQITASSYFTNMFATWSPSKARLHLQGRSNAWRPQVNNPKEWLQVDFQKTMKVTGVTTQGVKSLLTSMYVKEFLISSSQDGHQWTLFFQNGKVKVFQGNQDSFTPVVNSLDPPLLTRYLRIHPQSWVHQIALRMEVLGCEAQDLY

SEQ ID NO: 163 - DNA, 4371 bp, synthetic construct
  misc_feature 1..4371: note = Variant of human B-domain deleted Factor VIII
  source 1..4371: mol_type = other DNA
atgcagattgaactgtctacctgcttcttcctctgtttgctgaggttctgctttagcgccactagacggtactaccttggcgctgtggagctgtcctgggactatatgcagagtgatttgggagagcttcccgtcgacgcacgatttcctcctcgcgttccaaagtcatttcccttcaacacaagcgtggtgtacaagaagacgctcttcgtcgaattcaccgatcacctgttcaatatcgccaaacccagaccaccatggatgggtcttttggggcctaccatacaagcggaggtgtatgacacagttgttatcactctcaagaacatggcttctcatccggtaagtcttcacgcagtgggcgtgtcctactggaaagcttcagaaggagccgagtatgatgatcagacatcccagagggagaaagaagacgacaaggtatttccaggtgggtctcatacctatgtgtggcaagtgctcaaagagaatggccctatggcaagcgatccgctctgtttgacttacagctacctttcacacgttgacctcgtcaaggacctcaactccgggttgattggagccttgttggtatgcagggaaggatctcttgccaaagagaagacacagaccctccacaagtttatccttctctttgctgtgttcgatgagggcaaaagttggcatagcgaaacgaagaattccctcatgcaggatcgcgacgcagccagcgccagagcttggcccaagatgcacactgtgaacggatatgtcaataggtcacttcctggcttgattgggtgtcatcggaaaagtgtctactggcacgtgatcggaatggggacaacaccagaggtccactccatatttctcgaaggccataccttccttgttcgaaaccacagacaggcatccttggagatctctcccattacctttctcactgcccaaacgctccttatggacttgggtcagttccttctcttctgccatatcagctcacaccagcatgatggtatggaagcttatgtgaaagtcgacagttgtcctgaggagccacagttgcgcaataagaataatgaagaagccgaggattacgacgacgatctcaccgattctgagatggacgtggtgaggtttgatgacgacaactctccctccttcattcaaatccggagcgtggcgaagaaacaccccaagacttgggtccactatatagcggcggaagaggaggattgggattacgctcctcttgtattggcaccagatgaccgctcatacaaaagccagtacctcaacaacggaccgcagagaattggccggaagtataagaaagtgcgatttatggcctatacagacgaaacctttaagacaagggaggccatccagcatgagagtgggattttgggacctcttctttacggcgaagttggtgataccctcctcatcatcttcaagaatcaagcttctcgcccctataacatttacccacacgggatcactgacgttaggcctttgtatagcagaagacttcccaaaggcgtgaagcatctcaaagacttccccattttgccaggcgagatctttaagtacaaatggaccgtcacagtggaagatggaccgactaaatcagaccctcgatgccttacgcggtactattcctccttcgtgaatatggagagagatttggcaagcggactcataggaccactcctcatctgttacaaggaatctgtagaccagaggggtaaccagattatgagtgataaacgcaatgtgatcctttttagcgtcttcgacgagaaccggtcctggtacttgaccgagaatatacaaaggttccttcccaaccccgcaggcgttcagttggaagaccctgagtttcaggccagcaatattatgcactcaatcaacggctatgtgtttgatagtctccagctttctgtttgcctccatgaagtagcctattggtacatcttgtcaattggtgctcaaacagacttcctctccgtcttcttctccggctacacctttaagcacaagatggtgtatgaggacactctcacactctttccattttctggagaaaccgtgttcatgagcatggagaatccaggcctttggatcttgggttgccacaacagtgattttcgcaatcggggaatgactgctctcctcaaagtcagcagctgtgataagaacacaggcgactattacgaagattcttacgaggacataagtgcctacttgttgtccaagaataacgccattgagcccagatcattctcccagaatcctcccgtgcttaaaaggcatcagcgcgaaatcaccagaactactcttcagtctgatcaagaggagattgactatgacgacaccataagcgtggaaatgaagaaggaggatttcgatatctatgacgaagatgagaaccagtctccgcggagctttcagaagaagacgcgacactacttcattgcagcagtcgaaaggctttgggactacggtatgtcatcatcccctcatgtgttgcgcaatagagctcagagtggaagtgttccacagttcaagaaagtcgtctttcaagagtttacagatggcagcttcacacagcctctctatcggggcgagcttaacgaacatttgggactccttggtccctatatccgagccgaagtggaggacaacattatggttacctttaggaatcaagcctctcgcccctacagcttctactcctccctcatcagttatgaggaggatcagagacaaggcgctgaaccacggaagaactttgtgaaaccgaatgagacgaagacctacttctggaaagtacagcaccacatggcccccacaaaagacgaattcgattgcaaagcatgggcgtatttttcagacgttgacttggagaaagatgtacattcaggacttattggtcctttgttggtgtgtcacactaacactctcaatccagcccatggcaggcaggtgacagtccaggaattcgctcttttctttaccatctttgatgagaccaagtcctggtacttcacggaaaacatggagcgcaattgcagagccccctgtaacatacagatggaggaccctacctttaaggaaaattatcggttccacgcaatcaacggatacattatggatacactccctggccttgtgatggctcaggaccaacgaatcaggtggtacctcctcagcatgggttctaatgagaacatacactccattcacttttcaggacatgtgttcactgtccggaagaaagaagagtataagatggccctctacaatttgtatccaggcgtgtttgagaccgttgaaatgcttccctctaaagctggcatctggagagtagagtgcttgatcggagaacatcttcacgcaggtatgagcaccttgttcctcgtgtacagcaacaaatgtcagaccccacttggcatggccagtggacacattcgcgactttcagatcacagcatctggccagtatggacaatgggccccaaagttggctcgcctccattactccggtagcataaatgcgtggtccactaaagaacctttcagctggattaaggtcgatcttcttgcccccatgatcatccacggcattaagacacagggagcgaggcagaaattctcctccctctacatctcacagttcattattatgtatagtttggacggcaagaagtggcaaacttatagaggtaacagtactggaacactcatggtgttcttcggcaacgttgatagctctggcatcaaacacaacatctttaatcctcccataatagctcggtacatcagattgcatccgacccactacagcattaggagtacactccgaatggagcttatgggttgcgacttgaattcctgttcaatgccactcggaatggagtctaaagccatctctgatgcacagataaccgccagtagctactttacgaacatgtttgctacgtggtcaccctctaaggcaaggcttcatttgcaaggccggtctaatgcctggagacctcaggtgaacaacccgaaagaatggctccaggtggactttcagaagaccatgaaagtaacaggtgtcactactcagggagttaagtccttgctcaccagcatgtatgtgaaggagttccttatttcctcatcacaagatggccaccagtggaccctcttctttcagaatggtaaggtcaaagtgtttcagggcaatcaagacagcttcacacccgtggtgaacagtcttgatcctccactcttgacacgataccttcgaatccatccacagtcttgggttcaccagattgcattgcgcatggaagtacttggatgcgaggctcaggacctctac

SEQ ID NO: 164 - protein, 1457 aa, synthetic construct
  REGION 1..1457: note = Variant of human B-domain deleted Factor VIII
MQIELSTCFFLCLLRFCFSATRRYYLGAVELSWDYMQSDLGELPVDARFPPRVPKSFPFNTSVVYKKTLFVEFTDHLFNIAKPRPPWMGLLGPTIQAEVYDTVVITLKNMASHPVSLHAVGVSYWKASEGAEYDDQTSQREKEDDKVFPGGSHTYVWQVLKENGPMASDPLCLTYSYLSHVDLVKDLNSGLIGALLVCREGSLAKEKTQTLHKFILLFAVFDEGKSWHSETKNSLMQDRDAASARAWPKMHTVNGYVNRSLPGLIGCHRKSVYWHVIGMGTTPEVHSIFLEGHTFLVRNHRQASLEISPITFLTAQTLLMDLGQFLLFCHISSHQHDGMEAYVKVDSCPEEPQLRNKNNEEAEDYDDDLTDSEMDVVRFDDDNSPSFIQIRSVAKKHPKTWVHYIAAEEEDWDYAPLVLAPDDRSYKSQYLNNGPQRIGRKYKKVRFMAYTDETFKTREAIQHESGILGPLLYGEVGDTLLIIFKNQASRPYNIYPHGITDVRPLYSRRLPKGVKHLKDFPILPGEIFKYKWTVTVEDGPTKSDPRCLTRYYSSFVNMERDLASGLIGPLLICYKESVDQRGNQIMSDKRNVILFSVFDENRSWYLTENIQRFLPNPAGVQLEDPEFQASNIMHSINGYVFDSLQLSVCLHEVAYWYILSIGAQTDFLSVFFSGYTFKHKMVYEDTLTLFPFSGETVFMSMENPGLWILGCHNSDFRNRGMTALLKVSSCDKNTGDYYEDSYEDISAYLLSKNNAIEPRSFSQNPPVLKRHQREITRTTLQSDQEEIDYDDTISVEMKKEDFDIYDEDENQSPRSFQKKTRHYFIAAVERLWDYGMSSSPHVLRNRAQSGSVPQFKKVVFQEFTDGSFTQPLYRGELNEHLGLLGPYIRAEVEDNIMVTFRNQASRPYSFYSSLISYEEDQRQGAEPRKNFVKPNETKTYFWKVQHHMAPTKDEFDCKAWAYFSDVDLEKDVHSGLIGPLLVCHTNTLNPAHGRQVTVQEFALFFTIFDETKSWYFTENMERNCRAPCNIQMEDPTFKENYRFHAINGYIMDTLPGLVMAQDQRIRWYLLSMGSNENIHSIHFSGHVFTVRKKEEYKMALYNLYPGVFETVEMLPSKAGIWRVECLIGEHLHAGMSTLFLVYSNKCQTPLGMASGHIRDFQITASGQYGQWAPKLARLHYSGSINAWSTKEPFSWIKVDLLAPMIIHGIKTQGARQKFSSLYISQFIIMYSLDGKKWQTYRGNSTGTLMVFFGNVDSSGIKHNIFNPPIIARYIRLHPTHYSIRSTLRMELMGCDLNSCSMPLGMESKAISDAQITASSYFTNMFATWSPSKARLHLQGRSNAWRPQVNNPKEWLQVDFQKTMKVTGVTTQGVKSLLTSMYVKEFLISSSQDGHQWTLFFQNGKVKVFQGNQDSFTPVVNSLDPPLLTRYLRIHPQSWVHQIALRMEVLGCEAQDLY

SEQ ID NO: 165 - DNA, 4371 bp, synthetic construct
  misc_feature 1..4371: note = Variant of human B-domain deleted Factor VIII
  source 1..4371: mol_type = other DNA
atgcagattgaactgtctacctgcttcttcctctgtttgctgaggttctgctttagcgccactagacggtactaccttggcgctgtggagctgtcctgggactatatgcagagtgatttgggagagcttcccgtcgacgcacgatttcctcctcgcgttccaaagtcatttcccttcaacacaagcgtggtgtacaagaagacgctcttcgtcgaattcaccgatcacctgttcaatatcgccaaacccagaccaccatggatgggtcttttggggcctaccatacaagcggaggtgtatgacacagttgttatcactctcaagaacatggcttctcatccggtaagtcttcacgcagtgggcgtgtcctactggaaagcttcagaaggagccgagtatgatgatcagacatcccagagggagaaagaagacgacaaggtatttccaggtgggtctcatacctatgtgtggcaagtgctcaaagagaatggccctatggcaagcgatccgctctgtttgacttacagctacctttcacacgttgacctcgtcaaggacctcaactccgggttgattggagccttgttggtatgcagggaaggatctcttgccaaagagaagacacagaccctccacaagtttatccttctctttgctgtgttcgatgagggcaaaagttggcatagcgaaacgaagaattccctcatgcaggatcgcgacgcagccagcgccagagcttggcccaagatgcacactgtgaacggatatgtcaataggtcacttcctggcttgattgggtgtcatcggaaaagtgtctactggcacgtgatcggaatggggacaacaccagaggtccactccatatttctcgaaggccataccttccttgttcgaaaccacagacaggcatccttggagatctctcccattacctttctcactgcccaaacgctccttatggacttgggtcagttccttctcttctgccatatcagctcacaccagcatgatggtatggaagcttatgtgaaagtcgacagttgtcctgaggagccacagttgcgcatgaagaataatgaagaagccgaggattacgacgacgatctcaccgattctgagatggacgtggtgaggtttgatgacgacaactctccctccttcattcaaatccggagcgtggcgaagaaacaccccaagacttgggtccactatatagcggcggaagaggaggattgggattacgctcctcttgtattggcaccagatgaccgctcatacaaaagccagtacctcaacaacggaccgcagagaattggccggaagtataagaaagtgcgatttatggcctatacagacgaaacctttaagacaagggaggccatccagcatgagagtgggattttgggacctcttctttacggcgaagttggtgataccctcctcatcatcttcaagaatcaagcttctcgcccctataacatttacccacacgggatcactgacgttaggcctttgtatagcagaagacttcccaaaggcgtgaagcatctcaaagacttccccattttgccaggcgagatctttaagtacaaatggaccgtcacagtggaagatggaccgactaaatcagaccctcgatgccttacgcggtactattcctccttcgtgaatatggagagagatttggcaagcggactcataggaccactcctcatctgttacaaggaatctgtagaccagaggggtaaccagattatgagtgataaacgcaatgtgatcctttttagcgtcttcgacgagaaccggtcctggtacttgaccgagaatatacaaaggttccttcccaaccccgcaggcgttcagttggaagaccctgagtttcaggccagcaatattatgcactcaatcaacggctatgtgtttgatagtctccagctttctgtttgcctccatgaagtagcctattggtacatcttgtcaattggtgctcaaacagacttcctctccgtcttcttctccggctacacctttaagcacaagatggtgtatgaggacactctcacactctttccattttctggagaaaccgtgttcatgagcatggagaatccaggcctttggatcttgggttgccacaacagtgattttcgcaatcggggaatgactgctctcctcaaagtcagcagctgtgataagaacacaggcgactattacgaagattcttacgaggacataagtgcctacttgttgtccaagaataacgccattgagcccagatcattctcccagaatcctcccgtgcttaaaaggcatcagcgcgaaatcaccagaactactcttcagtctgatcaagaggagattgactatgacgacaccataagcgtggaaatgaagaaggaggatttcgatatctatgacgaagatgagaaccagtctccgcggagctttcagaagaagacgcgacactacttcattgcagcagtcgaaaggctttgggactacggtatgtcatcatcccctcatgtgttgcgcaatagagctcagagtggaagtgttccacagttcaagaaagtcgtctttcaagagtttacagatggcagcttcacacagcctctctatcggggcgagcttaacgaacatttgggactccttggtccctatatccgagccgaagtggaggacaacattatggttacctttaggaatcaagcctctcgcccctacagcttctactcctccctcatcagttatgaggaggatcagagacaaggcgctgaaccacggaagaactttgtgaaaccgaatgagacgaagacctacttctggaaagtacagcaccacatggcccccacaaaagacgaattcgattgcaaagcatgggcgtatttttcagacgttgacttggagaaagatgtacattcaggacttattggtcctttgttggtgtgtcacactaacactctcaatccagcccatggcaggcaggtgacagtccaggaattcgctcttttctttaccatctttgatgagaccaagtcctggtacttcacggaaaacatggagcgcaattgcagagccccctgtaacatacagatggaggaccctacctttaaggaaaattatcggttccacgcaatcaacggatacattatggatacactccctggccttgtgatggctcaggaccaacgaatcaggtggtacctcctcagcatgggttctaatgagaacatacactccattcacttttcaggacatgtgttcactgtccggaagaaagaagagtataagatggccctctacaatttgtatccaggcgtgtttgagaccgttgaaatgcttccctctaaagctggcatctggagagtagagtgcttgatcggagaacatcttcacgcaggtatgagcaccttgttcctcgtgtacagcaacaaatgtcagaccccacttggcatggccagtggacacattcgcgactttcagatcacagcatctggccagtatggacaatgggccccaaagttggctcgcctccattactccggtagcataaatgcgtggtccactaaagaacctttcagctggattaaggtcgatcttcttgcccccatgatcatccacggcattaagacacagggagcgaggcagaaattctcctccctctacatctcacagttcattattatgtatagtttggacggcaagaagtggcaaacttatagaggtaacagtactggaacactcatgagtttcttcggcaacgttgatagctctggcatcaaacacaacatctttaatcctcccataatagctcggtacatcagattgcatccgacccactacagcattaggagtacactccgaatggagcttatgggttgcgacttgaattcctgttcaatgccactcggaatggagtctaaagccatctctgatgcacagataaccgccagtagctactttacgaacatgtttgctacgtggtcaccctctaaggcaaggcttcatttgcaaggccggtctaatgcctggagacctcaggtgaacaacccgaaagaatggctccaggtggactttcagaagaccatgaaagtaacaggtgtcactactcagggagttaagtccttgctcaccagcatgtatgtgaaggagttccttatttcctcatcacaagatggccaccagtggaccctcttctttcagaatggtaaggtcaaagtgtttcagggcaatcaagacagcttcacacccgtggtgaacagtcttgatcctccactcttgacacgataccttcgaatccatccacagtcttgggttcaccagattgcattgcgcatggaagtacttggatgcgaggctcaggacctctac

SEQ ID NO: 166 - protein, 1457 aa, synthetic construct
  REGION 1..1457: note = Variant of human B-domain deleted Factor VIII
MQIELSTCFFLCLLRFCFSATRRYYLGAVELSWDYMQSDLGELPVDARFPPRVPKSFPFNTSVVYKKTLFVEFTDHLFNIAKPRPPWMGLLGPTIQAEVYDTVVITLKNMASHPVSLHAVGVSYWKASEGAEYDDQTSQREKEDDKVFPGGSHTYVWQVLKENGPMASDPLCLTYSYLSHVDLVKDLNSGLIGALLVCREGSLAKEKTQTLHKFILLFAVFDEGKSWHSETKNSLMQDRDAASARAWPKMHTVNGYVNRSLPGLIGCHRKSVYWHVIGMGTTPEVHSIFLEGHTFLVRNHRQASLEISPITFLTAQTLLMDLGQFLLFCHISSHQHDGMEAYVKVDSCPEEPQLRMKNNEEAEDYDDDLTDSEMDVVRFDDDNSPSFIQIRSVAKKHPKTWVHYIAAEEEDWDYAPLVLAPDDRSYKSQYLNNGPQRIGRKYKKVRFMAYTDETFKTREAIQHESGILGPLLYGEVGDTLLIIFKNQASRPYNIYPHGITDVRPLYSRRLPKGVKHLKDFPILPGEIFKYKWTVTVEDGPTKSDPRCLTRYYSSFVNMERDLASGLIGPLLICYKESVDQRGNQIMSDKRNVILFSVFDENRSWYLTENIQRFLPNPAGVQLEDPEFQASNIMHSINGYVFDSLQLSVCLHEVAYWYILSIGAQTDFLSVFFSGYTFKHKMVYEDTLTLFPFSGETVFMSMENPGLWILGCHNSDFRNRGMTALLKVSSCDKNTGDYYEDSYEDISAYLLSKNNAIEPRSFSQNPPVLKRHQREITRTTLQSDQEEIDYDDTISVEMKKEDFDIYDEDENQSPRSFQKKTRHYFIAAVERLWDYGMSSSPHVLRNRAQSGSVPQFKKVVFQEFTDGSFTQPLYRGELNEHLGLLGPYIRAEVEDNIMVTFRNQASRPYSFYSSLISYEEDQRQGAEPRKNFVKPNETKTYFWKVQHHMAPTKDEFDCKAWAYFSDVDLEKDVHSGLIGPLLVCHTNTLNPAHGRQVTVQEFALFFTIFDETKSWYFTENMERNCRAPCNIQMEDPTFKENYRFHAINGYIMDTLPGLVMAQDQRIRWYLLSMGSNENIHSIHFSGHVFTVRKKEEYKMALYNLYPGVFETVEMLPSKAGIWRVECLIGEHLHAGMSTLFLVYSNKCQTPLGMASGHIRDFQITASGQYGQWAPKLARLHYSGSINAWSTKEPFSWIKVDLLAPMIIHGIKTQGARQKFSSLYISQFIIMYSLDGKKWQTYRGNSTGTLMSFFGNVDSSGIKHNIFNPPIIARYIRLHPTHYSIRSTLRMELMGCDLNSCSMPLGMESKAISDAQITASSYFTNMFATWSPSKARLHLQGRSNAWRPQVNNPKEWLQVDFQKTMKVTGVTTQGVKSLLTSMYVKEFLISSSQDGHQWTLFFQNGKVKVFQGNQDSFTPVVNSLDPPLLTRYLRIHPQSWVHQIALRMEVLGCEAQDLY

SEQ ID NO: 167 - DNA, 4371 bp, synthetic construct
  misc_feature 1..4371: note = Variant of human B-domain deleted Factor VIII
  source 1..4371: mol_type = other DNA
atgcagattgaactgtctacctgcttcttcctctgtttgctgaggttctgctttagcgccactagacggtactaccttggcgctgtggagctgtcctgggactatatgcagagtgatttgggagagcttcccgtcgacgcacgatttcctcctcgcgttccaaagtcatttcccttcaacacaagcgtggtgtacaagaagacgctcttcgtcgaattcaccgatcacctgttcaatatcgccaaacccagaccaccatggatgggtcttttggggcctaccatacaagcggaggtgtatgacacagttgttatcactctcaagaacatggcttctcatccggtaagtcttcacgcagtgggcgtgtcctactggaaagcttcagaaggagccgagtatgatgatcagacatcccagagggagaaagaagacgacaaggtatttccaggtgggtctcatacctatgtgtggcaagtgctcaaagagaatggccctatggcaagcgatccgctctgtttgacttacagctacctttcacacgttgacctcgtcaaggacctcaactccgggttgattggagccttgttggtatgcagggaaggatctcttgccaaagagaagacacagaccctccacaagtttatccttctctttgctgtgttcgatgagggcaaaagttggcatagcgaaacgaagaattccctcatgcaggatcgcgacgcagccagcgccagagcttggcccaagatgcacactgtgaacggatatgtcaataggtcacttcctggcttgattgggtgtcatcggaaaagtgtctactggcacgtgatcggaatggggacaacaccagaggtccactccatatttctcgaaggccataccttccttgttcgaaaccacagacaggcatccttggagatctctcccattacctttctcactgcccaaacgctccttatggacttgggtcagttccttctcttctgccatatcagctcacaccagcatgatggtatggaagcttatgtgaaagtcgacagttgtcctgaggagccacagttgcgcatgaagaataatgaagaagccgaggattacgacgacgatctcaccgattctgagatggacgtggtgaggtttgatgacgacaactctccctccttcattcaaatccggagcgtggcgaagaaacaccccaagacttgggtccactatatagcggcggaagaggaggattgggattacgctcctcttgtattggcaccagatgaccgctcatacaaaagccagtacctcaacaacggaccgcagagaattggccggaagtataagaaagtgcgatttatggcctatacagacgaaacctttaagacaagggaggccatccagcatgagagtgggattttgggacctcttctttacggcgaagttggtgataccctcctcatcatcttcaagaatcaagcttctcgcccctataacatttacccacacgggatcactgacgttaggcctttgtatagcagaagacttcccaaaggcgtgaagcatctcaaagacttccccattttgccaggcgagatctttaagtacaaatggaccgtcacagtggaagatggaccgactaaatcagaccctcgatgccttacgcggtactattcctccttcgtgaatatggagagagatttggcaagcggactcataggaccactcctcatctgttacaaggaatctgtagaccagaggggtaaccagattatgagtgataaacgcaatgtgatcctttttagcgtcttcgacgagaaccggtcctggtacttgaccgagaatatacaaaggttccttcccaaccccgcaggcgttcagttggaagaccctgagtttcaggccagcaatattatgcactcaatcaacggctatgtgtttgatagtctccagctttctgtttgcctccatgaagtagcctattggtacatcttgtcaattggtgctcaaacagacttcctctccgtcttcttctccggctacacctttaagcacaagatggtgtatgaggacactctcacactctttccattttctggagaaaccgtgttcatgagcatggagaatccaggcctttggatcttgggttgccacaacagtgattttcgcaatcggggaatgactgctctcctcaaagtcagcagctgtgataagaacacaggcgactattacgaagattcttacgaggacataagtgcctacttgttgtccaagaataacgccattgagcccagatcattctcccagaatcctcccgtgcttaaaaggcatcagcgcgaaatcaccagaactactcttcagtctgatcaagaggagattgactatgacgacaccataagcgtggaaatgtgtaaggaggatttcgatatctatgacgaagatgagaaccagtctccgcggagctttcagaagaagacgcgacactacttcattgcagcagtcgaaaggctttgggactacggtatgtcatcatcccctcatgtgttgcgcaatagagctcagagtggaagtgttccacagttcaagaaagtcgtctttcaagagtttacagatggcagcttcacacagcctctctatcggggcgagcttaacgaacatttgggactccttggtccctatatccgagccgaagtggaggacaacattatggttacctttaggaatcaagcctctcgcccctacagcttctactcctccctcatcagttatgaggaggatcagagacaaggcgctgaaccacggaagaactttgtgaaaccgaatgagacgaagacctacttctggaaagtacagcaccacatggcccccacaaaagacgaattcgattgcaaagcatgggcgtatttttcagacgttgacttggagaaagatgtacattcaggacttattggtcctttgttggtgtgtcacactaacactctcaatccagcccatggcaggcaggtgacagtccaggaattcgctcttttctttaccatctttgatgagaccaagtcctggtacttcacggaaaacatggagcgcaattgcagagccccctgtaacatacagatggaggaccctacctttaaggaaaattatcggttccacgcaatcaacggatacattatggatacactccctggccttgtgatggctcaggaccaacgaatcaggtggtacctcctcagcatgggttctaatgagaacatacactccattcacttttcaggacatgtgttcactgtccggaagaaagaagagtataagatggccctctacaatttgtatccaggcgtgtttgagaccgttgaaatgcttccctctaaagctggcatctggagagtagagtgcttgatcggagaacatcttcacgcaggtatgagcaccttgttcctcgtgtacagcaacaaatgtcagaccccacttggcatggccagtggacacattcgcgactttcagatcacagcatctggccagtatggacaatgggccccaaagttggctcgcctccattactccggtagcataaatgcgtggtccactaaagaacctttcagctggattaaggtcgatcttcttgcccccatgatcatccacggcattaagacacagggagcgaggcagaaattctcctccctctacatctcacagttcattattatgtatagtttggacggcaagaagtggcaaacttatagaggtaacagtactggaacactcatggtgttcttcggcaacgttgatagctctggcatcaaacacaacatctttaatcctcccataatagctcggtacatcagattgcatccgacccactacagcattaggagtacactccgaatggagcttatgggttgcgacttgaattcctgttcaatgccactcggaatggagtctaaagccatctctgatgcacagataaccgccagtagctactttacgaacatgtttgctacgtggtcaccctctaaggcaaggcttcatttgcaaggccggtctaatgcctggagacctcaggtgaacaacccgaaagaatggctccaggtggactttcagaagaccatgaaagtaacaggtgtcactactcagggagttaagtccttgctcaccagcatgtatgtgaaggagttccttatttcctcatcacaagatggccaccagtggaccctcttctttcagaatggtaaggtcaaagtgtttcagggcaatcaagacagcttcacacccgtggtgaacagtcttgatcctccactcttgacacgataccttcgaatccatccacagtcttgggttcaccagattgcattgcgcatggaagtacttggatgcgaggctcaggacctctac

SEQ ID NO: 168 - protein, 1457 aa, synthetic construct
  REGION 1..1457: note = Variant of human B-domain deleted Factor VIII
MQIELSTCFFLCLLRFCFSATRRYYLGAVELSWDYMQSDLGELPVDARFPPRVPKSFPFNTSVVYKKTLFVEFTDHLFNIAKPRPPWMGLLGPTIQAEVYDTVVITLKNMASHPVSLHAVGVSYWKASEGAEYDDQTSQREKEDDKVFPGGSHTYVWQVLKENGPMASDPLCLTYSYLSHVDLVKDLNSGLIGALLVCREGSLAKEKTQTLHKFILLFAVFDEGKSWHSETKNSLMQDRDAASARAWPKMHTVNGYVNRSLPGLIGCHRKSVYWHVIGMGTTPEVHSIFLEGHTFLVRNHRQASLEISPITFLTAQTLLMDLGQFLLFCHISSHQHDGMEAYVKVDSCPEEPQLRMKNNEEAEDYDDDLTDSEMDVVRFDDDNSPSFIQIRSVAKKHPKTWVHYIAAEEEDWDYAPLVLAPDDRSYKSQYLNNGPQRIGRKYKKVRFMAYTDETFKTREAIQHESGILGPLLYGEVGDTLLIIFKNQASRPYNIYPHGITDVRPLYSRRLPKGVKHLKDFPILPGEIFKYKWTVTVEDGPTKSDPRCLTRYYSSFVNMERDLASGLIGPLLICYKESVDQRGNQIMSDKRNVILFSVFDENRSWYLTENIQRFLPNPAGVQLEDPEFQASNIMHSINGYVFDSLQLSVCLHEVAYWYILSIGAQTDFLSVFFSGYTFKHKMVYEDTLTLFPFSGETVFMSMENPGLWILGCHNSDFRNRGMTALLKVSSCDKNTGDYYEDSYEDISAYLLSKNNAIEPRSFSQNPPVLKRHQREITRTTLQSDQEEIDYDDTISVEMCKEDFDIYDEDENQSPRSFQKKTRHYFIAAVERLWDYGMSSSPHVLRNRAQSGSVPQFKKVVFQEFTDGSFTQPLYRGELNEHLGLLGPYIRAEVEDNIMVTFRNQASRPYSFYSSLISYEEDQRQGAEPRKNFVKPNETKTYFWKVQHHMAPTKDEFDCKAWAYFSDVDLEKDVHSGLIGPLLVCHTNTLNPAHGRQVTVQEFALFFTIFDETKSWYFTENMERNCRAPCNIQMEDPTFKENYRFHAINGYIMDTLPGLVMAQDQRIRWYLLSMGSNENIHSIHFSGHVFTVRKKEEYKMALYNLYPGVFETVEMLPSKAGIWRVECLIGEHLHAGMSTLFLVYSNKCQTPLGMASGHIRDFQITASGQYGQWAPKLARLHYSGSINAWSTKEPFSWIKVDLLAPMIIHGIKTQGARQKFSSLYISQFIIMYSLDGKKWQTYRGNSTGTLMVFFGNVDSSGIKHNIFNPPIIARYIRLHPTHYSIRSTLRMELMGCDLNSCSMPLGMESKAISDAQITASSYFTNMFATWSPSKARLHLQGRSNAWRPQVNNPKEWLQVDFQKTMKVTGVTTQGVKSLLTSMYVKEFLISSSQDGHQWTLFFQNGKVKVFQGNQDSFTPVVNSLDPPLLTRYLRIHPQSWVHQIALRMEVLGCEAQDLY

SEQ ID NO: 169 - DNA, 4371 bp, synthetic construct
  misc_feature 1..4371: note = Variant of human B-domain deleted Factor VIII
  source 1..4371: mol_type = other DNA
atgcagattgaactgtctacctgcttcttcctctgtttgctgaggttctgctttagcgccactagacggtactaccttggcgctgtggagctgtcctgggactatatgcagagtgatttgggagagcttcccgtcgacgcacgatttcctcctcgcgttccaaagtcatttcccttcaacacaagcgtggtgtacaagaagacgctcttcgtcgaattcaccgatcacctgttcaatatcgccaaacccagaccaccatggatgggtcttttggggcctaccatacaagcggaggtgtatgacacagttgttatcactctcaagaacatggcttctcatccggtaagtcttcacgcagtgggcgtgtcctactggaaagcttcagaaggagccgagtatgatgatcagacatcccagagggagaaagaagacgacaaggtatttccaggtgggtctcatacctatgtgtggcaagtgctcaaagagaatggccctatggcaagcgatccgctctgtttgacttacagctacctttcacacgttgacctcgtcaaggacctcaactccgggttgattggagccttgttggtatgcagggaaggatctcttgccaaagagaagacacagaccctccacaagtttatccttctctttgctgtgttcgatgagggcaaaagttggcatagcgaaacgaagaattccctcatgcaggatcgcgacgcagccagcgccagagcttggcccaagatgcacactgtgaacggatatgtcaataggtcacttcctggcttgattgggtgtcatcggaaaagtgtctactggcacgtgatcggaatggggacaacaccagaggtccactccatatttctcgaaggccataccttccttgttcgaaaccacagacaggcatccttggagatctctcccattacctttctcactgcccaaacgctccttatggacttgggtcagttccttctcttctgccatatcagctcacaccagcatgatggtatggaagcttatgtgaaagtcgacagttgtcctgaggagccacagttgcgcatgaagaataatgaagaagccgaggattacgacgacgatctcaccgattctgagatggacgtggtgaggtttgatgacgacaactctccctccttcattcaaatccggagcgtggcgaagaaacaccccaagacttgggtccactatatagcggcggaagaggaggattgggattacgctcctcttgtattggcaccagatgaccgctcatacaaaagccagtacctcaacgggggaccgcagagaattggccggaagtataagaaagtgcgatttatggcctatacagacgaaacctttaagacaagggaggccatccagcatgagagtgggattttgggacctcttctttacggcgaagttggtgataccctcctcatcatcttcaagaatcaagcttctcgcccctataacatttacccacacgggatcactgacgttaggcctttgtatagcagaagacttcccaaaggcgtgaagcatctcaaagacttccccattttgccaggcgagatctttaagtacaaatggaccgtcacagtggaagatggaccgactaaatcagaccctcgatgccttacgcggtactattcctccttcgtgaatatggagagagatttggcaagcggactcataggaccactcctcatctgttacaaggaatctgtagaccagaggggtaaccagattatgagtgataaacgcaatgtgatcctttttagcgtcttcgacgagaaccggtcctggtacttgaccgagaatatacaaaggttccttcccaaccccgcaggcgttcagttggaagaccctgagtttcaggccagcaatattatgcactcaatcaacggctatgtgtttgatagtctccagctttctgtttgcctccatgaagtagcctattggtacatcttgtcaattggtgctcaaacagacttcctctccgtcttcttctccggctacacctttaagcacaagatggtgtatgaggacactctcacactctttccattttctggagaaaccgtgttcatgagcatggagaatccaggcctttggatcttgggttgccacaacagtgattttcgcaatcggggaatgactgctctcctcaaagtcagcagctgtgataagaacacaggcgactattacgaagattcttacgaggacataagtgcctacttgttgtccaagaataacgccattgagcccagatcattctcccagaatcctcccgtgcttaaaaggcatcagcgcgaaatcaccagaactactcttcagtctgatcaagaggagattgactatgacgacaccataagcgtggaaatgaagaaggaggatttcgatatctatgacgaagatgagaaccagtctccgcggagctttcagaagaagacgcgacactacttcattgcagcagtcgaaaggctttgggactacggtatgtcatcatcccctcatgtgttgcgcaatagagctcagagtggaagtgttccacagttcaagaaagtcgtctttcaagagtttacagatggcagcttcacacagcctctctatcggggcgagcttaacgaacatttgggactccttggtccctatatccgagccgaagtggaggacaacattatggttacctttaggaatcaagcctctcgcccctacagcttctactcctccctcatcagttatgaggaggatcagagacaaggcgctgaaccacggaagaactttgtgaaaccgaatgagacgaagacctacttctggaaagtacagcaccacatggcccccacaaaagacgaattcgattgcaaagcatgggcgtatttttcagacgttgacttggagaaagatgtacattcaggacttattggtcctttgttggtgtgtcacactaacactctcaatccagcccatggcaggcaggtgacagtccaggaattcgctcttttctttaccatctttgatgagaccaagtcctggtacttcacggaaaacatggagcgcaattgcagagccccctgtaacatacagatggaggaccctacctttaaggaaaattatcggttccacgcaatcaacggatacattatggatacactccctggccttgtgatggctcaggaccaacgaatcaggtggtacctcctcagcatgggttctaatgagaacatacactccattcacttttcaggacatgtgttcactgtccggaagaaagaagagtataagatggccctctacaatttgtatccaggcgtgtttgagaccgttgaaatgcttccctctaaagctggcatctggagagtagagtgcttgatcggagaacatcttcacgcaggtatgagcaccttgttcctcgtgtacagcaacaaatgtcagaccccacttggcatggccagtggacacattcgcgactttcagatcacagcatctggccagtatggacaatgggccccaaagttggctcgcctccattactccggtagcataaatgcgtggtccactaaagaacctttcagctggattaaggtcgatcttcttgcccccatgatcatccacggcattaagacacagggagcgaggcagaaattctcctccctctacatctcacagttcattattatgtatagtttggacggcaagaagtggcaaacttatagaggtaacagtactggaacactcatggtgttcttcggcaacgttgatagctctggcatcaaacacaacatctttaatcctcccataatagctcggtacatcagattgcatccgacccactacagcattaggagtacactccgaatggagcttatgggttgcgacttgaattcctgttcaatgccactcggaatggagtctaaagccatctctgatgcacagataaccgccagtagctactttacgaacatgtttgctacgtggtcaccctctaaggcaaggcttcatttgcaaggccggtctaatgcctggagacctcaggtgaacaacccgaaagaatggctccaggtggactttcagaagaccatgaaagtaacaggtgtcactactcagggagttaagtccttgctcaccagcatgtatgtgaaggagttccttatttcctcatcacaagatggccaccagtggaccctcttctttcagaatggtaaggtcaaagtgtttcagggcaatcaagacagcttcacacccgtggtgaacagtcttgatcctccactcttgacacgataccttcgaatccatccacagtcttgggttcaccagattgcattgcgcatggaagtacttggatgcgaggctcaggacctctac

SEQ ID NO: 170 - protein, 1457 aa, synthetic construct
  REGION 1..1457: note = Variant of human B-domain deleted Factor VIII
MQIELSTCFFLCLLRFCFSATRRYYLGAVELSWDYMQSDLGELPVDARFPPRVPKSFPFNTSVVYKKTLFVEFTDHLFNIAKPRPPWMGLLGPTIQAEVYDTVVITLKNMASHPVSLHAVGVSYWKASEGAEYDDQTSQREKEDDKVFPGGSHTYVWQVLKENGPMASDPLCLTYSYLSHVDLVKDLNSGLIGALLVCREGSLAKEKTQTLHKFILLFAVFDEGKSWHSETKNSLMQDRDAASARAWPKMHTVNGYVNRSLPGLIGCHRKSVYWHVIGMGTTPEVHSIFLEGHTFLVRNHRQASLEISPITFLTAQTLLMDLGQFLLFCHISSHQHDGMEAYVKVDSCPEEPQLRMKNNEEAEDYDDDLTDSEMDVVRFDDDNSPSFIQIRSVAKKHPKTWVHYIAAEEEDWDYAPLVLAPDDRSYKSQYLNGGPQRIGRKYKKVRFMAYTDETFKTREAIQHESGILGPLLYGEVGDTLLIIFKNQASRPYNIYPHGITDVRPLYSRRLPKGVKHLKDFPILPGEIFKYKWTVTVEDGPTKSDPRCLTRYYSSFVNMERDLASGLIGPLLICYKESVDQRGNQIMSDKRNVILFSVFDENRSWYLTENIQRFLPNPAGVQLEDPEFQASNIMHSINGYVFDSLQLSVCLHEVAYWYILSIGAQTDFLSVFFSGYTFKHKMVYEDTLTLFPFSGETVFMSMENPGLWILGCHNSDFRNRGMTALLKVSSCDKNTGDYYEDSYEDISAYLLSKNNAIEPRSFSQNPPVLKRHQREITRTTLQSDQEEIDYDDTISVEMKKEDFDIYDEDENQSPRSFQKKTRHYFIAAVERLWDYGMSSSPHVLRNRAQSGSVPQFKKVVFQEFTDGSFTQPLYRGELNEHLGLLGPYIRAEVEDNIMVTFRNQASRPYSFYSSLISYEEDQRQGAEPRKNFVKPNETKTYFWKVQHHMAPTKDEFDCKAWAYFSDVDLEKDVHSGLIGPLLVCHTNTLNPAHGRQVTVQEFALFFTIFDETKSWYFTENMERNCRAPCNIQMEDPTFKENYRFHAINGYIMDTLPGLVMAQDQRIRWYLLSMGSNENIHSIHFSGHVFTVRKKEEYKMALYNLYPGVFETVEMLPSKAGIWRVECLIGEHLHAGMSTLFLVYSNKCQTPLGMASGHIRDFQITASGQYGQWAPKLARLHYSGSINAWSTKEPFSWIKVDLLAPMIIHGIKTQGARQKFSSLYISQFIIMYSLDGKKWQTYRGNSTGTLMVFFGNVDSSGIKHNIFNPPIIARYIRLHPTHYSIRSTLRMELMGCDLNSCSMPLGMESKAISDAQITASSYFTNMFATWSPSKARLHLQGRSNAWRPQVNNPKEWLQVDFQKTMKVTGVTTQGVKSLLTSMYVKEFLISSSQDGHQWTLFFQNGKVKVFQGNQDSFTPVVNSLDPPLLTRYLRIHPQSWVHQIALRMEVLGCEAQDLY

SEQ ID NO: 171 - DNA, 4371 bp, synthetic construct
  misc_feature 1..4371: note = Variant of human B-domain deleted Factor VIII
  source 1..4371: mol_type = other DNA
atgcagattgaactgtctacctgcttcttcctctgtttgctgaggttctgctttagcgccactagacggtactaccttggcgctgtggagctgtcctgggactatatgcagagtgatttgggagagcttcccgtcgacgcacgatttcctcctcgcgttccaaagtcatttcccttcaacacaagcgtggtgtacaagaagacgctcttcgtcgaattcaccgatcacctgttcaatatcgccaaacccagaccaccatggatgggtcttttggggcctaccatacaagcggaggtgtatgacacagttgttatcactctcaagaacatggcttctcatccggtaagtcttcacgcagtgggcgtgtcctactggaaagcttcagaaggagccgagtatgatgatcagacatcccagagggagaaagaagacgacaaggtatttccaggtgggtctcatacctatgtgtggcaagtgctcaaagagaatggccctatggcaagcgatccgctctgtttgacttacagctacctttcacacgttgacctcgtcaaggacctcaactccgggttgattggagccttgttggtatgcagggaaggatctcttgccaaagagaagacacagaccctccacaagtttatccttctctttgctgtgttcgatgagggcaaaagttggcatagcgaaacgaagaattccctcatgcaggatcgcgacgcagccagcgccagagcttggcccaagatgcacactgtgaacggatatgtcaataggtcacttcctggcttgattgggtgtcatcggaaaagtgtctactggcacgtgatcggaatggggacaacaccagaggtccactccatatttctcgaaggccataccttccttgttcgaaaccacagacaggcatccttggagatctctcccattacctttctcactgcccaaacgctccttatggacttgggtcagttccttctcttctgccatatcagctcacaccagcatgatggtatggaagcttatgtgaaagtcgacagttgtcctgaggagccacagttgcgcatgaagaataatgaagaagccgaggattacgacgacgatctcaccgattctgagatggacgtggtgaggtttgatgacgacaactctccctccttcattcaaatccggagcgtggcgaagaaacaccccaagacttgggtccactatatagcggcggaagaggaggattgggattacgctcctcttgtattggcaccagatgaccgctcatacaaaagccagtacctcaacaacggaccgcagagaattggccggaagtataagaaagtgcgatttatggcctatacagacgaaacctttaagacaagggaggccatccagcatgagagtgggattttgggacctcttctttacggcgaagttggtgataccctcctcatcatcttcaagaatcaagcttctcgcccctataacatttacccacacgggatcactgacgttaggcctttgtatagcagaagacttcccaaaggcgtgaagcatctcaaagacttccccattttgccaggcgagatctttaagtacaaatggaccgtcacagtggaagatggaccgactaaatcagaccctcgatgccttacgcggtactattcctccttcgtgaatatggagagagatttggcaagcggactcataggaccactcctcatctgttacaaggaatctgtagaccagaggggtaaccagattatgagtgataaacgcaatgtgatcctttttagcgtcttcgacgagaaccggtcctggtacttgaccgagaatatacaaaggttccttcccaaccccgcaggcgttcagttggaagaccctgagtttcaggccagcaatattatgcactcaatcaacggctatgtgtttgatagtctccagctttctgtttgcctccatgaagtagcctattggtacatcttgtcaattggtgctcaaacagacttcctctccgtcttcttctccggctacacctttaagcacaagatggtgtatgaggacactctcacactctttccattttctggagaaaccgtgttcatgagcatggagaatccaggcctttggatcttgggttgccacaacagtgattttcgcaatcggggaatgactgctctcctcaaagtcagcagctgtgataagaacacaggcgactattacgaagattcttacgaggacataagtgcctacttgttgtccaagaataacgccattgagcccagatcattctcccagaatcctcccgtgcttaaaaggcatcagcgcgaaatcaccagaactactcttcagtctgatcaagaggagattgactatgacgacaccataagcaatgaaatgaagaaggaggatttcgatatctatgacgaagatgagaaccagtctccgcggagctttcagaagaagacgcgacactacttcattgcagcagtcgaaaggctttgggactacggtatgtcatcatcccctcatgtgttgcgcaatagagctcagagtggaagtgttccacagttcaagaaagtcgtctttcaagagtttacagatggcagcttcacacagcctctctatcggggcgagcttaacgaacatttgggactccttggtccctatatccgagccgaagtggaggacaacattatggttacctttaggaatcaagcctctcgcccctacagcttctactcctccctcatcagttatgaggaggatcagagacaaggcgctgaaccacggaagaactttgtgaaaccgaatgagacgaagacctacttctggaaagtacagcaccacatggcccccacaaaagacgaattcgattgcaaagcatgggcgtatttttcagacgttgacttggagaaagatgtacattcaggacttattggtcctttgttggtgtgtcacactaacactctcaatccagcccatggcaggcaggtgacagtccaggaattcgctcttttctttaccatctttgatgagaccaagtcctggtacttcacggaaaacatggagcgcaattgcagagccccctgtaacatacagatggaggaccctacctttaaggaaaattatcggttccacgcaatcaacggatacattatggatacactccctggccttgtgatggctcaggaccaacgaatcaggtggtacctcctcagcatgggttctaatgagaacatacactccattcacttttcaggacatgtgttcactgtccggaagaaagaagagtataagatggccctctacaatttgtatccaggcgtgtttgagaccgttgaaatgcttccctctaaagctggcatctggagagtagagtgcttgatcggagaacatcttcacgcaggtatgagcaccttgttcctcgtgtacagcaacaaatgtcagaccccacttggcatggccagtggacacattcgcgactttcagatcacagcatctggccagtatggacaatgggccccaaagttggctcgcctccattactccggtagcataaatgcgtggtccactaaagaacctttcagctggattaaggtcgatcttcttgcccccatgatcatccacggcattaagacacagggagcgaggcagaaattctcctccctctacatctcacagttcattattatgtatagtttggacggcaagaagtggcaaacttatagaggtaacagtactggaacactcatggtgttcttcggcaacgttgatagctctggcatcaaacacaacatctttaatcctcccataatagctcggtacatcagattgcatccgacccactacagcattaggagtacactccgaatggagcttatgggttgcgacttgaattcctgttcaatgccactcggaatggagtctaaagccatctctgatgcacagataaccgccagtagctactttacgaacatgtttgctacgtggtcaccctctaaggcaaggcttcatttgcaaggccggtctaatgcctggagacctcaggtgaacaacccgaaagaatggctccaggtggactttcagaagaccatgaaagtaacaggtgtcactactcagggagttaagtccttgctcaccagcatgtatgtgaaggagttccttatttcctcatcacaagatggccaccagtggaccctcttctttcagaatggtaaggtcaaagtgtttcagggcaatcaagacagcttcacacccgtggtgaacagtcttgatcctccactcttgacacgataccttcgaatccatccacagtcttgggttcaccagattgcattgcgcatggaagtacttggatgcgaggctcaggacctctac

SEQ ID NO: 172 - protein, 1457 aa, synthetic construct
  REGION 1..1457: note = Variant of human B-domain deleted Factor VIII
MQIELSTCFFLCLLRFCFSATRRYYLGAVELSWDYMQSDLGELPVDARFPPRVPKSFPFNTSVVYKKTLFVEFTDHLFNIAKPRPPWMGLLGPTIQAEVYDTVVITLKNMASHPVSLHAVGVSYWKASEGAEYDDQTSQREKEDDKVFPGGSHTYVWQVLKENGPMASDPLCLTYSYLSHVDLVKDLNSGLIGALLVCREGSLAKEKTQTLHKFILLFAVFDEGKSWHSETKNSLMQDRDAASARAWPKMHTVNGYVNRSLPGLIGCHRKSVYWHVIGMGTTPEVHSIFLEGHTFLVRNHRQASLEISPITFLTAQTLLMDLGQFLLFCHISSHQHDGMEAYVKVDSCPEEPQLRMKNNEEAEDYDDDLTDSEMDVVRFDDDNSPSFIQIRSVAKKHPKTWVHYIAAEEEDWDYAPLVLAPDDRSYKSQYLNNGPQRIGRKYKKVRFMAYTDETFKTREAIQHESGILGPLLYGEVGDTLLIIFKNQASRPYNIYPHGITDVRPLYSRRLPKGVKHLKDFPILPGEIFKYKWTVTVEDGPTKSDPRCLTRYYSSFVNMERDLASGLIGPLLICYKESVDQRGNQIMSDKRNVILFSVFDENRSWYLTENIQRFLPNPAGVQLEDPEFQASNIMHSINGYVFDSLQLSVCLHEVAYWYILSIGAQTDFLSVFFSGYTFKHKMVYEDTLTLFPFSGETVFMSMENPGLWILGCHNSDFRNRGMTALLKVSSCDKNTGDYYEDSYEDISAYLLSKNNAIEPRSFSQNPPVLKRHQREITRTTLQSDQEEIDYDDTISNEMKKEDFDIYDEDENQSPRSFQKKTRHYFIAAVERLWDYGMSSSPHVLRNRAQSGSVPQFKKVVFQEFTDGSFTQPLYRGELNEHLGLLGPYIRAEVEDNIMVTFRNQASRPYSFYSSLISYEEDQRQGAEPRKNFVKPNETKTYFWKVQHHMAPTKDEFDCKAWAYFSDVDLEKDVHSGLIGPLLVCHTNTLNPAHGRQVTVQEFALFFTIFDETKSWYFTENMERNCRAPCNIQMEDPTFKENYRFHAINGYIMDTLPGLVMAQDQRIRWYLLSMGSNENIHSIHFSGHVFTVRKKEEYKMALYNLYPGVFETVEMLPSKAGIWRVECLIGEHLHAGMSTLFLVYSNKCQTPLGMASGHIRDFQITASGQYGQWAPKLARLHYSGSINAWSTKEPFSWIKVDLLAPMIIHGIKTQGARQKFSSLYISQFIIMYSLDGKKWQTYRGNSTGTLMVFFGNVDSSGIKHNIFNPPIIARYIRLHPTHYSIRSTLRMELMGCDLNSCSMPLGMESKAISDAQITASSYFTNMFATWSPSKARLHLQGRSNAWRPQVNNPKEWLQVDFQKTMKVTGVTTQGVKSLLTSMYVKEFLISSSQDGHQWTLFFQNGKVKVFQGNQDSFTPVVNSLDPPLLTRYLRIHPQSWVHQIALRMEVLGCEAQDLY

SEQ ID NO: 173 - DNA, 4371 bp, synthetic construct
  misc_feature 1..4371: note = Variant of human B-domain deleted Factor VIII
  source 1..4371: mol_type = other DNA
atgcagattgaactgtctacctgcttcttcctctgtttgctgaggttctgctttagcgccactagacggtactaccttggcgctgtggagctgtcctgggactatatgcagagtgatttgggagagcttcccgtcgacgcacgatttcctcctcgcgttccaaagtcatttcccttcaacacaagcgtggtgtacaagaagacgctcttcgtcgaattcaccgatcacctgttcaatatcgccaaacccagaccaccatggatgggtcttttggggcctaccataattgcggaggtgtatgacacagttgttatcactctcaagaacatggcttctcatccggtaagtcttcacgcagtgggcgtgtcctactggaaagcttcagaaggagccgagtatgatgatcagacatcccagagggagaaagaagacgacaaggtatttccaggtgggtctcatacctatgtgtggcaagtgctcaaagagaatggccctatggcaagcgatccgctctgtttgacttacagctacctttcacacgttgacctcgtcaaggacctcaactccgggttgattggagccttgttggtatgcagggaaggatctcttgccaaagagaagacacagaccctccacaagtttatccttctctttgctgtgttcgatgagggcaaaagttggcatagcgaaacgaagaattccctcatgcaggatcgcgacgcagccagcgccagagcttggcccaagatgcacactgtgaacggatatgtcaataggtcacttcctggcttgattgggtgtcatcggaaaagtgtctactggcacgtgatcggaatggggacaacaccagaggtccactccatatttctcgaaggccataccttccttgttcgaaaccacagacaggcatccttggagatctctcccattacctttctcactgcccaaacgctccttatggacttgggtcagttccttctcttctgccatatcagctcacaccagcatgatggtatggaagcttatgtgaaagtcgacagttgtcctgaggagccacagttgcgcatgaagaataatgaagaagccgaggattacgacgacgatctcaccgattctgagatggacgtggtgaggtttgatgacgacaactctccctccttcattcaaatccggagcgtggcgaagaaacaccccaagacttgggtccactatatagcggcggaagaggaggattgggattacgctcctcttgtattggcaccagatgaccgctcatacaaaagccagtacctcaacaacggaccgcagagaattggccggaagtataagaaagtgcgatttatggcctatacagacgaaacctttaagacaagggaggccatccagcatgagagtgggattttgggacctcttctttacggcgaagttggtgataccctcctcatcatcttcaagaatcaagcttctcgcccctataacatttacccacacgggatcactgacgttaggcctttgtatagcagaagacttcccaaaggcgtgaagcatctcaaagacttccccattttgccaggcgagatctttaagtacaaatggaccgtcacagtggaagatggaccgactaaatcagaccctcgatgccttacgcggtactattcctccttcgtgaatatggagagagatttggcaagcggactcataggaccactcctcatctgttacaaggaatctgtagaccagaggggtaaccagattatgagtgataaacgcaatgtgatcctttttagcgtcttcgacgagaaccggtcctggtacttgaccgagaatatacaaaggttccttcccaaccccgcaggcgttcagttggaagaccctgagtttcaggccagcaatattatgcactcaatcaacggctatgtgtttgatagtctccagctttctgtttgcctccatgaagtagcctattggtacatcttgtcaattggtgctcaaacagacttcctctccgtcttcttctccggctacacctttaagcacaagatggtgtatgaggacactctcacactctttccattttctggagaaaccgtgttcatgagcatggagaatccaggcctttggatcttgggttgccacaacagtgattttcgcaatcggggaatgactgctctcctcaaagtcagcagctgtgataagaacacaggcgactattacgaagattcttacgaggacataagtgcctacttgttgtccaagaataacgccattgagcccagatcattctcccagaatcctcccgtgcttaaaaggcatcagcgcgaaatcaccagaactactcttcagtctgatcaagaggagattgactatgacgacaccataagcgtggaaatgaagaaggaggatttcgatatctatgacgaagatgagaaccagtctccgcggagctttcagaagaagacgcgacactacttcattgcagcagtcgaaaggctttgggactacggtatgtcatcatcccctcatgtgttgcgcaatagagctcagagtggaagtgttccacagttcaagaaagtcgtctttcaagagtttacagatggcagcttcacacagcctctctatcggggcgagcttaacgaacatttgggactccttggtccctatatccgagccgaagtggaggacaacattatggttacctttaggaatcaagcctctcgcccctacagcttctactcctccctcatcagttatgaggaggatcagagacaaggcgctgaaccacggaagaactttgtgaaaccgaatgagacgaagacctacttctggaaagtacagcaccacatggcccccacaaaagacgaattcgattgcaaagcatgggcgtatttttcagacgttgacttggagaaagatgtacattcaggacttattggtcctttgttggtgtgtcacactaacactctcaatccagcccatggcaggcaggtgacagtccaggaattcgctcttttctttaccatctttgatgagaccaagtcctggtacttcacggaaaacatggagcgcaattgcagagccccctgtaacatacagatggaggaccctacctttaaggaaaattatcggttccacgcaatcaacggatacattatggatacactccctggccttgtgatggctcaggaccaacgaatcaggtggtacctcctcagcatgggttctaatgagaacatacactccattcacttttcaggacatgtgttcactgtccggaagaaagaagagtataagatggccctctacaatttgtatccaggcgtgtttgagaccgttgaaatgcttccctctaaagctggcatctggagagtagagtgcttgatcggagaacatcttcacgcaggtatgagcaccttgttcctcgtgtacagcaacaaatgtcagaccccacttggcatggccagtggacacattcgcgactttcagatcacagcatctggccagtatggacaatgggccccaaagttggctcgcctccattactccggtagcataaatgcgtggtccactaaagaacctttcagctggattaaggtcgatcttcttgcccccatgatcatccacggcattaagacacagggagcgaggcagaaattctcctccctctacatctcacagttcattattatgtatagtttggacggcaagaagtggcaaacttatagaggtaacagtactggaacactcatggtgttcttcggcaacgttgatagctctggcatcaaacacaacatctttaatcctcccataatagctcggtacatcagattgcatccgacccactacagcattaggagtacactccgaatggagcttatgggttgcgacttgaattcctgttcaatgccactcggaatggagtctaaagccatctctgatgcacagataaccgccagtagctactttacgaacatgtttgctacgtggtcaccctctaaggcaaggcttcatttgcaaggccggtctaatgcctggagacctcaggtgaacaacccgaaagaatggctccaggtggactttcagaagaccatgaaagtaacaggtgtcactactcagggagttaagtccttgctcaccagcatgtatgtgaaggagttccttatttcctcatcacaagatggccaccagtggaccctcttctttcagaatggtaaggtcaaagtgtttcagggcaatcaagacagcttcacacccgtggtgaacagtcttgatcctccactcttgacacgataccttcgaatccatccacagtcttgggttcaccagattgcattgcgcatggaagtacttggatgcgaggctcaggacctctac

SEQ ID NO: 174 - protein, 1457 aa, synthetic construct
  REGION 1..1457: note = Variant of human B-domain deleted Factor VIII
MQIELSTCFFLCLLRFCFSATRRYYLGAVELSWDYMQSDLGELPVDARFPPRVPKSFPFNTSVVYKKTLFVEFTDHLFNIAKPRPPWMGLLGPTIIAEVYDTVVITLKNMASHPVSLHAVGVSYWKASEGAEYDDQTSQREKEDDKVFPGGSHTYVWQVLKENGPMASDPLCLTYSYLSHVDLVKDLNSGLIGALLVCREGSLAKEKTQTLHKFILLFAVFDEGKSWHSETKNSLMQDRDAASARAWPKMHTVNGYVNRSLPGLIGCHRKSVYWHVIGMGTTPEVHSIFLEGHTFLVRNHRQASLEISPITFLTAQTLLMDLGQFLLFCHISSHQHDGMEAYVKVDSCPEEPQLRMKNNEEAEDYDDDLTDSEMDVVRFDDDNSPSFIQIRSVAKKHPKTWVHYIAAEEEDWDYAPLVLAPDDRSYKSQYLNNGPQRIGRKYKKVRFMAYTDETFKTREAIQHESGILGPLLYGEVGDTLLIIFKNQASRPYNIYPHGITDVRPLYSRRLPKGVKHLKDFPILPGEIFKYKWTVTVEDGPTKSDPRCLTRYYSSFVNMERDLASGLIGPLLICYKESVDQRGNQIMSDKRNVILFSVFDENRSWYLTENIQRFLPNPAGVQLEDPEFQASNIMHSINGYVFDSLQLSVCLHEVAYWYILSIGAQTDFLSVFFSGYTFKHKMVYEDTLTLFPFSGETVFMSMENPGLWILGCHNSDFRNRGMTALLKVSSCDKNTGDYYEDSYEDISAYLLSKNNAIEPRSFSQNPPVLKRHQREITRTTLQSDQEEIDYDDTISVEMKKEDFDIYDEDENQSPRSFQKKTRHYFIAAVERLWDYGMSSSPHVLRNRAQSGSVPQFKKVVFQEFTDGSFTQPLYRGELNEHLGLLGPYIRAEVEDNIMVTFRNQASRPYSFYSSLISYEEDQRQGAEPRKNFVKPNETKTYFWKVQHHMAPTKDEFDCKAWAYFSDVDLEKDVHSGLIGPLLVCHTNTLNPAHGRQVTVQEFALFFTIFDETKSWYFTENMERNCRAPCNIQMEDPTFKENYRFHAINGYIMDTLPGLVMAQDQRIRWYLLSMGSNENIHSIHFSGHVFTVRKKEEYKMALYNLYPGVFETVEMLPSKAGIWRVECLIGEHLHAGMSTLFLVYSNKCQTPLGMASGHIRDFQITASGQYGQWAPKLARLHYSGSINAWSTKEPFSWIKVDLLAPMIIHGIKTQGARQKFSSLYISQFIIMYSLDGKKWQTYRGNSTGTLMVFFGNVDSSGIKHNIFNPPIIARYIRLHPTHYSIRSTLRMELMGCDLNSCSMPLGMESKAISDAQITASSYFTNMFATWSPSKARLHLQGRSNAWRPQVNNPKEWLQVDFQKTMKVTGVTTQGVKSLLTSMYVKEFLISSSQDGHQWTLFFQNGKVKVFQGNQDSFTPVVNSLDPPLLTRYLRIHPQSWVHQIALRMEVLGCEAQDLY

SEQ ID NO: 175 - DNA, 4371 bp, synthetic construct
  misc_feature 1..4371: note = Variant of human B-domain deleted Factor VIII
  source 1..4371: mol_type = other DNA
atgcagattgaactgtctacctgcttcttcctctgtttgctgaggttctgctttagcgccactagacggtactaccttggcgctgtggagctgtcctgggactatatgcagagtgatttgggagagcttcccgtcgacgcacgatttcctcctcgcgttccaaagccttttcccttcaacacaagcgtggtgtacaagaagacgctcttcgtcgaattcaccgatcacctgttcaatatcgccaaacccagaccaccatggatgggtcttttggggcctaccatacaagcggaggtgtatgacacagttgttatcactctcaagaacatggcttctcatccggtaagtcttcacgcagtgggcgtgtcctactggaaagcttcagaaggagccgagtatgatgatcagacatcccagagggagaaagaagacgacaaggtatttccaggtgggtctcatacctatgtgtggcaagtgctcaaagagaatggccctatggcaagcgatccgctctgtttgacttacagctacctttcacacgttgacctcgtcaaggacctcaactccgggttgattggagccttgttggtatgcagggaaggatctcttgccaaagagaagacacagaccctccacaagtttatccttctctttgctgtgttcgatgagggcaaaagttggcatagcgaaacgaagaattccctcatgcaggatcgcgacgcagccagcgccagagcttggcccaagatgcacactgtgaacggatatgtcaataggtcacttcctggcttgattgggtgtcatcggaaaagtgtctactggcacgtgatcggaatggggacaacaccagaggtccactccatatttctcgaaggccataccttccttgttcgaaaccacagacaggcatccttggagatctctcccattacctttctcactgcccaaacgctccttatggacttgggtcagttccttctcttctgccatatcagctcacaccagcatgatggtatggaagcttatgtgaaagtcgacagttgtcctgaggagccacagttgcgcatgaagaataatgaagaagccgaggattacgacgacgatctcaccgattctgagatggacgtggtgaggtttgatgacgacaactctccctccttcattcaaatccggagcgtggcgaagaaacaccccaagacttgggtccactatatagcggcggaagaggaggattgggattacgctcctcttgtattggcaccagatgaccgctcatacaaaagccagtacctcaacaacggaccgcagagaattggccggaagtataagaaagtgcgatttatggcctatacagacgaaacctttaagacaagggaggccatccagcatgagagtgggattttgggacctcttctttacggcgaagttggtgataccctcctcatcatcttcaagaatcaagcttctcgcccctataacatttacccacacgggatcactgacgttaggcctttgtatagcagaagacttcccaaaggcgtgaagcatctcaaagacttccccattttgccaggcgagatctttaagtacaaatggaccgtcacagtggaagatggaccgactaaatcagaccctcgatgccttacgcggtactattcctccttcgtgaatatggagagagatttggcaagcggactcataggaccactcctcatctgttacaaggaatctgtagaccagaggggtaaccagattatgagtgataaacgcaatgtgatcctttttagcgtcttcgacgagaaccggtcctggtacttgaccgagaatatacaaaggttccttcccaaccccgcaggcgttcagttggaagaccctgagtttcaggccagcaatattatgcactcaatcaacggctatgtgtttgatagtctccagctttctgtttgcctccatgaagtagcctattggtacatcttgtcaattggtgctcaaacagacttcctctccgtcttcttctccggctacacctttaagcacaagatggtgtatgaggacactctcacactctttccattttctggagaaaccgtgttcatgagcatggagaatccaggcctttggatcttgggttgccacaacagtgattttcgcaatcggggaatgactgctctcctcaaagtcagcagctgtgataagaacacaggcgactattacgaagattcttacgaggacataagtgcctacttgttgtccaagaataacgccattgagcccagatcattctcccagaatcctcccgtgcttaaaaggcatcagcgcgaaatcaccagaactactcttcagtctgatcaagaggagattgactatgacgacaccataagcgtggaaatgaagaaggaggatttcgatatctatgacgaagatgagaaccagtctccgcggagctttcagaagaagacgcgacactacttcattgcagcagtcgaaaggctttgggactacggtatgtcatcatcccctcatgtgttgcgcaatagagctcagagtggaagtgttccacagttcaagaaagtcgtctttcaagagtttacagatggcagcttcacacagcctctctatcggggcgagcttaacgaacatttgggactccttggtccctatatccgagccgaagtggaggacaacattatggttacctttaggaatcaagcctctcgcccctacagcttctactcctccctcatcagttatgaggaggatcagagacaaggcgctgaaccacggaagaactttgtgaaaccgaatgagacgaagacctacttctggaaagtacagcaccacatggcccccacaaaagacgaattcgattgcaaagcatgggcgtatttttcagacgttgacttggagaaagatgtacattcaggacttattggtcctttgttggtgtgtcacactaacactctcaatccagcccatggcaggcaggtgacagtccaggaattcgctcttttctttaccatctttgatgagaccaagtcctggtacttcacggaaaacatggagcgcaattgcagagccccctgtaacatacagatggaggaccctacctttaaggaaaattatcggttccacgcaatcaacggatacattatggatacactccctggccttgtgatggctcaggaccaacgaatcaggtggtacctcctcagcatgggttctaatgagaacatacactccattcacttttcaggacatgtgttcactgtccggaagaaagaagagtataagatggccctctacaatttgtatccaggcgtgtttgagaccgttgaaatgcttccctctaaagctggcatctggagagtagagtgcttgatcggagaacatcttcacgcaggtatgagcaccttgttcctcgtgtacagcaacaaatgtcagaccccacttggcatggccagtggacacattcgcgactttcagatcacagcatctggccagtatggacaatgggccccaaagttggctcgcctccattactccggtagcataaatgcgtggtccactaaagaacctttcagctggattaaggtcgatcttcttgcccccatgatcatccacggcattaagacacagggagcgaggcagaaattctcctccctctacatctcacagttcattattatgtatagtttggacggcaagaagtggcaaacttatagaggtaacagtactggaacactcatggtgttcttcggcaacgttgatagctctggcatcaaacacaacatctttaatcctcccataatagctcggtacatcagattgcatccgacccactacagcattaggagtacactccgaatggagcttatgggttgcgacttgaattcctgttcaatgccactcggaatggagtctaaagccatctctgatgcacagataaccgccagtagctactttacgaacatgtttgctacgtggtcaccctctaaggcaaggcttcatttgcaaggccggtctaatgcctggagacctcaggtgaacaacccgaaagaatggctccaggtggactttcagaagaccatgaaagtaacaggtgtcactactcagggagttaagtccttgctcaccagcatgtatgtgaaggagttccttatttcctcatcacaagatggccaccagtggaccctcttctttcagaatggtaaggtcaaagtgtttcagggcaatcaagacagcttcacacccgtggtgaacagtcttgatcctccactcttgacacgataccttcgaatccatccacagtcttgggttcaccagattgcattgcgcatggaagtacttggatgcgaggctcaggacctctac

SEQ ID NO: 176 - protein, 1457 aa, synthetic construct
  REGION 1..1457: note = Variant of human B-domain deleted Factor VIII
MQIELSTCFFLCLLRFCFSATRRYYLGAVELSWDYMQSDLGELPVDARFPPRVPKPFPFNTSVVYKKTLFVEFTDHLFNIAKPRPPWMGLLGPTIQAEVYDTVVITLKNMASHPVSLHAVGVSYWKASEGAEYDDQTSQREKEDDKVFPGGSHTYVWQVLKENGPMASDPLCLTYSYLSHVDLVKDLNSGLIGALLVCREGSLAKEKTQTLHKFILLFAVFDEGKSWHSETKNSLMQDRDAASARAWPKMHTVNGYVNRSLPGLIGCHRKSVYWHVIGMGTTPEVHSIFLEGHTFLVRNHRQASLEISPITFLTAQTLLMDLGQFLLFCHISSHQHDGMEAYVKVDSCPEEPQLRMKNNEEAEDYDDDLTDSEMDVVRFDDDNSPSFIQIRSVAKKHPKTWVHYIAAEEEDWDYAPLVLAPDDRSYKSQYLNNGPQRIGRKYKKVRFMAYTDETFKTREAIQHESGILGPLLYGEVGDTLLIIFKNQASRPYNIYPHGITDVRPLYSRRLPKGVKHLKDFPILPGEIFKYKWTVTVEDGPTKSDPRCLTRYYSSFVNMERDLASGLIGPLLICYKESVDQRGNQIMSDKRNVILFSVFDENRSWYLTENIQRFLPNPAGVQLEDPEFQASNIMHSINGYVFDSLQLSVCLHEVAYWYILSIGAQTDFLSVFFSGYTFKHKMVYEDTLTLFPFSGETVFMSMENPGLWILGCHNSDFRNRGMTALLKVSSCDKNTGDYYEDSYEDISAYLLSKNNAIEPRSFSQNPPVLKRHQREITRTTLQSDQEEIDYDDTISVEMKKEDFDIYDEDENQSPRSFQKKTRHYFIAAVERLWDYGMSSSPHVLRNRAQSGSVPQFKKVVFQEFTDGSFTQPLYRGELNEHLGLLGPYIRAEVEDNIMVTFRNQASRPYSFYSSLISYEEDQRQGAEPRKNFVKPNETKTYFWKVQHHMAPTKDEFDCKAWAYFSDVDLEKDVHSGLIGPLLVCHTNTLNPAHGRQVTVQEFALFFTIFDETKSWYFTENMERNCRAPCNIQMEDPTFKENYRFHAINGYIMDTLPGLVMAQDQRIRWYLLSMGSNENIHSIHFSGHVFTVRKKEEYKMALYNLYPGVFETVEMLPSKAGIWRVECLIGEHLHAGMSTLFLVYSNKCQTPLGMASGHIRDFQITASGQYGQWAPKLARLHYSGSINAWSTKEPFSWIKVDLLAPMIIHGIKTQGARQKFSSLYISQFIIMYSLDGKKWQTYRGNSTGTLMVFFGNVDSSGIKHNIFNPPIIARYIRLHPTHYSIRSTLRMELMGCDLNSCSMPLGMESKAISDAQITASSYFTNMFATWSPSKARLHLQGRSNAWRPQVNNPKEWLQVDFQKTMKVTGVTTQGVKSLLTSMYVKEFLISSSQDGHQWTLFFQNGKVKVFQGNQDSFTPVVNSLDPPLLTRYLRIHPQSWVHQIALRMEVLGCEAQDLY

SEQ ID NO: 177 - DNA, 4371 bp, synthetic construct
  misc_feature 1..4371: note = Variant of human B-domain deleted Factor VIII
  source 1..4371: mol_type = other DNA
atgcagattgaactgtctacctgcttcttcctctgtttgctgaggttctgctttagcgccactagacggtactaccttggcgctgtggagctgtcctgggactatatgcagagtgatttgggagagcttcccgtcgacgcacgatttcctcctcgcgttccaaagtcatttcccttcaacacaagcaatgtgtacaagaagacgctcttcgtcgaattcaccgatcacctgttcaatatcgccaaacccagaccaccatggatgggtcttttggggcctaccatacaagcggaggtgtatgacacagttgttatcactctcaagaacatggcttctcatccggtaagtcttcacgcagtgggcgtgtcctactggaaagcttcagaaggagccgagtatgatgatcagacatcccagagggagaaagaagacgacaaggtatttccaggtgggtctcatacctatgtgtggcaagtgctcaaagagaatggccctatggcaagcgatccgctctgtttgacttacagctacctttcacacgttgacctcgtcaaggacctcaactccgggttgattggagccttgttggtatgcagggaaggatctcttgccaaagagaagacacagaccctccacaagtttatccttctctttgctgtgttcgatgagggcaaaagttggcatagcgaaacgaagaattccctcatgcaggatcgcgacgcagccagcgccagagcttggcccaagatgcacactgtgaacggatatgtcaataggtcacttcctggcttgattgggtgtcatcggaaaagtgtctactggcacgtgatcggaatggggacaacaccagaggtccactccatatttctcgaaggccataccttccttgttcgaaaccacagacaggcatccttggagatctctcccattacctttctcactgcccaaacgctccttatggacttgggtcagttccttctcttctgccatatcagctcacaccagcatgatggtatggaagcttatgtgaaagtcgacagttgtcctgaggagccacagttgcgcatgaagaataatgaagaagccgaggattacgacgacgatctcaccgattctgagatggacgtggtgaggtttgatgacgacaactctccctccttcattcaaatccggagcgtggcgaagaaacaccccaagacttgggtccactatatagcggcggaagaggaggattgggattacgctcctcttgtattggcaccagatgaccgctcatacaaaagccagtacctcaacaacggaccgcagagaattggccggaagtataagaaagtgcgatttatggcctatacagacgaaacctttaagacaagggaggccatccagcatgagagtgggattttgggacctcttctttacggcgaagttggtgataccctcctcatcatcttcaagaatcaagcttctcgcccctataacatttacccacacgggatcactgacgttaggcctttgtatagcagaagacttcccaaaggcgtgaagcatctcaaagacttccccattttgccaggcgagatctttaagtacaaatggaccgtcacagtggaagatggaccgactaaatcagaccctcgatgccttacgcggtactattcctccttcgtgaatatggagagagatttggcaagcggactcataggaccactcctcatctgttacaaggaatctgtagaccagaggggtaaccagattatgagtgataaacgcaatgtgatcctttttagcgtcttcgacgagaaccggtcctggtacttgaccgagaatatacaaaggttccttcccaaccccgcaggcgttcagttggaagaccctgagtttcaggccagcaatattatgcactcaatcaacggctatgtgtttgatagtctccagctttctgtttgcctccatgaagtagcctattggtacatcttgtcaattggtgctcaaacagacttcctctccgtcttcttctccggctacacctttaagcacaagatggtgtatgaggacactctcacactctttccattttctggagaaaccgtgttcatgagcatggagaatccaggcctttggatcttgggttgccacaacagtgattttcgcaatcggggaatgactgctctcctcaaagtcagcagctgtgataagaacacaggcgactattacgaagattcttacgaggacataagtgcctacttgttgtccaagaataacgccattgagcccagatcattctcccagaatcctcccgtgcttaaaaggcatcagcgcgaaatcaccagaactactcttcagtctgatcaagaggagattgactatgacgacaccataagcgtggaaatgaagaaggaggatttcgatatctatgacgaagatgagaaccagtctccgcggagctttcagaagaagacgcgacactacttcattgcagcagtcgaaaggctttgggactacggtatgtcatcatcccctcatgtgttgcgcaatagagctcagagtggaagtgttccacagttcaagaaagtcgtctttcaagagtttacagatggcagcttcacacagcctctctatcggggcgagcttaacgaacatttgggactccttggtccctatatccgagccgaagtggaggacaacattatggttacctttaggaatcaagcctctcgcccctacagcttctactcctccctcatcagttatgaggaggatcagagacaaggcgctgaaccacggaagaactttgtgaaaccgaatgagacgaagacctacttctggaaagtacagcaccacatggcccccacaaaagacgaattcgattgcaaagcatgggcgtatttttcagacgttgacttggagaaagatgtacattcaggacttattggtcctttgttggtgtgtcacactaacactctcaatccagcccatggcaggcaggtgacagtccaggaattcgctcttttctttaccatctttgatgagaccaagtcctggtacttcacggaaaacatggagcgcaattgcagagccccctgtaacatacagatggaggaccctacctttaaggaaaattatcggttccacgcaatcaacggatacattatggatacactccctggccttgtgatggctcaggaccaacgaatcaggtggtacctcctcagcatgggttctaatgagaacatacactccattcacttttcaggacatgtgttcactgtccggaagaaagaagagtataagatggccctctacaatttgtatccaggcgtgtttgagaccgttgaaatgcttccctctaaagctggcatctggagagtagagtgcttgatcggagaacatcttcacgcaggtatgagcaccttgttcctcgtgtacagcaacaaatgtcagaccccacttggcatggccagtggacacattcgcgactttcagatcacagcatctggccagtatggacaatgggccccaaagttggctcgcctccattactccggtagcataaatgcgtggtccactaaagaacctttcagctggattaaggtcgatcttcttgcccccatgatcatccacggcattaagacacagggagcgaggcagaaattctcctccctctacatctcacagttcattattatgtatagtttggacggcaagaagtggcaaacttatagaggtaacagtactggaacactcatggtgttcttcggcaacgttgatagctctggcatcaaacacaacatctttaatcctcccataatagctcggtacatcagattgcatccgacccactacagcattaggagtacactccgaatggagcttatgggttgcgacttgaattcctgttcaatgccactcggaatggagtctaaagccatctctgatgcacagataaccgccagtagctactttacgaacatgtttgctacgtggtcaccctctaaggcaaggcttcatttgcaaggccggtctaatgcctggagacctcaggtgaacaacccgaaagaatggctccaggtggactttcagaagaccatgaaagtaacaggtgtcactactcagggagttaagtccttgctcaccagcatgtatgtgaaggagttccttatttcctcatcacaagatggccaccagtggaccctcttctttcagaatggtaaggtcaaagtgtttcagggcaatcaagacagcttcacacccgtggtgaacagtcttgatcctccactcttgacacgataccttcgaatccatccacagtcttgggttcaccagattgcattgcgcatggaagtacttggatgcgaggctcaggacctctac

SEQ ID NO: 178 - protein, 1457 aa, synthetic construct
  REGION 1..1457: note = Variant of human B-domain deleted Factor VIII
MQIELSTCFFLCLLRFCFSATRRYYLGAVELSWDYMQSDLGELPVDARFPPRVPKSFPFNTSNVYKKTLFVEFTDHLFNIAKPRPPWMGLLGPTIQAEVYDTVVITLKNMASHPVSLHAVGVSYWKASEGAEYDDQTSQREKEDDKVFPGGSHTYVWQVLKENGPMASDPLCLTYSYLSHVDLVKDLNSGLIGALLVCREGSLAKEKTQTLHKFILLFAVFDEGKSWHSETKNSLMQDRDAASARAWPKMHTVNGYVNRSLPGLIGCHRKSVYWHVIGMGTTPEVHSIFLEGHTFLVRNHRQASLEISPITFLTAQTLLMDLGQFLLFCHISSHQHDGMEAYVKVDSCPEEPQLRMKNNEEAEDYDDDLTDSEMDVVRFDDDNSPSFIQIRSVAKKHPKTWVHYIAAEEEDWDYAPLVLAPDDRSYKSQYLNNGPQRIGRKYKKVRFMAYTDETFKTREAIQHESGILGPLLYGEVGDTLLIIFKNQASRPYNIYPHGITDVRPLYSRRLPKGVKHLKDFPILPGEIFKYKWTVTVEDGPTKSDPRCLTRYYSSFVNMERDLASGLIGPLLICYKESVDQRGNQIMSDKRNVILFSVFDENRSWYLTENIQRFLPNPAGVQLEDPEFQASNIMHSINGYVFDSLQLSVCLHEVAYWYILSIGAQTDFLSVFFSGYTFKHKMVYEDTLTLFPFSGETVFMSMENPGLWILGCHNSDFRNRGMTALLKVSSCDKNTGDYYEDSYEDISAYLLSKNNAIEPRSFSQNPPVLKRHQREITRTTLQSDQEEIDYDDTISVEMKKEDFDIYDEDENQSPRSFQKKTRHYFIAAVERLWDYGMSSSPHVLRNRAQSGSVPQFKKVVFQEFTDGSFTQPLYRGELNEHLGLLGPYIRAEVEDNIMVTFRNQASRPYSFYSSLISYEEDQRQGAEPRKNFVKPNETKTYFWKVQHHMAPTKDEFDCKAWAYFSDVDLEKDVHSGLIGPLLVCHTNTLNPAHGRQVTVQEFALFFTIFDETKSWYFTENMERNCRAPCNIQMEDPTFKENYRFHAINGYIMDTLPGLVMAQDQRIRWYLLSMGSNENIHSIHFSGHVFTVRKKEEYKMALYNLYPGVFETVEMLPSKAGIWRVECLIGEHLHAGMSTLFLVYSNKCQTPLGMASGHIRDFQITASGQYGQWAPKLARLHYSGSINAWSTKEPFSWIKVDLLAPMIIHGIKTQGARQKFSSLYISQFIIMYSLDGKKWQTYRGNSTGTLMVFFGNVDSSGIKHNIFNPPIIARYIRLHPTHYSIRSTLRMELMGCDLNSCSMPLGMESKAISDAQITASSYFTNMFATWSPSKARLHLQGRSNAWRPQVNNPKEWLQVDFQKTMKVTGVTTQGVKSLLTSMYVKEFLISSSQDGHQWTLFFQNGKVKVFQGNQDSFTPVVNSLDPPLLTRYLRIHPQSWVHQIALRMEVLGCEAQDLY

SEQ ID NO: 179 - DNA, 4371 bp, synthetic construct
  misc_feature 1..4371: note = Variant of human B-domain deleted Factor VIII
  source 1..4371: mol_type = other DNA
atgcagattgaactgtctacctgcttcttcctctgtttgctgaggttctgctttagcgccactagacggtactaccttggcgctgtggagctgtcctgggactatatgcagagtgatttgggagagcttcccgtcgacgcacgatttcctcctcgcgttccaaagtcatttcccttcaacacaagcgtggtgtacaagaagacgctcttcgtcgaattcaccgatcacctgttcaatatcgccaaacccagaccaccatggatgggtcttttggggcctaccatacaagcggaggtgtatgacacagttgttatcactctcaagaacatggcttctcatccggtaagtcttcacgcagtgggcgtgtcctactggaaagcttcagaaggagccgagtatgatgatcagacatcccagagggagaaagaagacgacaaggtatttccaggtgggtctcatacctatgtgtggcaagtgctcaaagagaatggccctatggcaagcgatccgctctgtttgacttacagctacctttcacacgttgacctcgtcaaggacctcaactccgggttgattggagccttgttggtatgcagggaaggatctcttgccaaagagaagacacagaccctccacaagtttatccttctctttgctgtgttcgatgagggcaaaagttggcatagcgaaacgaagaattccctcatgcaggatcgcgacgcagccagcgccagagcttggcccaagatgcacactgtgaacggatatgtcaataggtcacttcctggcttgattgggtgtcatcggaaaagtgtctactggcacgtgatcggaatggggacaacaccagaggtccactccatatttctcgaaggccataccttccttgttcgaaaccacagacaggcatccttggagatctctcccattacctttctcactgcccaaacgctccttatggacttgggtcagttccttctcttctgccatatcagctcacaccagcatgatggtatggaagcttatgtgaaagtcgacagttgtcctgaggagccacagttgcgcatgaagaataatgaagaagccgaggattacgacgacgatctcaccgattctgagatggacgtggtgaggtttgatgacgacaactctccctccttcattcaaatccggagcgtggcgaagaaacaccccaagacttgggtccactatatagcggcggaagaggaggattgggattacgctcctcttgtattggcaccagatgaccgctcatacaaaagccagtacctcaacaacggaccgcagagaattggccggaagtataagaaagtgcgatttatggcctatacagacgaaacctttaagacaagggaggccatccagcatgagagtgggattttgggacctcttctttacggcgaagttggtgataccctcctcatcatcttcaagaatcaagcttctcgcccctataacatttacccacacgggatcactgacgttaggcctttgtatagcagaagacttcccaaaggcgtgaagcatctcaaagacttccccattttgccaggcgagatctttaagtacaaatggaccgtcacagtggaagatggaccgactaaatcagaccctcgatgccttacgcggtactattcctccttcgtgaatatggagagagatttggcaagcggactcataggaccactcctcatctgttacaaggaatctgtagaccagaggggtaaccagattatgagtgataaacgcaatgtgatcctttttagcgtcttcgacgagaaccggtcctggtacttgaccgagaatatacaaaggttccttcccaaccccgcaggcgttcagttggaagaccctgagtttcaggccagcaatattatgcactcaatcaacggctatgtgtttgatagtctccagctttctgtttgcctccatgaagtagcctattggtacatcttgtcaattggtgctcaaacagacttcctctccgtcttcttctccggctacacctttaagcacaagatggtgtatgaggacactctcacactctttccattttctggagaaaccgtgttcatgagcatggagaatccaggcctttggatcttgggttgccacaacagtgattttcgcaatcggggaatgactgctctcctcaaagtcagcagctgtgataagaacacaggcgactattacgaagattcttacgaggacataagtgcctacttgttgtccaagaataacgccattgagcccagatcattctcccagaatcctcccgtgcttaaaaggcatcagcgcgaaatcaccagaactactcttcagtctgatcaagaggagattgactatgacgactggataagcgtggaaatgaagaaggaggatttcgatatctatgacgaagatgagaaccagtctccgcggagctttcagaagaagacgcgacactacttcattgcagcagtcgaaaggctttgggactacggtatgtcatcatcccctcatgtgttgcgcaatagagctcagagtggaagtgttccacagttcaagaaagtcgtctttcaagagtttacagatggcagcttcacacagcctctctatcggggcgagcttaacgaacatttgggactccttggtccctatatccgagccgaagtggaggacaacattatggttacctttaggaatcaagcctctcgcccctacagcttctactcctccctcatcagttatgaggaggatcagagacaaggcgctgaaccacggaagaactttgtgaaaccgaatgagacgaagacctacttctggaaagtacagcaccacatggcccccacaaaagacgaattcgattgcaaagcatgggcgtatttttcagacgttgacttggagaaagatgtacattcaggacttattggtcctttgttggtgtgtcacactaacactctcaatccagcccatggcaggcaggtgacagtccaggaattcgctcttttctttaccatctttgatgagaccaagtcctggtacttcacggaaaacatggagcgcaattgcagagccccctgtaacatacagatggaggaccctacctttaaggaaaattatcggttccacgcaatcaacggatacattatggatacactccctggccttgtgatggctcaggaccaacgaatcaggtggtacctcctcagcatgggttctaatgagaacatacactccattcacttttcaggacatgtgttcactgtccggaagaaagaagagtataagatggccctctacaatttgtatccaggcgtgtttgagaccgttgaaatgcttccctctaaagctggcatctggagagtagagtgcttgatcggagaacatcttcacgcaggtatgagcaccttgttcctcgtgtacagcaacaaatgtcagaccccacttggcatggccagtggacacattcgcgactttcagatcacagcatctggccagtatggacaatgggccccaaagttggctcgcctccattactccggtagcataaatgcgtggtccactaaagaacctttcagctggattaaggtcgatcttcttgcccccatgatcatccacggcattaagacacagggagcgaggcagaaattctcctccctctacatctcacagttcattattatgtatagtttggacggcaagaagtggcaaacttatagaggtaacagtactggaacactcatggtgttcttcggcaacgttgatagctctggcatcaaacacaacatctttaatcctcccataatagctcggtacatcagattgcatccgacccactacagcattaggagtacactccgaatggagcttatgggttgcgacttgaattcctgttcaatgccactcggaatggagtctaaagccatctctgatgcacagataaccgccagtagctactttacgaacatgtttgctacgtggtcaccctctaaggcaaggcttcatttgcaaggccggtctaatgcctggagacctcaggtgaacaacccgaaagaatggctccaggtggactttcagaagaccatgaaagtaacaggtgtcactactcagggagttaagtccttgctcaccagcatgtatgtgaaggagttccttatttcctcatcacaagatggccaccagtggaccctcttctttcagaatggtaaggtcaaagtgtttcagggcaatcaagacagcttcacacccgtggtgaacagtcttgatcctccactcttgacacgataccttcgaatccatccacagtcttgggttcaccagattgcattgcgcatggaagtacttggatgcgaggctcaggacctctac

SEQ ID NO: 180 - protein, 1457 aa, synthetic construct
  REGION 1..1457: note = Variant of human B-domain deleted Factor VIII
MQIELSTCFFLCLLRFCFSATRRYYLGAVELSWDYMQSDLGELPVDARFPPRVPKSFPFNTSVVYKKTLFVEFTDHLFNIAKPRPPWMGLLGPTIQAEVYDTVVITLKNMASHPVSLHAVGVSYWKASEGAEYDDQTSQREKEDDKVFPGGSHTYVWQVLKENGPMASDPLCLTYSYLSHVDLVKDLNSGLIGALLVCREGSLAKEKTQTLHKFILLFAVFDEGKSWHSETKNSLMQDRDAASARAWPKMHTVNGYVNRSLPGLIGCHRKSVYWHVIGMGTTPEVHSIFLEGHTFLVRNHRQASLEISPITFLTAQTLLMDLGQFLLFCHISSHQHDGMEAYVKVDSCPEEPQLRMKNNEEAEDYDDDLTDSEMDVVRFDDDNSPSFIQIRSVAKKHPKTWVHYIAAEEEDWDYAPLVLAPDDRSYKSQYLNNGPQRIGRKYKKVRFMAYTDETFKTREAIQHESGILGPLLYGEVGDTLLIIFKNQASRPYNIYPHGITDVRPLYSRRLPKGVKHLKDFPILPGEIFKYKWTVTVEDGPTKSDPRCLTRYYSSFVNMERDLASGLIGPLLICYKESVDQRGNQIMSDKRNVILFSVFDENRSWYLTENIQRFLPNPAGVQLEDPEFQASNIMHSINGYVFDSLQLSVCLHEVAYWYILSIGAQTDFLSVFFSGYTFKHKMVYEDTLTLFPFSGETVFMSMENPGLWILGCHNSDFRNRGMTALLKVSSCDKNTGDYYEDSYEDISAYLLSKNNAIEPRSFSQNPPVLKRHQREITRTTLQSDQEEIDYDDWISVEMKKEDFDIYDEDENQSPRSFQKKTRHYFIAAVERLWDYGMSSSPHVLRNRAQSGSVPQFKKVVFQEFTDGSFTQPLYRGELNEHLGLLGPYIRAEVEDNIMVTFRNQASRPYSFYSSLISYEEDQRQGAEPRKNFVKPNETKTYFWKVQHHMAPTKDEFDCKAWAYFSDVDLEKDVHSGLIGPLLVCHTNTLNPAHGRQVTVQEFALFFTIFDETKSWYFTENMERNCRAPCNIQMEDPTFKENYRFHAINGYIMDTLPGLVMAQDQRIRWYLLSMGSNENIHSIHFSGHVFTVRKKEEYKMALYNLYPGVFETVEMLPSKAGIWRVECLIGEHLHAGMSTLFLVYSNKCQTPLGMASGHIRDFQITASGQYGQWAPKLARLHYSGSINAWSTKEPFSWIKVDLLAPMIIHGIKTQGARQKFSSLYISQFIIMYSLDGKKWQTYRGNSTGTLMVFFGNVDSSGIKHNIFNPPIIARYIRLHPTHYSIRSTLRMELMGCDLNSCSMPLGMESKAISDAQITASSYFTNMFATWSPSKARLHLQGRSNAWRPQVNNPKEWLQVDFQKTMKVTGVTTQGVKSLLTSMYVKEFLISSSQDGHQWTLFFQNGKVKVFQGNQDSFTPVVNSLDPPLLTRYLRIHPQSWVHQIALRMEVLGCEAQDLY

SEQ ID NO: 181 - DNA, 4371 bp, synthetic construct
  misc_feature 1..4371: note = Variant of human B-domain deleted Factor VIII
  source 1..4371: mol_type = other DNA
atgcagattgaactgtctacctgcttcttcctctgtttgctgaggttctgctttagcgccactagacggtactaccttggcgctgtggagctgtcctgggactatatgcagagtgatttgggagagcttcccgtcgacgcacgatttcctcctcgcgttccaaagtcatttcccttcaacacaagcgtggtgtacaagaagacgctcttcgtcgaattcaccgatcacctgttcaatatcgccaaacccagaccaccatggatgggtcttttggggcctaccatacaagcggaggtgtatgacacagttgttatcactctcaagaacatggcttctcatccggtaagtcttcacgcagtgggcgtgtcctactggaaagcttcagaaggagccgagtatgatgatcagacatcccagagggagaaagaagacgacaaggtatttccaggtgggtctcatacctatgtgtggcaagtgctcaaagagaatggccctatggcaagcgatccgctctgtttgacttacagctacctttcacacgttgacctcgtcaaggacctcaactccgggttgattggagccttgttggtatgcagggaaggatctcttgccaaagagaagacacagaccctccacaagtttatccttctctttgctgtgttcgatgagggcaaaagttggcatagcgaaacgaagaattccctcatgcaggatcgcgacgcagccagcgccagagcttggcccaagatgcacactgtgaacggatatgtcaataggtcacttcctggcttgattgggtgtcatcggaaaagtgtctactggcacgtgatcggaatggggacaacaccagaggtccactccatatttctcgaaggccataccttccttgttcgaaaccacagacaggcatccttggagatctctcccattacctttctcactgcccaaacgctccttatggacttgggtcagttccttctcttctgccatatcagctcacaccagcatgatggtatggaagcttatgtgaaagtcgacagttgtcctgaggagccacagttgcgcatgaagaataatgaagaagccgaggattacgacgacgatctcaccgattctgagatggacgtggtgaggtttgatgacgacaactctccctccttcattcaaatccggagcgtggcgaagaaacaccccaagacttgggtccactatatagcggcggaagaggaggattgggattacgctcctcttgtattggcaccagatgaccgctcatacaaaagccagtacctcaacaacggaccgcagagaattggccggaagtataagaaagtgcgatttatggcctatacagacgaaacctttaagacaagggaggccatccagcatgagagtgggattttgggacctcttctttacggcgaagttggtgataccctcctcatcatcttcaagaatcaagcttctcgcccctataacatttacccacacgggatcactgacgttaggcctttgtatagcagaagacttcccaaaggcgtgaagcatctcaaagacttccccattttgccaggcgagatctttaagtacaaatggaccgtcacagtggaagatggaccgactaaatcagaccctcgatgccttacgcggtactattcctccttcgtgaatatggagagagatttggcaagcggactcataggaccactcctcatctgttacaaggaatctgtagaccagaggggtaaccagattatgagtgataaacgcaatgtgatcctttttagcgtcttcgacgagaaccggtcctggtacttgaccgagaatatacaaaggttccttcccaaccccgcaggcgttcagttggaagaccctgagtttcaggccagcaatattatgcactcaatcaacggctatgtgtttgatagtctccagctttctgtttgcctccatgaagtagcctattggtacatcttgtcaattggtgctcaaacagacttcctctccgtcttcttctccggctacacctttaagcacaagatggtgtatgaggacactctcacactctttccattttctggagaaaccgtgttcatgagcatggagaatccaggcctttggatcttgggttgccacaacagtgattttcgcaatcggggaatgactgctctcctcaaagtcagcagctgtgataagaacacaggcgactattacgaagattcttacgaggacataagtgcctacttgttgtccaagaataacgccattgagcccagatcattctcccagaatcctcccgtgcttaaaaggcatcagcgcgaaatcaccagaactactcttcagtctgatcaagaggagattgactatgacgacaccataagcgtggaaatgaagaaggaggatttcgatatctatgacgaagatgagaaccagtctccgcggagctttcagaagaagacgcgacactacttcattgcagcagtcgaaaggctttgggactacggtatgtcatcatcccctcatgtgttgcgcaatagagctcagagtggaagtgttccacagttcaagaaagtcgtctttcaagagtttacagatggcagcttcacacagcctctctatcggggcgagcttaacgaacatttgggactccttggtccctatatccgagccgaagtggaggacaacattatggttacctttaggaatcaagcctctcgcccctacagcttctactcctccctcatcagttatgaggaggatcagagacaaggcgctgaaccacggaagaactttgtgaaaccgaatgagacgaagacctacttctggaaagtacagcaccacatggcccccacaaaagacgaattcgattgcaaagcatgggcgtatttttcagacgttgacttggagaaagatgtacattcaggacttattggtcctttgttggtgtgtcacactaacactctcaatccagcccatggcaggcaggtgacagtccaggaattcgctcttttctttaccatctttgatgagaccaagtcctggtacttcacggaaaacatggagcgcaattgcagagccccctgtaacatacagatggaggaccctacctttaaggaaaattatcggttccacgcaatcaacggatacattatggatacactccctggccttgtgatggctcaggaccaacgaatcaggtggtacctcctcagcatgggttctaatgagaacatacactccattcacttttcaggacatgtgttcactgtccggaagaaagaagagtataagatggccctctacaatttgtatccaggcgtgtttgagaccgttgaaatgcttccctctaaagctggcatctggagagtagagtgcttgatcggagaacatcttcacgcaggtatgagcaccttgttcctcgtgtacagcaacaaatgtcagaccccacttggcatggccagtggacacattcgcgactttcagatcacagcatctggccagtatggacaatgggccccaaagttggctcgcctccattactccggtagcataaatgcgtggtccactaaagaacctttcagctggattaaggtcgatcttcttgcccccatgatcatccacggcattaagacacagggagcgaggcagaaattctcctccctctacatctcacagttcattattatgtatagtttggacggcaagaagtggcaaacttatagaggtaacagtactggaacactcatggtgttcttcggcaacgttgatagctctggcatcaaacacaacttgtttaatcctcccataatagctcggtacatcagattgcatccgacccactacagcattaggagtacactccgaatggagcttatgggttgcgacttgaattcctgttcaatgccactcggaatggagtctaaagccatctctgatgcacagataaccgccagtagctactttacgaacatgtttgctacgtggtcaccctctaaggcaaggcttcatttgcaaggccggtctaatgcctggagacctcaggtgaacaacccgaaagaatggctccaggtggactttcagaagaccatgaaagtaacaggtgtcactactcagggagttaagtccttgctcaccagcatgtatgtgaaggagttccttatttcctcatcacaagatggccaccagtggaccctcttctttcagaatggtaaggtcaaagtgtttcagggcaatcaagacagcttcacacccgtggtgaacagtcttgatcctccactcttgacacgataccttcgaatccatccacagtcttgggttcaccagattgcattgcgcatggaagtacttggatgcgaggctcaggacctctac

SEQ ID NO: 182 - protein, 1457 aa, synthetic construct
  REGION 1..1457: note = Variant of human B-domain deleted Factor VIII
MQIELSTCFFLCLLRFCFSATRRYYLGAVELSWDYMQSDLGELPVDARFPPRVPKSFPFNTSVVYKKTLFVEFTDHLFNIAKPRPPWMGLLGPTIQAEVYDTVVITLKNMASHPVSLHAVGVSYWKASEGAEYDDQTSQREKEDDKVFPGGSHTYVWQVLKENGPMASDPLCLTYSYLSHVDLVKDLNSGLIGALLVCREGSLAKEKTQTLHKFILLFAVFDEGKSWHSETKNSLMQDRDAASARAWPKMHTVNGYVNRSLPGLIGCHRKSVYWHVIGMGTTPEVHSIFLEGHTFLVRNHRQASLEISPITFLTAQTLLMDLGQFLLFCHISSHQHDGMEAYVKVDSCPEEPQLRMKNNEEAEDYDDDLTDSEMDVVRFDDDNSPSFIQIRSVAKKHPKTWVHYIAAEEEDWDYAPLVLAPDDRSYKSQYLNNGPQRIGRKYKKVRFMAYTDETFKTREAIQHESGILGPLLYGEVGDTLLIIFKNQASRPYNIYPHGITDVRPLYSRRLPKGVKHLKDFPILPGEIFKYKWTVTVEDGPTKSDPRCLTRYYSSFVNMERDLASGLIGPLLICYKESVDQRGNQIMSDKRNVILFSVFDENRSWYLTENIQRFLPNPAGVQLEDPEFQASNIMHSINGYVFDSLQLSVCLHEVAYWYILSIGAQTDFLSVFFSGYTFKHKMVYEDTLTLFPFSGETVFMSMENPGLWILGCHNSDFRNRGMTALLKVSSCDKNTGDYYEDSYEDISAYLLSKNNAIEPRSFSQNPPVLKRHQREITRTTLQSDQEEIDYDDTISVEMKKEDFDIYDEDENQSPRSFQKKTRHYFIAAVERLWDYGMSSSPHVLRNRAQSGSVPQFKKVVFQEFTDGSFTQPLYRGELNEHLGLLGPYIRAEVEDNIMVTFRNQASRPYSFYSSLISYEEDQRQGAEPRKNFVKPNETKTYFWKVQHHMAPTKDEFDCKAWAYFSDVDLEKDVHSGLIGPLLVCHTNTLNPAHGRQVTVQEFALFFTIFDETKSWYFTENMERNCRAPCNIQMEDPTFKENYRFHAINGYIMDTLPGLVMAQDQRIRWYLLSMGSNENIHSIHFSGHVFTVRKKEEYKMALYNLYPGVFETVEMLPSKAGIWRVECLIGEHLHAGMSTLFLVYSNKCQTPLGMASGHIRDFQITASGQYGQWAPKLARLHYSGSINAWSTKEPFSWIKVDLLAPMIIHGIKTQGARQKFSSLYISQFIIMYSLDGKKWQTYRGNSTGTLMVFFGNVDSSGIKHNLFNPPIIARYIRLHPTHYSIRSTLRMELMGCDLNSCSMPLGMESKAISDAQITASSYFTNMFATWSPSKARLHLQGRSNAWRPQVNNPKEWLQVDFQKTMKVTGVTTQGVKSLLTSMYVKEFLISSSQDGHQWTLFFQNGKVKVFQGNQDSFTPVVNSLDPPLLTRYLRIHPQSWVHQIALRMEVLGCEAQDLY

SEQ ID NO: 183 - DNA, 4371 bp, synthetic construct
  misc_feature 1..4371: note = Variant of human B-domain deleted Factor VIII
  source 1..4371: mol_type = other DNA
atgcagattgaactgtctacctgcttcttcctctgtttgctgaggttctgctttagcgccactagacggtactaccttggcgctgtggagctgtcctgggactatatgcagagtgatttgggagagcttcccgtcgacgcacgatttcctcctcgcgttccaaagtcatttcccttcaacacaagcgtggtgtacaagaagacgctcttcgtcgaattcaccgatcacctgttcaatatcgccaaacccagaccaccatggatgggtcttttggggcctaccatacaagcggaggtgtatgacacagttgttatcactctcaagaacatggcttctcatccggtaagtcttcacgcagtgggcgtgtcctactggaaagcttcagaaggagccgagtatgatgatcagacatcccagagggagaaagaagacgacaaggtatttccaggtgggtctcatacctatgtgtggcaagtgctcaaagagaatggccctatggcaagcgatccgctctgtttgacttacagctacctttcacacgttgacctcgtcaaggacctcaactccgggttgattggagccttgttggtatgcagggaaggatctcttgccaaagagaagacacagaccctccacaagtttatccttctctttgctgtgttcgatgagggcaaaagttggcatagcgaaacgaagaattccctcatgcaggatcgcgacgcagccagcgccagagcttggcccaagatgcacactgtgaacggatatgtcaataggtcacttcctggcttgattgggtgtcatcggaaaagtgtctactggcacgtgatcggaatggggacaacaccagaggtccactccatatttctcgaaggccataccttccttgttcgaaaccacagacaggcatccttggagatctctcccattacctttctcactgcccaaacgctccttatggacttgggtcagttccttctcttctgccatatcagctcacaccagcatgatggtatggaagcttatgtgaaagtcgacagttgtcctgaggagccacagttgcgcatgaagaataatgaagaagccgaggattacgacgacgatctcaccgattctgagatggacgtggtgaggtttgatgacgacaactctccctccttcattcaaatccggagcgtggcgaagaaacaccccaagacttgggtccactatatagcggcggaagaggaggattgggattacgctcctcttgtattggcaccagatgaccgctcatacaaaagccagtacctcaacaacggaccgcagagaattggccggaagtataagaaagtgcgatttatggcctatacagacgaaacctttaagacaagggaggccatccagcatgagagtgggattttgggacctcttctttacggcgaagttggtgataccctcctcatcatcttcaagaatcaagcttctcgcccctataacatttacccacacgggatcactgacgttaggcctttgtatagcagaagacttcccaaaggcgtgaagcatctcaaagacttccccattttgccaggcgagatctttaagtacaaatggaccgtcacagtggaagatggaccgactaaatcagaccctcgatgccttacgcggtactattcctccttcgtgaatatggagagagatttggcaagcggactcataggaccactcctcatctgttacaaggaatctgtagaccagaggggtaaccagattatgagtgataaacgcaatgtgatcctttttagcgtcttcgacgagaaccggtcctggtacttgaccgagaatatacaaaggttccttcccaaccccgcaggcgttcagttggaagaccctgagtttcaggccagcaatattatgcactcaatcaacggctatgtgtttgatagtctccagctttctgtttgcctccatgaagtagcctattggtacatcttgtcaattggtgctcaaacagacttcctctccgtcttcttctccggctacacctttaagcacaagatggtgtatgaggacactctcacactctttccattttctggagaaaccgtgttcatgagcatggagaatccaggcctttggatcttgggttgccacaacagtgattttcgcaatcggggaatgactgctctcctcaaagtcagcagctgtgataagaacacaggcgactattacgaagattcttacgaggacataagtgcctacttgttgtccaagaataacgccattgagcccagatcattctcccagaatcctcccgtgcttaaaaggcatcagcgcgaaatcaccagaactactcttcagtctgatcaagaggagattgactatgacgacaccataagcgtggaaatgaagaaggaggatttcgatatctatgacgaagatgagaaccagtctccgcggagctttcagaagaagacgcgacactacttcattgcagcagtcgaaaggctttgggactacggtatgtcatcatcccctcatgtgttgcgcaatagagctcagagtggaagtgttccacagttcaagaaagtcgtctttcaagagtttacagatggcagcttcacacagcctctctatcggggcgagcttaacgaacatttgggactccttggtccctatatccgagccgaagtggaggacaacattatggttacctttaggaatcaagcctctcgcccctacagcttctactcctccctcatcagttatgaggaggatcagagacaaggcgctgaaccacggaagaactttgtgaaaccgaatgagacgaagacctacttctggaaagtacagcaccacatggcccccacaaaagacgaattcgattgcaaagcatgggcgtatttttcagacgttgacttggagaaagatgtacattcaggacttattggtcctttgttggtgtgtcacactaacactctcaatccagcccatggcaggcaggtgacagtccaggaattcgctcttttctttaccatctttgatgagaccaagtcctggtacttcacggaaaacatggagcgcaattgcagagccccctgtaacatacagatggaggaccctacctttaaggaaaattatcggttccacgcaatcaacggatacattatggatacactccctggccttgtgatggctcaggaccaacgaatcaggtggtacctcctcagcatgggttctaatgagaacatacactccattcacttttcaggacatgtgttcactgtccggaagaaagaagagtataagatggccctctacaatttgtatccaggcgtgtttgagaccgttgaaatgcttccctctaaagctggcatctggagagtagagtgcttgatcggagaacatcttcacgcaggtatgagcaccttgttcctcgtgtacagcaacaaatgtcagaccccacttggcatggccagtggacacattcgcgactttcagatcacagcatctggccagtatggacaatgggccccaaagttggctcgcctccattactccggtagcataaatgcgtggtccactaaagaacctttcagctggattaaggtcgatcttcttgcccccatgatcatccacggcattaagacacagggagcgaggcagaaattctcctccctctacatctcacagttcattattatgtatagtttggacggcaagaagtggcaaacttatagaggtaacagtactggaacactcatgccgttcttcggcaacgttgatagctctggcatcaaacacaacatctttaatcctcccataatagctcggtacatcagattgcatccgacccactacagcattaggagtacactccgaatggagcttatgggttgcgacttgaattcctgttcaatgccactcggaatggagtctaaagccatctctgatgcacagataaccgccagtagctactttacgaacatgtttgctacgtggtcaccctctaaggcaaggcttcatttgcaaggccggtctaatgcctggagacctcaggtgaacaacccgaaagaatggctccaggtggactttcagaagaccatgaaagtaacaggtgtcactactcagggagttaagtccttgctcaccagcatgtatgtgaaggagttccttatttcctcatcacaagatggccaccagtggaccctcttctttcagaatggtaaggtcaaagtgtttcagggcaatcaagacagcttcacacccgtggtgaacagtcttgatcctccactcttgacacgataccttcgaatccatccacagtcttgggttcaccagattgcattgcgcatggaagtacttggatgcgaggctcaggacctctac

SEQ ID NO: 184 - protein, 1457 aa, synthetic construct
  REGION 1..1457: note = Variant of human B-domain deleted Factor VIII
MQIELSTCFFLCLLRFCFSATRRYYLGAVELSWDYMQSDLGELPVDARFPPRVPKSFPFNTSVVYKKTLFVEFTDHLFNIAKPRPPWMGLLGPTIQAEVYDTVVITLKNMASHPVSLHAVGVSYWKASEGAEYDDQTSQREKEDDKVFPGGSHTYVWQVLKENGPMASDPLCLTYSYLSHVDLVKDLNSGLIGALLVCREGSLAKEKTQTLHKFILLFAVFDEGKSWHSETKNSLMQDRDAASARAWPKMHTVNGYVNRSLPGLIGCHRKSVYWHVIGMGTTPEVHSIFLEGHTFLVRNHRQASLEISPITFLTAQTLLMDLGQFLLFCHISSHQHDGMEAYVKVDSCPEEPQLRMKNNEEAEDYDDDLTDSEMDVVRFDDDNSPSFIQIRSVAKKHPKTWVHYIAAEEEDWDYAPLVLAPDDRSYKSQYLNNGPQRIGRKYKKVRFMAYTDETFKTREAIQHESGILGPLLYGEVGDTLLIIFKNQASRPYNIYPHGITDVRPLYSRRLPKGVKHLKDFPILPGEIFKYKWTVTVEDGPTKSDPRCLTRYYSSFVNMERDLASGLIGPLLICYKESVDQRGNQIMSDKRNVILFSVFDENRSWYLTENIQRFLPNPAGVQLEDPEFQASNIMHSINGYVFDSLQLSVCLHEVAYWYILSIGAQTDFLSVFFSGYTFKHKMVYEDTLTLFPFSGETVFMSMENPGLWILGCHNSDFRNRGMTALLKVSSCDKNTGDYYEDSYEDISAYLLSKNNAIEPRSFSQNPPVLKRHQREITRTTLQSDQEEIDYDDTISVEMKKEDFDIYDEDENQSPRSFQKKTRHYFIAAVERLWDYGMSSSPHVLRNRAQSGSVPQFKKVVFQEFTDGSFTQPLYRGELNEHLGLLGPYIRAEVEDNIMVTFRNQASRPYSFYSSLISYEEDQRQGAEPRKNFVKPNETKTYFWKVQHHMAPTKDEFDCKAWAYFSDVDLEKDVHSGLIGPLLVCHTNTLNPAHGRQVTVQEFALFFTIFDETKSWYFTENMERNCRAPCNIQMEDPTFKENYRFHAINGYIMDTLPGLVMAQDQRIRWYLLSMGSNENIHSIHFSGHVFTVRKKEEYKMALYNLYPGVFETVEMLPSKAGIWRVECLIGEHLHAGMSTLFLVYSNKCQTPLGMASGHIRDFQITASGQYGQWAPKLARLHYSGSINAWSTKEPFSWIKVDLLAPMIIHGIKTQGARQKFSSLYISQFIIMYSLDGKKWQTYRGNSTGTLMPFFGNVDSSGIKHNIFNPPIIARYIRLHPTHYSIRSTLRMELMGCDLNSCSMPLGMESKAISDAQITASSYFTNMFATWSPSKARLHLQGRSNAWRPQVNNPKEWLQVDFQKTMKVTGVTTQGVKSLLTSMYVKEFLISSSQDGHQWTLFFQNGKVKVFQGNQDSFTPVVNSLDPPLLTRYLRIHPQSWVHQIALRMEVLGCEAQDLY

SEQ ID NO: 185 - DNA, 4371 bp, synthetic construct
  misc_feature 1..4371: note = Variant of human B-domain deleted Factor VIII
  source 1..4371: mol_type = other DNA
atgcagattgaactgtctacctgcttcttcctctgtttgctgaggttctgctttagcgccactagacggtactaccttggcgctgtggagctgtcctgggactatatgcagagtgatttgggagagcttcccgtcgacgcacgatttcctcctcgcgttccaaagtcatttcccttcaacacaagcgtggtgtacaagaagacgctcttcgtcgaattcaccgatcacctgttcaatatcgccaaacccagaccaccatggatgggtcttttggggcctaccatacaagcggaggtgtatgacacagttgttatcactctcaagaacatggcttctcatccggtaagtcttcacgcagtgggcgtgtcctactggaaagcttcagaaggagccgagtatgatgatcagacatcccagagggagaaagaagacgacaaggtatttccaggtgggtctcatacctatgtgtggcaagtgctcaaagagaatggccctatggcaagcgatccgctctgtttgacttacagctacctttcacacgttgacctcgtcaaggacctcaactccgggttgattggagccttgttggtatgcagggaaggatctcttgccaaagagaagacacagaccctccacaagtttatccttctctttgctgtgttcgatgagggcaaaagttggcatagcgaaacgaagaattccctcatgcaggatcgcgacgcagccagcgccagagcttggcccaagatgcacactgtgaacggatatgtcaataggtcacttcctggcttgattgggtgtcatcggaaaagtgtctactggcacgtgatcggaatggggacaacaccagaggtccactccatatttctcgaaggccataccttccttgttcgaaaccacagacaggcatccttggagatctctcccattacctttctcactgcccaaacgctccttatggacttgggtcagttccttctcttctgccatatcccttcacaccagcatgatggtatggaagcttatgtgaaagtcgacagttgtcctgaggagccacagttgcgcatgaagaataatgaagaagccgaggattacgacgacgatctcaccgattctgagatggacgtggtgaggtttgatgacgacaactctccctccttcattcaaatccggagcgtggcgaagaaacaccccaagacttgggtccactatatagcggcggaagaggaggattgggattacgctcctcttgtattggcaccagatgaccgctcatacaaaagccagtacctcaacaacggaccgcagagaattggccggaagtataagaaagtgcgatttatggcctatacagacgaaacctttaagacaagggaggccatccagcatgagagtgggattttgggacctcttctttacggcgaagttggtgataccctcctcatcatcttcaagaatcaagcttctcgcccctataacatttacccacacgggatcactgacgttaggcctttgtatagcagaagacttcccaaaggcgtgaagcatctcaaagacttccccattttgccaggcgagatctttaagtacaaatggaccgtcacagtggaagatggaccgactaaatcagaccctcgatgccttacgcggtactattcctccttcgtgaatatggagagagatttggcaagcggactcataggaccactcctcatctgttacaaggaatctgtagaccagaggggtaaccagattatgagtgataaacgcaatgtgatcctttttagcgtcttcgacgagaaccggtcctggtacttgaccgagaatatacaaaggttccttcccaaccccgcaggcgttcagttggaagaccctgagtttcaggccagcaatattatgcactcaatcaacggctatgtgtttgatagtctccagctttctgtttgcctccatgaagtagcctattggtacatcttgtcaattggtgctcaaacagacttcctctccgtcttcttctccggctacacctttaagcacaagatggtgtatgaggacactctcacactctttccattttctggagaaaccgtgttcatgagcatggagaatccaggcctttggatcttgggttgccacaacagtgattttcgcaatcggggaatgactgctctcctcaaagtcagcagctgtgataagaacacaggcgactattacgaagattcttacgaggacataagtgcctacttgttgtccaagaataacgccattgagcccagatcattctcccagaatcctcccgtgcttaaaaggcatcagcgcgaaatcaccagaactactcttcagtctgatcaagaggagattgactatgacgacaccataagcgtggaaatgaagaaggaggatttcgatatctatgacgaagatgagaaccagtctccgcggagctttcagaagaagacgcgacactacttcattgcagcagtcgaaaggctttgggactacggtatgtcatcatcccctcatgtgttgcgcaatagagctcagagtggaagtgttccacagttcaagaaagtcgtctttcaagagtttacagatggcagcttcacacagcctctctatcggggcgagcttaacgaacatttgggactccttggtccctatatccgagccgaagtggaggacaacattatggttacctttaggaatcaagcctctcgcccctacagcttctactcctccctcatcagttatgaggaggatcagagacaaggcgctgaaccacggaagaactttgtgaaaccgaatgagacgaagacctacttctggaaagtacagcaccacatggcccccacaaaagacgaattcgattgcaaagcatgggcgtatttttcagacgttgacttggagaaagatgtacattcaggacttattggtcctttgttggtgtgtcacactaacactctcaatccagcccatggcaggcaggtgacagtccaggaattcgctcttttctttaccatctttgatgagaccaagtcctggtacttcacggaaaacatggagcgcaattgcagagccccctgtaacatacagatggaggaccctacctttaaggaaaattatcggttccacgcaatcaacggatacattatggatacactccctggccttgtgatggctcaggaccaacgaatcaggtggtacctcctcagcatgggttctaatgagaacatacactccattcacttttcaggacatgtgttcactgtccggaagaaagaagagtataagatggccctctacaatttgtatccaggcgtgtttgagaccgttgaaatgcttccctctaaagctggcatctggagagtagagtgcttgatcggagaacatcttcacgcaggtatgagcaccttgttcctcgtgtacagcaacaaatgtcagaccccacttggcatggccagtggacacattcgcgactttcagatcacagcatctggccagtatggacaatgggccccaaagttggctcgcctccattactccggtagcataaatgcgtggtccactaaagaacctttcagctggattaaggtcgatcttcttgcccccatgatcatccacggcattaagacacagggagcgaggcagaaattctcctccctctacatctcacagttcattattatgtatagtttggacggcaagaagtggcaaacttatagaggtaacagtactggaacactcatggtgttcttcggcaacgttgatagctctggcatcaaacacaacatctttaatcctcccataatagctcggtacatcagattgcatccgacccactacagcattaggagtacactccgaatggagcttatgggttgcgacttgaattcctgttcaatgccactcggaatggagtctaaagccatctctgatgcacagataaccgccagtagctactttacgaacatgtttgctacgtggtcaccctctaaggcaaggcttcatttgcaaggccggtctaatgcctggagacctcaggtgaacaacccgaaagaatggctccaggtggactttcagaagaccatgaaagtaacaggtgtcactactcagggagttaagtccttgctcaccagcatgtatgtgaaggagttccttatttcctcatcacaagatggccaccagtggaccctcttctttcagaatggtaaggtcaaagtgtttcagggcaatcaagacagcttcacacccgtggtgaacagtcttgatcctccactcttgacacgataccttcgaatccatccacagtcttgggttcaccagattgcattgcgcatggaagtacttggatgcgaggctcaggacctctac

SEQ ID NO: 186 - protein, 1457 aa, synthetic construct
  REGION 1..1457: note = Variant of human B-domain deleted Factor VIII
MQIELSTCFFLCLLRFCFSATRRYYLGAVELSWDYMQSDLGELPVDARFPPRVPKSFPFNTSVVYKKTLFVEFTDHLFNIAKPRPPWMGLLGPTIQAEVYDTVVITLKNMASHPVSLHAVGVSYWKASEGAEYDDQTSQREKEDDKVFPGGSHTYVWQVLKENGPMASDPLCLTYSYLSHVDLVKDLNSGLIGALLVCREGSLAKEKTQTLHKFILLFAVFDEGKSWHSETKNSLMQDRDAASARAWPKMHTVNGYVNRSLPGLIGCHRKSVYWHVIGMGTTPEVHSIFLEGHTFLVRNHRQASLEISPITFLTAQTLLMDLGQFLLFCHIPSHQHDGMEAYVKVDSCPEEPQLRMKNNEEAEDYDDDLTDSEMDVVRFDDDNSPSFIQIRSVAKKHPKTWVHYIAAEEEDWDYAPLVLAPDDRSYKSQYLNNGPQRIGRKYKKVRFMAYTDETFKTREAIQHESGILGPLLYGEVGDTLLIIFKNQASRPYNIYPHGITDVRPLYSRRLPKGVKHLKDFPILPGEIFKYKWTVTVEDGPTKSDPRCLTRYYSSFVNMERDLASGLIGPLLICYKESVDQRGNQIMSDKRNVILFSVFDENRSWYLTENIQRFLPNPAGVQLEDPEFQASNIMHSINGYVFDSLQLSVCLHEVAYWYILSIGAQTDFLSVFFSGYTFKHKMVYEDTLTLFPFSGETVFMSMENPGLWILGCHNSDFRNRGMTALLKVSSCDKNTGDYYEDSYEDISAYLLSKNNAIEPRSFSQNPPVLKRHQREITRTTLQSDQEEIDYDDTISVEMKKEDFDIYDEDENQSPRSFQKKTRHYFIAAVERLWDYGMSSSPHVLRNRAQSGSVPQFKKVVFQEFTDGSFTQPLYRGELNEHLGLLGPYIRAEVEDNIMVTFRNQASRPYSFYSSLISYEEDQRQGAEPRKNFVKPNETKTYFWKVQHHMAPTKDEFDCKAWAYFSDVDLEKDVHSGLIGPLLVCHTNTLNPAHGRQVTVQEFALFFTIFDETKSWYFTENMERNCRAPCNIQMEDPTFKENYRFHAINGYIMDTLPGLVMAQDQRIRWYLLSMGSNENIHSIHFSGHVFTVRKKEEYKMALYNLYPGVFETVEMLPSKAGIWRVECLIGEHLHAGMSTLFLVYSNKCQTPLGMASGHIRDFQITASGQYGQWAPKLARLHYSGSINAWSTKEPFSWIKVDLLAPMIIHGIKTQGARQKFSSLYISQFIIMYSLDGKKWQTYRGNSTGTLMVFFGNVDSSGIKHNIFNPPIIARYIRLHPTHYSIRSTLRMELMGCDLNSCSMPLGMESKAISDAQITASSYFTNMFATWSPSKARLHLQGRSNAWRPQVNNPKEWLQVDFQKTMKVTGVTTQGVKSLLTSMYVKEFLISSSQDGHQWTLFFQNGKVKVFQGNQDSFTPVVNSLDPPLLTRYLRIHPQSWVHQIALRMEVLGCEAQDLY

SEQ ID NO: 187 - DNA, 4371 bp, synthetic construct
  misc_feature 1..4371: note = Variant of human B-domain deleted Factor VIII
  source 1..4371: mol_type = other DNA
atgcagattgaactgtctacctgcttcttcctctgtttgctgaggttctgctttagcgccactagacggtactaccttggcgctgtggagctgtcctgggactatatgcagagtgatttgggagagcttcccgtcgacgcacgatttcctcctcgcgttccaaagtcatttcccgtgaacacaagcgtggtgtacaagaagacgctcttcgtcgaattcaccgatcacctgttcaatatcgccaaacccagaccaccatggatgggtcttttggggcctaccatacaagcggaggtgtatgacacagttgttatcactctcaagaacatggcttctcatccggtaagtcttcacgcagtgggcgtgtcctactggaaagcttcagaaggagccgagtatgatgatcagacatcccagagggagaaagaagacgacaaggtatttccaggtgggtctcatacctatgtgtggcaagtgctcaaagagaatggccctatggcaagcgatccgctctgtttgacttacagctacctttcacacgttgacctcgtcaaggacctcaactccgggttgattggagccttgttggtatgcagggaaggatctcttgccaaagagaagacacagaccctccacaagtttatccttctctttgctgtgttcgatgagggcaaaagttggcatagcgaaacgaagaattccctcatgcaggatcgcgacgcagccagcgccagagcttggcccaagatgcacactgtgaacggatatgtcaataggtcacttcctggcttgattgggtgtcatcggaaaagtgtctactggcacgtgatcggaatggggacaacaccagaggtccactccatatttctcgaaggccataccttccttgttcgaaaccacagacaggcatccttggagatctctcccattacctttctcactgcccaaacgctccttatggacttgggtcagttccttctcttctgccatatcagctcacaccagcatgatggtatggaagcttatgtgaaagtcgacagttgtcctgaggagccacagttgcgcatgaagaataatgaagaagccgaggattacgacgacgatctcaccgattctgagatggacgtggtgaggtttgatgacgacaactctccctccttcattcaaatccggagcgtggcgaagaaacaccccaagacttgggtccactatatagcggcggaagaggaggattgggattacgctcctcttgtattggcaccagatgaccgctcatacaaaagccagtacctcaacaacggaccgcagagaattggccggaagtataagaaagtgcgatttatggcctatacagacgaaacctttaagacaagggaggccatccagcatgagagtgggattttgggacctcttctttacggcgaagttggtgataccctcctcatcatcttcaagaatcaagcttctcgcccctataacatttacccacacgggatcactgacgttaggcctttgtatagcagaagacttcccaaaggcgtgaagcatctcaaagacttccccattttgccaggcgagatctttaagtacaaatggaccgtcacagtggaagatggaccgactaaatcagaccctcgatgccttacgcggtactattcctccttcgtgaatatggagagagatttggcaagcggactcataggaccactcctcatctgttacaaggaatctgtagaccagaggggtaaccagattatgagtgataaacgcaatgtgatcctttttagcgtcttcgacgagaaccggtcctggtacttgaccgagaatatacaaaggttccttcccaaccccgcaggcgttcagttggaagaccctgagtttcaggccagcaatattatgcactcaatcaacggctatgtgtttgatagtctccagctttctgtttgcctccatgaagtagcctattggtacatcttgtcaattggtgctcaaacagacttcctctccgtcttcttctccggctacacctttaagcacaagatggtgtatgaggacactctcacactctttccattttctggagaaaccgtgttcatgagcatggagaatccaggcctttggatcttgggttgccacaacagtgattttcgcaatcggggaatgactgctctcctcaaagtcagcagctgtgataagaacacaggcgactattacgaagattcttacgaggacataagtgcctacttgttgtccaagaataacgccattgagcccagatcattctcccagaatcctcccgtgcttaaaaggcatcagcgcgaaatcaccagaactactcttcagtctgatcaagaggagattgactatgacgacaccataagcgtggaaatgaagaaggaggatttcgatatctatgacgaagatgagaaccagtctccgcggagctttcagaagaagacgcgacactacttcattgcagcagtcgaaaggctttgggactacggtatgtcatcatcccctcatgtgttgcgcaatagagctcagagtggaagtgttccacagttcaagaaagtcgtctttcaagagtttacagatggcagcttcacacagcctctctatcggggcgagcttaacgaacatttgggactccttggtccctatatccgagccgaagtggaggacaacattatggttacctttaggaatcaagcctctcgcccctacagcttctactcctccctcatcagttatgaggaggatcagagacaaggcgctgaaccacggaagaactttgtgaaaccgaatgagacgaagacctacttctggaaagtacagcaccacatggcccccacaaaagacgaattcgattgcaaagcatgggcgtatttttcagacgttgacttggagaaagatgtacattcaggacttattggtcctttgttggtgtgtcacactaacactctcaatccagcccatggcaggcaggtgacagtccaggaattcgctcttttctttaccatctttgatgagaccaagtcctggtacttcacggaaaacatggagcgcaattgcagagccccctgtaacatacagatggaggaccctacctttaaggaaaattatcggttccacgcaatcaacggatacattatggatacactccctggccttgtgatggctcaggaccaacgaatcaggtggtacctcctcagcatgggttctaatgagaacatacactccattcacttttcaggacatgtgttcactgtccggaagaaagaagagtataagatggccctctacaatttgtatccaggcgtgtttgagaccgttgaaatgcttccctctaaagctggcatctggagagtagagtgcttgatcggagaacatcttcacgcaggtatgagcaccttgttcctcgtgtacagcaacaaatgtcagaccccacttggcatggccagtggacacattcgcgactttcagatcacagcatctggccagtatggacaatgggccccaaagttggctcgcctccattactccggtagcataaatgcgtggtccactaaagaacctttcagctggattaaggtcgatcttcttgcccccatgatcatccacggcattaagacacagggagcgaggcagaaattctcctccctctacatctcacagttcattattatgtatagtttggacggcaagaagtggcaaacttatagaggtaacagtactggaacactcatggtgttcttcggcaacgttgatagctctggcatcaaacacaacatctttaatcctcccataatagctcggtacatcagattgcatccgacccactacagcattaggagtacactccgaatggagcttatgggttgcgacttgaattcctgttcaatgccactcggaatggagtctaaagccatctctgatgcacagataaccgccagtagctactttacgaacatgtttgctacgtggtcaccctctaaggcaaggcttcatttgcaaggccggtctaatgcctggagacctcaggtgaacaacccgaaagaatggctccaggtggactttcagaagaccatgaaagtaacaggtgtcactactcagggagttaagtccttgctcaccagcatgtatgtgaaggagttccttatttcctcatcacaagatggccaccagtggaccctcttctttcagaatggtaaggtcaaagtgtttcagggcaatcaagacagcttcacacccgtggtgaacagtcttgatcctccactcttgacacgataccttcgaatccatccacagtcttgggttcaccagattgcattgcgcatggaagtacttggatgcgaggctcaggacctctac

SEQ ID NO: 188 - protein, 1457 aa, synthetic construct
  REGION 1..1457: note = Variant of human B-domain deleted Factor VIII
MQIELSTCFFLCLLRFCFSATRRYYLGAVELSWDYMQSDLGELPVDARFPPRVPKSFPVNTSVVYKKTLFVEFTDHLFNIAKPRPPWMGLLGPTIQAEVYDTVVITLKNMASHPVSLHAVGVSYWKASEGAEYDDQTSQREKEDDKVFPGGSHTYVWQVLKENGPMASDPLCLTYSYLSHVDLVKDLNSGLIGALLVCREGSLAKEKTQTLHKFILLFAVFDEGKSWHSETKNSLMQDRDAASARAWPKMHTVNGYVNRSLPGLIGCHRKSVYWHVIGMGTTPEVHSIFLEGHTFLVRNHRQASLEISPITFLTAQTLLMDLGQFLLFCHISSHQHDGMEAYVKVDSCPEEPQLRMKNNEEAEDYDDDLTDSEMDVVRFDDDNSPSFIQIRSVAKKHPKTWVHYIAAEEEDWDYAPLVLAPDDRSYKSQYLNNGPQRIGRKYKKVRFMAYTDETFKTREAIQHESGILGPLLYGEVGDTLLIIFKNQASRPYNIYPHGITDVRPLYSRRLPKGVKHLKDFPILPGEIFKYKWTVTVEDGPTKSDPRCLTRYYSSFVNMERDLASGLIGPLLICYKESVDQRGNQIMSDKRNVILFSVFDENRSWYLTENIQRFLPNPAGVQLEDPEFQASNIMHSINGYVFDSLQLSVCLHEVAYWYILSIGAQTDFLSVFFSGYTFKHKMVYEDTLTLFPFSGETVFMSMENPGLWILGCHNSDFRNRGMTALLKVSSCDKNTGDYYEDSYEDISAYLLSKNNAIEPRSFSQNPPVLKRHQREITRTTLQSDQEEIDYDDTISVEMKKEDFDIYDEDENQSPRSFQKKTRHYFIAAVERLWDYGMSSSPHVLRNRAQSGSVPQFKKVVFQEFTDGSFTQPLYRGELNEHLGLLGPYIRAEVEDNIMVTFRNQASRPYSFYSSLISYEEDQRQGAEPRKNFVKPNETKTYFWKVQHHMAPTKDEFDCKAWAYFSDVDLEKDVHSGLIGPLLVCHTNTLNPAHGRQVTVQEFALFFTIFDETKSWYFTENMERNCRAPCNIQMEDPTFKENYRFHAINGYIMDTLPGLVMAQDQRIRWYLLSMGSNENIHSIHFSGHVFTVRKKEEYKMALYNLYPGVFETVEMLPSKAGIWRVECLIGEHLHAGMSTLFLVYSNKCQTPLGMASGHIRDFQITASGQYGQWAPKLARLHYSGSINAWSTKEPFSWIKVDLLAPMIIHGIKTQGARQKFSSLYISQFIIMYSLDGKKWQTYRGNSTGTLMVFFGNVDSSGIKHNIFNPPIIARYIRLHPTHYSIRSTLRMELMGCDLNSCSMPLGMESKAISDAQITASSYFTNMFATWSPSKARLHLQGRSNAWRPQVNNPKEWLQVDFQKTMKVTGVTTQGVKSLLTSMYVKEFLISSSQDGHQWTLFFQNGKVKVFQGNQDSFTPVVNSLDPPLLTRYLRIHPQSWVHQIALRMEVLGCEAQDLY

SEQ ID NO: 189 - DNA, 4371 bp, synthetic construct
  misc_feature 1..4371: note = Variant of human B-domain deleted Factor VIII
  source 1..4371: mol_type = other DNA
atgcagattgaactgtctacctgcttcttcctctgtttgctgaggttctgctttagcgccactagacggtactaccttggcgctgtggagctgtcctgggactatatgcagagtgatttgggagagcttcccgtcgacgcacgatttcctcctcgcgttccaaagtcatttcccttcaacacaagcgtggtgtacaagaagacgctcttcgtcgaattcaccgatcacctgttcaatatcgccaaacccagaccaccatggatgggtcttttggggcctaccatacaagcggaggtgtatgacacagttgttatcactctcaagaacatggcttctcatccggtaagtcttcacgcagtgggcgtgtcctactggaaagcttcagaaggagccgagtatgatgatcagacatcccagagggagaaagaagacgacaaggtatttccaggtgggtctcatacctatgtgtggcaagtgctcaaagagaatggccctatggcaagcgatccgctctgtttgacttacagctacctttcacacgttgacctcgtcaaggacctcaactccgggttgattggagccttgttggtatgcagggaaggatctcttgccaaagagaagacacagaccctccacaagtttatccttctctttgctgtgttcgatgagggcaaaagttggcatagcgaaacgaagaattccctcatgcaggatcgcgacgcagccagcgccagagcttggcccaagatgcacactgtgaacggatatgtcaataggtcacttcctggcttgattgggtgtcatcggaaaagtgtctactggcacgtgatcggaatggggacaacaccagaggtccactccatatttctcgaaggccataccttccttgttcgaaaccacagacaggcatccttggagatctctcccattacctttctcactgcccaaacgctccttatggacttgggtcagttccttctcttctgccatatcagctcacaccagcatgatggtatggaagcttatgtgaaagtcgacagttgtcctgaggagccacagttgcgcatgaagaataatgaagaagccgaggattacgacgacgatctcaccgattctgagatggacgtggtgaggtttgatgacgacaactctccctccttcattcaaatccggagcgtggcgaagaaacaccccaagacttgggtccactatatagcggcggaagaggaggattgggattacgctcctcttgtattggcaccagatgaccgctcatacaaaagccagtacctcaacaacggaccgcagagaattggccggaagtataagaaagtgcgatttatggcctatacagacgaaacctttaagacaagggaggccatccagcatgagagtgggattttgggacctcttctttacggcgaagttggtgataccctcctcatcatcttcaagaatcaagcttctcgcccctataacatttacccacacgggatcactgacgttaggcctttgtatagcagaagacttcccaaaggcgtgaagcatctcaaagacttccccattttgccaggcgagatctttaagtacaaatggaccgtcacagtggaagatggaccgactaaatcagaccctcgatgccttacgcggtactattcctccttcgtgaatatggagagagatttggcaagcggactcataggaccactcctcatctgttacaaggaatctgtagaccagaggggtaaccagattatgagtgataaacgcaatgtgatcctttttagcgtcttcgacgagaaccggtcctggtacttgaccgagaatatacaaaggttccttcccaaccccgcaggcgttcagttggaagaccctgagtttcaggccagcaatattatgcactcaatcaacggctatgtgtttgatagtctccagctttctgtttgcctccatgaagtagcctattggtacatcttgtcaattggtgctcaaacagacttcctctccgtcttcttctccggctacacctttaagcacaagatggtgtatgaggacactctcacactctttccattttctggagaaaccgtgttcatgagcatggagaatccaggcctttggatcttgggttgccacaacagtgattttcgcaatcggggaatgactgctctcctccttgtcagcagctgtgataagaacacaggcgactattacgaagattcttacgaggacataagtgcctacttgttgtccaagaataacgccattgagcccagatcattctcccagaatcctcccgtgcttaaaaggcatcagcgcgaaatcaccagaactactcttcagtctgatcaagaggagattgactatgacgacaccataagcgtggaaatgaagaaggaggatttcgatatctatgacgaagatgagaaccagtctccgcggagctttcagaagaagacgcgacactacttcattgcagcagtcgaaaggctttgggactacggtatgtcatcatcccctcatgtgttgcgcaatagagctcagagtggaagtgttccacagttcaagaaagtcgtctttcaagagtttacagatggcagcttcacacagcctctctatcggggcgagcttaacgaacatttgggactccttggtccctatatccgagccgaagtggaggacaacattatggttacctttaggaatcaagcctctcgcccctacagcttctactcctccctcatcagttatgaggaggatcagagacaaggcgctgaaccacggaagaactttgtgaaaccgaatgagacgaagacctacttctggaaagtacagcaccacatggcccccacaaaagacgaattcgattgcaaagcatgggcgtatttttcagacgttgacttggagaaagatgtacattcaggacttattggtcctttgttggtgtgtcacactaacactctcaatccagcccatggcaggcaggtgacagtccaggaattcgctcttttctttaccatctttgatgagaccaagtcctggtacttcacggaaaacatggagcgcaattgcagagccccctgtaacatacagatggaggaccctacctttaaggaaaattatcggttccacgcaatcaacggatacattatggatacactccctggccttgtgatggctcaggaccaacgaatcaggtggtacctcctcagcatgggttctaatgagaacatacactccattcacttttcaggacatgtgttcactgtccggaagaaagaagagtataagatggccctctacaatttgtatccaggcgtgtttgagaccgttgaaatgcttccctctaaagctggcatctggagagtagagtgcttgatcggagaacatcttcacgcaggtatgagcaccttgttcctcgtgtacagcaacaaatgtcagaccccacttggcatggccagtggacacattcgcgactttcagatcacagcatctggccagtatggacaatgggccccaaagttggctcgcctccattactccggtagcataaatgcgtggtccactaaagaacctttcagctggattaaggtcgatcttcttgcccccatgatcatccacggcattaagacacagggagcgaggcagaaattctcctccctctacatctcacagttcattattatgtatagtttggacggcaagaagtggcaaacttatagaggtaacagtactggaacactcatggtgttcttcggcaacgttgatagctctggcatcaaacacaacatctttaatcctcccataatagctcggtacatcagattgcatccgacccactacagcattaggagtacactccgaatggagcttatgggttgcgacttgaattcctgttcaatgccactcggaatggagtctaaagccatctctgatgcacagataaccgccagtagctactttacgaacatgtttgctacgtggtcaccctctaaggcaaggcttcatttgcaaggccggtctaatgcctggagacctcaggtgaacaacccgaaagaatggctccaggtggactttcagaagaccatgaaagtaacaggtgtcactactcagggagttaagtccttgctcaccagcatgtatgtgaaggagttccttatttcctcatcacaagatggccaccagtggaccctcttctttcagaatggtaaggtcaaagtgtttcagggcaatcaagacagcttcacacccgtggtgaacagtcttgatcctccactcttgacacgataccttcgaatccatccacagtcttgggttcaccagattgcattgcgcatggaagtacttggatgcgaggctcaggacctctac

SEQ ID NO: 190 - protein, 1457 aa, synthetic construct
  REGION 1..1457: note = Variant of human B-domain deleted Factor VIII
MQIELSTCFFLCLLRFCFSATRRYYLGAVELSWDYMQSDLGELPVDARFPPRVPKSFPFNTSVVYKKTLFVEFTDHLFNIAKPRPPWMGLLGPTIQAEVYDTVVITLKNMASHPVSLHAVGVSYWKASEGAEYDDQTSQREKEDDKVFPGGSHTYVWQVLKENGPMASDPLCLTYSYLSHVDLVKDLNSGLIGALLVCREGSLAKEKTQTLHKFILLFAVFDEGKSWHSETKNSLMQDRDAASARAWPKMHTVNGYVNRSLPGLIGCHRKSVYWHVIGMGTTPEVHSIFLEGHTFLVRNHRQASLEISPITFLTAQTLLMDLGQFLLFCHISSHQHDGMEAYVKVDSCPEEPQLRMKNNEEAEDYDDDLTDSEMDVVRFDDDNSPSFIQIRSVAKKHPKTWVHYIAAEEEDWDYAPLVLAPDDRSYKSQYLNNGPQRIGRKYKKVRFMAYTDETFKTREAIQHESGILGPLLYGEVGDTLLIIFKNQASRPYNIYPHGITDVRPLYSRRLPKGVKHLKDFPILPGEIFKYKWTVTVEDGPTKSDPRCLTRYYSSFVNMERDLASGLIGPLLICYKESVDQRGNQIMSDKRNVILFSVFDENRSWYLTENIQRFLPNPAGVQLEDPEFQASNIMHSINGYVFDSLQLSVCLHEVAYWYILSIGAQTDFLSVFFSGYTFKHKMVYEDTLTLFPFSGETVFMSMENPGLWILGCHNSDFRNRGMTALLLVSSCDKNTGDYYEDSYEDISAYLLSKNNAIEPRSFSQNPPVLKRHQREITRTTLQSDQEEIDYDDTISVEMKKEDFDIYDEDENQSPRSFQKKTRHYFIAAVERLWDYGMSSSPHVLRNRAQSGSVPQFKKVVFQEFTDGSFTQPLYRGELNEHLGLLGPYIRAEVEDNIMVTFRNQASRPYSFYSSLISYEEDQRQGAEPRKNFVKPNETKTYFWKVQHHMAPTKDEFDCKAWAYFSDVDLEKDVHSGLIGPLLVCHTNTLNPAHGRQVTVQEFALFFTIFDETKSWYFTENMERNCRAPCNIQMEDPTFKENYRFHAINGYIMDTLPGLVMAQDQRIRWYLLSMGSNENIHSIHFSGHVFTVRKKEEYKMALYNLYPGVFETVEMLPSKAGIWRVECLIGEHLHAGMSTLFLVYSNKCQTPLGMASGHIRDFQITASGQYGQWAPKLARLHYSGSINAWSTKEPFSWIKVDLLAPMIIHGIKTQGARQKFSSLYISQFIIMYSLDGKKWQTYRGNSTGTLMVFFGNVDSSGIKHNIFNPPIIARYIRLHPTHYSIRSTLRMELMGCDLNSCSMPLGMESKAISDAQITASSYFTNMFATWSPSKARLHLQGRSNAWRPQVNNPKEWLQVDFQKTMKVTGVTTQGVKSLLTSMYVKEFLISSSQDGHQWTLFFQNGKVKVFQGNQDSFTPVVNSLDPPLLTRYLRIHPQSWVHQIALRMEVLGCEAQDLY

SEQ ID NO: 191 - DNA, 4371 bp, synthetic construct
  misc_feature 1..4371: note = Variant of human B-domain deleted Factor VIII
  source 1..4371: mol_type = other DNA
atgcagattgaactgtctacctgcttcttcctctgtttgctgaggttctgctttagcgccactagacggtactaccttggcgctgtggagctgtcctgggactatatgcatagtgatttgggagagcttcccgtcgacgcacgatttcctcctcgcgttccaaagtcatttcccttcaacacaagcgtggtgtacaagaagacgctcttcgtcgaattcaccgatcacctgttcaatatcgccaaacccagaccaccatggatgggtcttttggggcctaccatacgcgcggaggtgtatgacacagttgttatcactctcaagaacatggcttctcatccggtaagtcttcacgcagtgggcgtgtcctactggaaagcttcagaaggagccgagtatgatgatcagacatcccagagggagaaagaagacgacaaggtatttccaggtgggtctcatacctatgtgtggcaagtgctcaaagagaatggccctatggcaagcgatccgccgtgtttgacttacagctacctttcacacgttgacctcgtcaaggacctcaactccgggttgattggagccttgttggtatgcagggaaggatctcttgccaaagagaagacacagaccctccacaagtttatccttctctttgctgtgttcgatgagggcaaaagttggcatagcgaaacgaagaattccctcatgcaggatcgcgacgcagccagcgccagagcttggcccaagatgcacactgtgaacggatatgtcaataggtcacttcctggcttgattgggtgtcatcggaaaagtgtctactggcacgtgatcggaatggggacaacaccagaggtccactccatatttctcgaaggccataccttccttgttcgaaaccacagacaggcatccttggagatctctcccattacctttctcactgcccaaacgctccttatggacttgggtcagttccttctcttctgccatatcagctcacaccagcatgatggtatggaagcttatgtgaaagtcgacagttgtcctgaggagccacagttgcgcatgaagaataatgaagaagccgaggattacgacgacgatctcaccgattctgagatggacgtggtgaggtttgatgacgacaactctccctccttcattcaaatccggagcgtggcgaagaaacaccccaagacttgggtccactatatagcggcggaagaggaggattgggattacgctcctcttgtattggcaccagatgaccgctcatacaaaagcctgtacctcaacaacggaccgcagagaattggccggaagtataagaaagtgcgatttatggcctatacagacgaaacctttaagacaagggaggccatccagcatgagagtgggattttgggacctcttctttacggcgaagttggtgataccctcctcatcatcttcaagaatcaagcttctcgcccctataacatttacccacacgggatcactgacgttaggcctttgtatagcagaagacttcccaaaggcgtgaagcatctcaaagacttccccattttgccaggcgagatctttaagtacaaatggaccgtcacagtggaagatggaccgactaaatcagaccctcgatgccttacgcggtactattcctccttcgtgaatatggagagagatttggcaagcggactcataggaccactcctcatctgttacaaggaatctgtagaccagaggggtaaccagattatgagtgataaacgcaatgtgatcctttttagcgtcttcgacgagaaccggtcctggtacttgaccgagaatatacaaaggttccttcccaaccccgcaggcgttcagttggaagaccctgagtttcaggccagcaatattatgcactcaatcaacggctatgtgtttgatagcctccagctttctgtttgcctccatgaagtagcctattggtacatcttgtcaattggtgctcaaacagacttcctctccgtcttcttctccggctacacctttaagcacaagatggtgtatgaggacactctcacactctttccattttctggagaaaccgtgttcatgagcatggagaatccaggcctttggaccttgggttgccacaacagtgattttcgcaatcggggaatgactgctctcctcaaagtcagcagctgtgataagaacacaggcgactattacgaagattcttacgaggacataagtgcctacttgttgtccaagaataacgccattgagcccagatcattctcccagaatcctcccgtgcttaaaaggcatcagcgcgaaatcaccagaactactcttcagtctgatcaagaggagattgactatgacgacacgataagcgtcgaaatgaagcgcgaggatttcgatatctatgacgaagatgagaaccagtctccgcggagctttcagaagaagacgcgacactacttcattgcagcagtcgaaaggctttgggactacggtatgtcatcatcccctcatgtgttgcgcaatagagctcagagtggaagtgttccacagttcaagaaagtcgtctttcaagagtttacagatggcagcttcacacagcctctctatcggggcgagcttaacgaacatttgggactccttggtccctatatccgagccgaagtggaggacaacattatggttacctttaggaatcaagcctctcgcccctacagcttctactcctccctcatcagttatgaggaggatcagagacaaggcgctgaaccacggaagaactttgtgaaaccgaatgagacgaagacctacttctggaaagtacagcaccacatggcccccacaaaagacgaattcgattgcaaagcatgggcgtatttttcagacgttgacttggagaaagatgtacattcaggacttattggtcctttgttggtgtgtcacactaacactctcaatccagcccatggcaggcaggtgacagtccaggaattcgctcttttctttaccatctttgatgagaccaagtcctggtacttcacggaaaacatggagcgcaattgcagagccccctgtaacatacagatggaggaccctacctttaaggaaaattatcggttccacgcaatcaacggatacattatggatacactccctggccttgtgatggctcaggaccaacgaatcaggtggtacctcctcagcatgggttctaatgagaacatacactccattcacttttcaggacatgtgttcactgtccggaagaaagaagagtataagatggccctctacaatttgtatccaggcgtgtttgagaccgttgaaatgcttccctctaaagctggcatctggagagtagagtgcttgatcggagaacatcttcacgcaggtatgagcaccttgttcctcgtgtacagcaacaaatgtcagaacccacttggcatggccagtggacacattcgcgactttcagatcacagcatctggccagtatggacaatgggccccaaagttggctcgcctccattactccggtagcataaatgcgtggtccactaaagaacctttcagctggattaaggtcgatcttcttgcccccatgatcatccacggcattaagacacagggagcgaggcagaaattctcctccctctacatctcacagttcattattatgtatagtttggacggcaagaagtggcaaacttatagaggtaacagtactggaacactcatggtgttcttcggcaacgttgatagctctggcatcaaacacaacatctttaatcctcccataatagctcggtacatcagattgcatccgacccactacagcattaggagtacactccgaatggagcttatgggttgcgacttgaattcctgttcaatgccactcggaatggagtctaaagccatctctgatgcacagataaccgccagtagctactttacgaacatgtttgctacgtggtcaccctctaaggcaaggcttcatttgcaaggccggtctaatgcctggagacctcaggtgaacaacccgaaagaatggctccaggtggactttcagaagaccatgaaagtaacaggtgtcactactcagggagttaagtccttgctcaccagcatgtatgtgaaggagttccttatttcctcatcacaagatggccaccagtggaccctcttctttcagaatggtaaggtcaaagtgtttcagggcaatcaagacagcttcacacccgtggtgaacagtcttgatcctccactcttgacacgataccttcgaatccatccacagtcttgggttcaccagattgcattgcgcatggaagtacttggatgcgaggctcaggacctctac

SEQ ID NO: 192 - protein, 1457 aa, synthetic construct
  REGION 1..1457: note = Variant of human B-domain deleted Factor VIII
MQIELSTCFFLCLLRFCFSATRRYYLGAVELSWDYMHSDLGELPVDARFPPRVPKSFPFNTSVVYKKTLFVEFTDHLFNIAKPRPPWMGLLGPTIRAEVYDTVVITLKNMASHPVSLHAVGVSYWKASEGAEYDDQTSQREKEDDKVFPGGSHTYVWQVLKENGPMASDPPCLTYSYLSHVDLVKDLNSGLIGALLVCREGSLAKEKTQTLHKFILLFAVFDEGKSWHSETKNSLMQDRDAASARAWPKMHTVNGYVNRSLPGLIGCHRKSVYWHVIGMGTTPEVHSIFLEGHTFLVRNHRQASLEISPITFLTAQTLLMDLGQFLLFCHISSHQHDGMEAYVKVDSCPEEPQLRMKNNEEAEDYDDDLTDSEMDVVRFDDDNSPSFIQIRSVAKKHPKTWVHYIAAEEEDWDYAPLVLAPDDRSYKSLYLNNGPQRIGRKYKKVRFMAYTDETFKTREAIQHESGILGPLLYGEVGDTLLIIFKNQASRPYNIYPHGITDVRPLYSRRLPKGVKHLKDFPILPGEIFKYKWTVTVEDGPTKSDPRCLTRYYSSFVNMERDLASGLIGPLLICYKESVDQRGNQIMSDKRNVILFSVFDENRSWYLTENIQRFLPNPAGVQLEDPEFQASNIMHSINGYVFDSLQLSVCLHEVAYWYILSIGAQTDFLSVFFSGYTFKHKMVYEDTLTLFPFSGETVFMSMENPGLWTLGCHNSDFRNRGMTALLKVSSCDKNTGDYYEDSYEDISAYLLSKNNAIEPRSFSQNPPVLKRHQREITRTTLQSDQEEIDYDDTISVEMKREDFDIYDEDENQSPRSFQKKTRHYFIAAVERLWDYGMSSSPHVLRNRAQSGSVPQFKKVVFQEFTDGSFTQPLYRGELNEHLGLLGPYIRAEVEDNIMVTFRNQASRPYSFYSSLISYEEDQRQGAEPRKNFVKPNETKTYFWKVQHHMAPTKDEFDCKAWAYFSDVDLEKDVHSGLIGPLLVCHTNTLNPAHGRQVTVQEFALFFTIFDETKSWYFTENMERNCRAPCNIQMEDPTFKENYRFHAINGYIMDTLPGLVMAQDQRIRWYLLSMGSNENIHSIHFSGHVFTVRKKEEYKMALYNLYPGVFETVEMLPSKAGIWRVECLIGEHLHAGMSTLFLVYSNKCQNPLGMASGHIRDFQITASGQYGQWAPKLARLHYSGSINAWSTKEPFSWIKVDLLAPMIIHGIKTQGARQKFSSLYISQFIIMYSLDGKKWQTYRGNSTGTLMVFFGNVDSSGIKHNIFNPPIIARYIRLHPTHYSIRSTLRMELMGCDLNSCSMPLGMESKAISDAQITASSYFTNMFATWSPSKARLHLQGRSNAWRPQVNNPKEWLQVDFQKTMKVTGVTTQGVKSLLTSMYVKEFLISSSQDGHQWTLFFQNGKVKVFQGNQDSFTPVVNSLDPPLLTRYLRIHPQSWVHQIALRMEVLGCEAQDLY

SEQ ID NO: 193 - DNA, 4371 bp, synthetic construct
  misc_feature 1..4371: note = Variant of human B-domain deleted Factor VIII
  source 1..4371: mol_type = other DNA
atgcagattgaactgtctacctgcttcttcctctgtttgctgaggttctgctttagcgccactagacggtactaccttggcgctgtggagctgtcctgggactatatgcagagtgatttgggagagcttcccgtcgacgcacgatttcctcctcgcgttccaaagtcatttcccttcaacacaagcgtggtgtacaagaagacgctcttcgtcgaattcaccgatcacctgttcaatatcgccaaacccagaccaccatggatgggtcttttggggcctaccatacaagcggaggtgtatgacacagttgttatcactctcaagaacatggcttctcatccggtaagtcttcacgcagtgggcgtgtcctactggaaagcttcagaaggagccgagtatgatgatcagacatcccagagggagaaagaagacgacaaggtatttccaggtgggtctcatacctatgtgtggcaagtgctcaaagagaatggccctatggcaagcgatccgccgtgtttgacttacagctacctttcacacgttgacctcgtcaaggacctcaactccgggttgattggagccttgttggtatgcagggaaggatctcttgccaaagagaagacacagaccctccacaagtttatccttctctttgctgtgttcgatgagggcaaaagttggcatagcgaaacgaagaattccctcatgcaggatcgcgacgcagccagcgccagagcttggcccaagatgcacactgtgaacggatatgtcaataggtcacttcctggcttgattgggtgtcatcggaaaagtgtctactggcacgtgatcggaatggggacaacaccagaggtccactccatatttctcgaaggccataccttccttgttcgaaaccacagacaggcatccttggagatctctcccattacctttctcactgcccaaacgctccttatggacttgggtcagttccttctcttctgccatatcagctcacaccagcatgatggtatggaagcttatgtgaaagtcgacagttgtcctgaggagccacagttgcgcatgaagaataatgaagaagccgaggattacgacgacgatctcaccgattctgagatggacgtggtgaggtttgatgacgacaactctccctccttcattcaaatccggagcgtggcgaagaaacaccccaagacttgggtccactatatagcggcggaagaggaggattgggattacgctcctcttgtattggcaccagatgaccgctcatacaaaagccagtacctcaacaacggaccgcagagaattggccggaagtataagaaagtgcgatttatggcctatacagacgaaacctttaagacaagggaggccatccagcatgagagtgggattttgggacctcttctttacggcgaagttggtgataccctcctcatcatcttcaagaatcaagcttctcgcccctataacatttacccacacgggatcactgacgttaggcctttgtatagcagaagacttcccaaaggcgtgaagcatctcaaagacttccccattttgccaggcgagatctttaagtacaaatggaccgtcacagtggaagatggaccgactaaatcagaccctcgatgccttacgcggtactattcctccttcgtgaatatggagagagatttggcaagcggactcataggaccactcctcatctgttacaaggaatctgtagaccagaggggtaaccagattatgagtgataaacgcaatgtgatcctttttagcgtcttcgacgagaaccggtcctggtacttgaccgagaatatacaaaggttccttcccaaccccgcaggcgttcagttggaagaccctgagtttcaggccagcaatattatgcactcaatcaacggctatgtgtttgatagcctccagctttctgtttgcctccatgaagtagcctattggtacatcttgtcaattggtgctcaaacagacttcctctccgtcttcttctccggctacacctttaagcacaagatggtgtatgaggacactctcacactctttccattttctggagaaaccgtgttcatgagcatggagaatccaggcctttggatcttgggttgccacaacagtgattttcgcaatcggggaatgactgctctcctcaaagtcagcagctgtgataagaacacaggcgactattacgaagattcttacgaggacataagtgcctacttgttgtccaagaataacgccattgagcccagatcattctcccagaatcctcccgtgcttaaaaggcatcagcgcgaaatcaccagaactactcttcagtctgatcaagaggagattgactatgacgacaccataagcgtggaaatgaagaaggaggatttcgatatctatgacgaagatgagaaccagtctccgcggagctttcagaagaagacgcgacactacttcattgcagcagtcgaaaggctttgggactacggtatgtcatcatcccctcatgtgttgcgcaatagagctcagagtggaagtgttccacagttcaagaaagtcgtctttcaagagtttacagatggcagcttcacacagcctctctatcggggcgagcttaacgaacatttgggactccttggtccctatatccgagccgaagtggaggacaacattatggttacctttaggaatcaagcctctcgcccctacagcttctactcctccctcatcagttatgaggaggatcagagacaaggcgctgaaccacggaagaactttgtgaaaccgaatgagacgaagacctacttctggaaagtacagcaccacatggcccccacaaaagacgaattcgattgcaaagcatgggcgtatttttcagacgttgacttggagaaagatgtacattcaggacttattggtcctttgttggtgtgtcacactaacactctcaatccagcccatggcaggcaggtgacagtccaggaattcgctcttttctttaccatctttgatgagaccaagtcctggtacttcacggaaaacatggagcgcaattgcagagccccctgtaacatacagatggaggaccctacctttaaggaaaattatcggttccacgcaatcaacggatacattatggatacactccctggccttgtgatggctcaggaccaacgaatcaggtggtacctcctcagcatgggttctaatgagaacatacactccattcacttttcaggacatgtgttcactgtccggaagaaagaagagtataagatggccctctacaatttgtatccaggcgtgtttgagaccgttgaaatgcttccctctaaagctggcatctggagagtagagtgcttgatcggagaacatcttcacgcaggtatgagcaccttgttcctcgtgtacagcaacaaatgtcagaccccacttggcatggccagtggacacattcgcgactttcagatcacagcatctggccagtatggacaatgggccccaaagttggctcgcctccattactccggtagcataaatgcgtggtccactaaagaacctttcagctggattaaggtcgatcttcttgcccccatgatcatccacggcattaagacacagggagcgaggcagaaattctcctccctctacatctcacagttcattattatgtatagtttggacggcaagaagtggcaaacttatagaggtaacagtactggaacactcatggtgttcttcggcaacgttgatagctctggcatcaaacacaacatctttaatcctcccataatagctcggtacatcagattgcatccgacccactacagcattaggagtacactccgaatggagcttatgggttgcgacttgaattcctgttcaatgccactcggaatggagtctaaagccatctctgatgcacagataaccgccagtagctactttacgaacatgtttgctacgtggtcaccctctaaggcaaggcttcatttgcaaggccggtctaatgcctggagacctcaggtgaacaacccgaaagaatggctccaggtggactttcagaagaccatgaaagtaacaggtgtcactactcagggagttaagtccttgctcaccagcatgtatgtgaaggagttccttatttcctcatcacaagatggccaccagtggaccctcttctttcagaatggtaaggtcaaagtgtttcagggcaatcaagacagcttcacacccgtggtgaacagtcttgatcctccactcttgacacgataccttcgaatccatccacagtcttgggttcaccagattgcattgcgcatggaagtacttggatgcgaggctcaggacctctac

SEQ ID NO: 194 - protein, 1457 aa, synthetic construct
  REGION 1..1457: note = Variant of human B-domain deleted Factor VIII
MQIELSTCFFLCLLRFCFSATRRYYLGAVELSWDYMQSDLGELPVDARFPPRVPKSFPFNTSVVYKKTLFVEFTDHLFNIAKPRPPWMGLLGPTIQAEVYDTVVITLKNMASHPVSLHAVGVSYWKASEGAEYDDQTSQREKEDDKVFPGGSHTYVWQVLKENGPMASDPPCLTYSYLSHVDLVKDLNSGLIGALLVCREGSLAKEKTQTLHKFILLFAVFDEGKSWHSETKNSLMQDRDAASARAWPKMHTVNGYVNRSLPGLIGCHRKSVYWHVIGMGTTPEVHSIFLEGHTFLVRNHRQASLEISPITFLTAQTLLMDLGQFLLFCHISSHQHDGMEAYVKVDSCPEEPQLRMKNNEEAEDYDDDLTDSEMDVVRFDDDNSPSFIQIRSVAKKHPKTWVHYIAAEEEDWDYAPLVLAPDDRSYKSQYLNNGPQRIGRKYKKVRFMAYTDETFKTREAIQHESGILGPLLYGEVGDTLLIIFKNQASRPYNIYPHGITDVRPLYSRRLPKGVKHLKDFPILPGEIFKYKWTVTVEDGPTKSDPRCLTRYYSSFVNMERDLASGLIGPLLICYKESVDQRGNQIMSDKRNVILFSVFDENRSWYLTENIQRFLPNPAGVQLEDPEFQASNIMHSINGYVFDSLQLSVCLHEVAYWYILSIGAQTDFLSVFFSGYTFKHKMVYEDTLTLFPFSGETVFMSMENPGLWILGCHNSDFRNRGMTALLKVSSCDKNTGDYYEDSYEDISAYLLSKNNAIEPRSFSQNPPVLKRHQREITRTTLQSDQEEIDYDDTISVEMKKEDFDIYDEDENQSPRSFQKKTRHYFIAAVERLWDYGMSSSPHVLRNRAQSGSVPQFKKVVFQEFTDGSFTQPLYRGELNEHLGLLGPYIRAEVEDNIMVTFRNQASRPYSFYSSLISYEEDQRQGAEPRKNFVKPNETKTYFWKVQHHMAPTKDEFDCKAWAYFSDVDLEKDVHSGLIGPLLVCHTNTLNPAHGRQVTVQEFALFFTIFDETKSWYFTENMERNCRAPCNIQMEDPTFKENYRFHAINGYIMDTLPGLVMAQDQRIRWYLLSMGSNENIHSIHFSGHVFTVRKKEEYKMALYNLYPGVFETVEMLPSKAGIWRVECLIGEHLHAGMSTLFLVYSNKCQTPLGMASGHIRDFQITASGQYGQWAPKLARLHYSGSINAWSTKEPFSWIKVDLLAPMIIHGIKTQGARQKFSSLYISQFIIMYSLDGKKWQTYRGNSTGTLMVFFGNVDSSGIKHNIFNPPIIARYIRLHPTHYSIRSTLRMELMGCDLNSCSMPLGMESKAISDAQITASSYFTNMFATWSPSKARLHLQGRSNAWRPQVNNPKEWLQVDFQKTMKVTGVTTQGVKSLLTSMYVKEFLISSSQDGHQWTLFFQNGKVKVFQGNQDSFTPVVNSLDPPLLTRYLRIHPQSWVHQIALRMEVLGCEAQDLY

SEQ ID NO: 195 - DNA, 4371 bp, synthetic construct
  misc_feature 1..4371: note = Variant of human B-domain deleted Factor VIII
  source 1..4371: mol_type = other DNA
atgcagattgaactgtctacctgcttcttcctctgtttgctgaggttctgctttagcgccactagacggtactaccttggcgctgtggagctgtcctgggactatatgcagagtgatttgggagagcttcccgtcgacgcacgatttcctcctcgcgttccaaagtcatttcccttcaacacaagcgtggtgtacaagaagacgctcttcgtcgaattcaccgatcacctgttcaatatcgccaaacccagaccaccatggatgggtcttttggggcctaccatacaagcggaggtgtatgacacagttgttatcactctcaagaacatggcttctcatccggtaagtcttcacgcagtgggcgtgtcctactggaaagcttcagaaggagccgagtatgatgatcagacatcccagagggagaaagaagacgacaaggtatttccaggtgggtctcatacctatgtgtggcaagtgctcaaagagaatggccctatggcaagcgatccgccgtgtttgacttacagctacctttcacacgttgacctcgtcaaggacctcaactccgggttgattggagccttgttggtatgcagggaaggatctcttgccaaagagaagacacagaccctccacaagtttatccttctctttgctgtgttcgatgagggcaaaagttggcatagcgaaacgaagaattccctcatgcaggatcgcgacgcagccagcgccagagcttggcccaagatgcacactgtgaacggatatgtcaataggtcacttcctggcttgattgggtgtcatcggaaaagtgtctactggcacgtgatcggaatggggacaacaccagaggtccactccatatttctcgaaggccataccttccttgttcgaaaccacagacaggcatccttggagatctctcccattacctttctcactgcccaaacgctccttatggacttgggtcagttccttctcttctgccatatcagctcacaccagcatgatggtatggaagcttatgtgaaagtcgacagttgtcctgaggagccacagttgcgcatgaagaataatgaagaagccgaggattacgacgacgatctcaccgattctgagatggacgtggtgaggtttgatgacgacaactctccctccttcattcaaatccggagcgtggcgaagaaacaccccaagacttgggtccactatatagcggcggaagaggaggattgggattacgctcctcttgtattggcaccagatgaccgctcatacaaaagcctgtacctcaacaacggaccgcagagaattggccggaagtataagaaagtgcgatttatggcctatacagacgaaacctttaagacaagggaggccatccagcatgagagtgggattttgggacctcttctttacggcgaagttggtgataccctcctcatcatcttcaagaatcaagcttctcgcccctataacatttacccacacgggatcactgacgttaggcctttgtatagcagaagacttcccaaaggcgtgaagcatctcaaagacttccccattttgccaggcgagatctttaagtacaaatggaccgtcacagtggaagatggaccgactaaatcagaccctcgatgccttacgcggtactattcctccttcgtgaatatggagagagatttggcaagcggactcataggaccactcctcatctgttacaaggaatctgtagaccagaggggtaaccagattatgagtgataaacgcaatgtgatcctttttagcgtcttcgacgagaaccggtcctggtacttgaccgagaatatacaaaggttccttcccaaccccgcaggcgttcagttggaagaccctgagtttcaggccagcaatattatgcactcaatcaacggctatgtgtttgatagtctccagctttctgtttgcctccatgaagtagcctattggtacatcttgtcaattggtgctcaaacagacttcctctccgtcttcttctccggctacacctttaagcacaagatggtgtatgaggacactctcacactctttccattttctggagaaaccgtgttcatgagcatggagaatccaggcctttggatcttgggttgccacaacagtgattttcgcaatcggggaatgactgctctcctcaaagtcagcagctgtgatcgcaacacaggcgactattacgaagattcttacgaggacataagtgcctacttgttgtccaagaataacgccattgagcccagatcattctcccagaatcctcccgtgcttaaaaggcatcagcgcgaaatcaccagaactactcttcagtctgatcaagaggagattgactatgacgacaccataagcgtggaaatgaagaaggaggatttcgatatctatgacgaagatgagaaccagtctccgcggagctttcagaagaagacgcgacactacttcattgcagcagtcgaaaggctttgggactacggtatgtcatcatcccctcatgtgttgcgcaatagagctcagagtggaagtgttccacagttcaagaaagtcgtctttcaagagtttacagatggcagcttcacacagcctctctatcggggcgagcttaacgaacatttgggactccttggtccctatatccgagccgaagtggaggacaacattatggttacctttaggaatcaagcctctcgcccctacagcttctactcctccctcatcagttatgaggaggatcagagacaaggcgctgaaccacggaagaactttgtgaaaccgaatgagacgaagacctacttctggaaagtacagcaccacatggcccccacaaaagacgaattcgattgcaaagcatgggcgtatttttcagacgttgacttggagaaagatgtacattcaggacttattggtcctttgttggtgtgtcacactaacactctcaatccagcccatggcaggcaggtgacagtccaggaattcgctcttttctttaccatctttgatgagaccaagtcctggtacttcacggaaaacatggagcgcaattgcagagccccctgtaacatacagatggaggaccctacctttaaggaaaattatcggttccacgcaatcaacggatacattatggatacactccctggccttgtgatggctcaggaccaacgaatcaggtggtacctcctcagcatgggttctaatgagaacatacactccattcacttttcaggacatgtgttcactgtccggaagaaagaagagtataagatggccctctacaatttgtatccaggcgtgtttgagaccgttgaaatgcttccctctaaagctggcatctggagagtagagtgcttgatcggagaacatcttcacgcaggtatgagcaccttgttcctcgtgtacagcaacaaatgtcagaacccacttggcatggccagtggacacattcgcgactttcagatcacagcatctggccagtatggacaatgggccccaaagttggctcgcctccattactccggtagcataaatgcgtggtccactaaagaacctttcagctggattaaggtcgatcttcttgcccccatgatcatccacggcattaagacacagggagcgaggcagaaattctcctccctctacatctcacagttcattattatgtatagtttggacggcaagaagtggcaaacttatagaggtaacagtactggaacactcatggtgttcttcggcaacgttgatagctctggcatcaaacacaacatctttaatcctcccataatagctcggtacatcagattgcatccgacccactacagcattaggagtacactccgaatggagcttatgggttgcgacttgaattcctgttcaatgccactcggaatggagtctaaagccatctctgatgcacagataaccgccagtagctactttacgaacatgtttgctacgtggtcaccctctaaggcaaggcttcatttgcaaggccggtctaatgcctggagacctcaggtgaacaacccgaaagaatggctccaggtggactttcagaagaccatgaaagtaacaggtgtcactactcagggagttaagtccttgctcaccagcatgtatgtgaaggagttccttatttcctcatcacaagatggccaccagtggaccctcttctttcagaatggtaaggtcaaagtgtttcagggcaatcaagacagcttcacacccgtggtgaacagtcttgatcctccactcttgacacgataccttcgaatccatccacagtcttgggttcaccagattgcattgcgcatggaagtacttggatgcgaggctcaggacctctac

SEQ ID NO: 196 - protein, 1457 aa, synthetic construct
  REGION 1..1457: note = Variant of human B-domain deleted Factor VIII
MQIELSTCFFLCLLRFCFSATRRYYLGAVELSWDYMQSDLGELPVDARFPPRVPKSFPFNTSVVYKKTLFVEFTDHLFNIAKPRPPWMGLLGPTIQAEVYDTVVITLKNMASHPVSLHAVGVSYWKASEGAEYDDQTSQREKEDDKVFPGGSHTYVWQVLKENGPMASDPPCLTYSYLSHVDLVKDLNSGLIGALLVCREGSLAKEKTQTLHKFILLFAVFDEGKSWHSETKNSLMQDRDAASARAWPKMHTVNGYVNRSLPGLIGCHRKSVYWHVIGMGTTPEVHSIFLEGHTFLVRNHRQASLEISPITFLTAQTLLMDLGQFLLFCHISSHQHDGMEAYVKVDSCPEEPQLRMKNNEEAEDYDDDLTDSEMDVVRFDDDNSPSFIQIRSVAKKHPKTWVHYIAAEEEDWDYAPLVLAPDDRSYKSLYLNNGPQRIGRKYKKVRFMAYTDETFKTREAIQHESGILGPLLYGEVGDTLLIIFKNQASRPYNIYPHGITDVRPLYSRRLPKGVKHLKDFPILPGEIFKYKWTVTVEDGPTKSDPRCLTRYYSSFVNMERDLASGLIGPLLICYKESVDQRGNQIMSDKRNVILFSVFDENRSWYLTENIQRFLPNPAGVQLEDPEFQASNIMHSINGYVFDSLQLSVCLHEVAYWYILSIGAQTDFLSVFFSGYTFKHKMVYEDTLTLFPFSGETVFMSMENPGLWILGCHNSDFRNRGMTALLKVSSCDRNTGDYYEDSYEDISAYLLSKNNAIEPRSFSQNPPVLKRHQREITRTTLQSDQEEIDYDDTISVEMKKEDFDIYDEDENQSPRSFQKKTRHYFIAAVERLWDYGMSSSPHVLRNRAQSGSVPQFKKVVFQEFTDGSFTQPLYRGELNEHLGLLGPYIRAEVEDNIMVTFRNQASRPYSFYSSLISYEEDQRQGAEPRKNFVKPNETKTYFWKVQHHMAPTKDEFDCKAWAYFSDVDLEKDVHSGLIGPLLVCHTNTLNPAHGRQVTVQEFALFFTIFDETKSWYFTENMERNCRAPCNIQMEDPTFKENYRFHAINGYIMDTLPGLVMAQDQRIRWYLLSMGSNENIHSIHFSGHVFTVRKKEEYKMALYNLYPGVFETVEMLPSKAGIWRVECLIGEHLHAGMSTLFLVYSNKCQNPLGMASGHIRDFQITASGQYGQWAPKLARLHYSGSINAWSTKEPFSWIKVDLLAPMIIHGIKTQGARQKFSSLYISQFIIMYSLDGKKWQTYRGNSTGTLMVFFGNVDSSGIKHNIFNPPIIARYIRLHPTHYSIRSTLRMELMGCDLNSCSMPLGMESKAISDAQITASSYFTNMFATWSPSKARLHLQGRSNAWRPQVNNPKEWLQVDFQKTMKVTGVTTQGVKSLLTSMYVKEFLISSSQDGHQWTLFFQNGKVKVFQGNQDSFTPVVNSLDPPLLTRYLRIHPQSWVHQIALRMEVLGCEAQDLY

SEQ ID NO: 197 - DNA, 4371 bp, synthetic construct
  misc_feature 1..4371: note = Variant of human B-domain deleted Factor VIII
  source 1..4371: mol_type = other DNA
atgcagattgaactgtctacctgcttcttcctctgtttgctgaggttctgctttagcgccactagacggtactaccttggcgctgtggagctgtcctgggactatatgcagagtgatttgggagagcttcccgtcgacgcacgatttcctcctcgcgttccaaagtcatttcccttcaacacaagcgtggtgtacaagaagacgctcttcgtcgaattcaccgatcacctgttcaatatcgccaaacccagaccaccatggatgggtcttttggggcctaccatacgcgcggaggtgtatgacacagttgttatcactctcaagaacatggcttctcatccggtaagtcttcacgcagtgggcgtgtcctactggaaagcttcagaaggagccgagtatgatgatcagacatcccagagggagaaagaagacgacaaggtatttccaggtgggtctcatacctatgtgtggcaagtgctcaaagagaatggccctatggcaagcgatccgccgtgtttgacttacagctacctttcacacgttgacctcgtcaaggacctcaactccgggttgattggagccttgttggtatgcagggaaggatctcttgccaaagagaagacacagaccctccacaagtttatccttctctttgctgtgttcgatgagggcaaaagttggcatagcgaaacgaagaattccctcatgcaggatcgcgacgcagccagcgccagagcttggcccaagatgcacactgtgaacggatatgtcaataggtcacttcctggcttgattgggtgtcatcggaaaagtgtctactggcacgtgatcggaatggggacaacaccagaggtccactccatatttctcgaaggccataccttccttgttcgaaaccacagacaggcatccttggagatctctcccattacctttctcactgcccaaacgctccttatggacttgggtcagttccttctcttctgccatatcagctcacaccagcatgatggtatggaagcttatgtgaaagtcgacagttgtcctgaggagccacagttgcgcatgaagaataatgaagaagccgaggattacgacgacgatctcaccgattctgagatggacgtggtgaggtttgatgacgacaactctccctccttcattcaaatccggagcgtggcgaagaaacaccccaagacttgggtccactatatagcggcggaagaggaggattgggattacgctcctcttgtattggcaccagatgaccgctcatacaaaagccagtacctcaacaacggaccgcagagaattggccggaagtataagaaagtgcgatttatggcctatacagacgaaacctttaagacaagggaggccatccagcatgagagtgggattttgggacctcttctttacggcgaagttggtgataccctcctcatcatcttcaagaatcaagcttctcgcccctataacatttacccacacgggatcactgacgttaggcctttgtatagcagaagacttcccaaaggcgtgaagcatctcaaagacttcccaattttgccaggcgagatctttaagtacaaatggaccgtcacagtggaagatggaccgactaaatcagaccctcgatgccttacgcggtactattcctccttcgtgaatatggagagagatttggcaagcggactcataggaccactcctcatctgttacaaggaatctgtagaccagaggggtaaccagattatgagtgataaacgcaatgtgatcctttttagcgtcttcgacgagaaccggtcctggtacttgaccgagaatatacaaaggttccttcccaaccccgcaggcgttcagttggaagaccctgagtttcaggccagcaatattatgcactcaatcaacggctatgtgtttgatagtctccagctttctgtttgcctccatgaagtagcctattggtacatcttgtcaattggtgctcaaacagacttcctctccgtcttcttctccggctacacctttaagcacaagatggtgtatgaggacactctcacactctttccattttctggagaaaccgtgttcatgagcatggagaatccaggcctttggatcttgggttgccacaacagtgattttcgcaatcggggaatgactgctctcctcaaagtcagcagctgtgataagaacacaggcgactattacgaagattcttacgaggacataagtgcctacttgttgtccaagaataacgccattgagcccagatcattctcccagaatcctcccgtgcttaaaaggcatcagcgcgaaatcaccagaactactcttcagtctgatcaagaggagattgactatgacgacaccataagcgtcgaaatgaagaaggaggatttcgatatctatgacgaagatgagaaccagtctccgcggagctttcagaagaagacgcgacactacttcattgcagcagtcgaaaggctttgggactacggtatgtcatcatcccctcatgtgttgcgcaatagagctcagagtggaagtgttccacagttcaagaaagtcgtctttcaagagtttacagatggcagcttcacacagcctctctatcggggcgagcttaacgaacatttgggactccttggtccctatatccgagccgaagtggaggacaacattatggttacctttaggaatcaagcctctcgcccctacagcttctactcctccctcatcagttatgaggaggatcagagacaaggcgctgaaccacggaagaactttgtgaaaccgaatgagacgaagacctacttctggaaagtacagcaccacatggcccccacaaaagacgaattcgattgcaaagcatgggcgtatttttcagacgttgacttggagaaagatgtacattcaggacttattggtcctttgttggtgtgtcacactaacactctcaatccagcccatggcaggcaggtgacagtccaggaattcgctcttttctttaccatctttgatgagaccaagtcctggtacttcacggaaaacatggagcgcaattgcagagccccctgtaacatacagatggaggaccctacctttaaggaaaattatcggttccacgcaatcaacggatacattatggatacactccctggccttgtgatggctcaggaccaacgaatcaggtggtacctcctcagcatgggttctaatgagaacatacactccattcacttttcaggacatgtgttcactgtccggaagaaagaagagtataagatggccctctacaatttgtatccaggcgtgtttgagaccgttgaaatgcttccctctaaagctggcatctggagagtagagtgcttgatcggagaacatcttcacgcaggtatgagcaccttgttcctcgtgtacagcaacaaatgtcagaccccacttggcatggccagtggacacattcgcgactttcagatcacagcatctggccagtatggacaatgggccccaaagttggctcgcctccattactccggtagcataaatgcgtggtccactaaagaacctttcagctggattaaggtcgatcttcttgcccccatgatcatccacggcattaagacacagggagcgaggcagaaattctcctccctctacatctcacagttcattattatgtatagtttggacggcaagaagtggcaaacttatagaggtaacagtactggaacactcatggtgttcttcggcaacgttgatagctctggcatcaaacacaacatctttaatcctcccataatagctcggtacatcagattgcatccgacccactacagcattaggagtacactccgaatggagcttatgggttgcgacttgaattcctgttcaatgccactcggaatggagtctaaagccatctctgatgcacagataaccgccagtagctactttacgaacatgtttgctacgtggtcaccctctaaggcaaggcttcatttgcaaggccggtctaatgcctggagacctcaggtgaacaacccgaaagaatggctccaggtggactttcagaagaccatgaaagtaacaggtgtcactactcagggagttaagtccttgctcaccagcatgtatgtgaaggagttccttatttcctcatcacaagatggccaccagtggaccctcttctttcagaatggtaaggtcaaagtgtttcagggcaatcaagacagcttcacacccgtggtgaacagtcttgatcctccactcttgacacgataccttcgaatccatccacagtcttgggttcaccagattgcattgcgcatggaagtacttggatgcgaggctcaggacctctac

SEQ ID NO: 198 - protein, 1457 aa, synthetic construct
  REGION 1..1457: note = Variant of human B-domain deleted Factor VIII
MQIELSTCFFLCLLRFCFSATRRYYLGAVELSWDYMQSDLGELPVDARFPPRVPKSFPFNTSVVYKKTLFVEFTDHLFNIAKPRPPWMGLLGPTIRAEVYDTVVITLKNMASHPVSLHAVGVSYWKASEGAEYDDQTSQREKEDDKVFPGGSHTYVWQVLKENGPMASDPPCLTYSYLSHVDLVKDLNSGLIGALLVCREGSLAKEKTQTLHKFILLFAVFDEGKSWHSETKNSLMQDRDAASARAWPKMHTVNGYVNRSLPGLIGCHRKSVYWHVIGMGTTPEVHSIFLEGHTFLVRNHRQASLEISPITFLTAQTLLMDLGQFLLFCHISSHQHDGMEAYVKVDSCPEEPQLRMKNNEEAEDYDDDLTDSEMDVVRFDDDNSPSFIQIRSVAKKHPKTWVHYIAAEEEDWDYAPLVLAPDDRSYKSQYLNNGPQRIGRKYKKVRFMAYTDETFKTREAIQHESGILGPLLYGEVGDTLLIIFKNQASRPYNIYPHGITDVRPLYSRRLPKGVKHLKDFPILPGEIFKYKWTVTVEDGPTKSDPRCLTRYYSSFVNMERDLASGLIGPLLICYKESVDQRGNQIMSDKRNVILFSVFDENRSWYLTENIQRFLPNPAGVQLEDPEFQASNIMHSINGYVFDSLQLSVCLHEVAYWYILSIGAQTDFLSVFFSGYTFKHKMVYEDTLTLFPFSGETVFMSMENPGLWILGCHNSDFRNRGMTALLKVSSCDKNTGDYYEDSYEDISAYLLSKNNAIEPRSFSQNPPVLKRHQREITRTTLQSDQEEIDYDDTISVEMKKEDFDIYDEDENQSPRSFQKKTRHYFIAAVERLWDYGMSSSPHVLRNRAQSGSVPQFKKVVFQEFTDGSFTQPLYRGELNEHLGLLGPYIRAEVEDNIMVTFRNQASRPYSFYSSLISYEEDQRQGAEPRKNFVKPNETKTYFWKVQHHMAPTKDEFDCKAWAYFSDVDLEKDVHSGLIGPLLVCHTNTLNPAHGRQVTVQEFALFFTIFDETKSWYFTENMERNCRAPCNIQMEDPTFKENYRFHAINGYIMDTLPGLVMAQDQRIRWYLLSMGSNENIHSIHFSGHVFTVRKKEEYKMALYNLYPGVFETVEMLPSKAGIWRVECLIGEHLHAGMSTLFLVYSNKCQTPLGMASGHIRDFQITASGQYGQWAPKLARLHYSGSINAWSTKEPFSWIKVDLLAPMIIHGIKTQGARQKFSSLYISQFIIMYSLDGKKWQTYRGNSTGTLMVFFGNVDSSGIKHNIFNPPIIARYIRLHPTHYSIRSTLRMELMGCDLNSCSMPLGMESKAISDAQITASSYFTNMFATWSPSKARLHLQGRSNAWRPQVNNPKEWLQVDFQKTMKVTGVTTQGVKSLLTSMYVKEFLISSSQDGHQWTLFFQNGKVKVFQGNQDSFTPVVNSLDPPLLTRYLRIHPQSWVHQIALRMEVLGCEAQDLY

SEQ ID NO: 199 - DNA, 4371 bp, synthetic construct
  misc_feature 1..4371: note = Variant of human B-domain deleted Factor VIII
  source 1..4371: mol_type = other DNA
atgcagattgaactgtctacctgcttcttcctctgtttgctgaggttctgctttagcgccactagacggtactaccttggcgctgtggagctgtcctgggactatatgcagagtgatttgggagagcttcccgtcgacgcacgatttcctcctcgcgttccaaagtcatttcccttcaacacaagcgtggtgtacaagaagacgctcttcgtcgaattcaccgatcacctgttcaatatcgccaaacccagaccaccatggatgggtcttttggggcctaccatacaagcggaggtgtatgacacagttgttatcactctcaagaacatggcttctcatccggtaagtcttcacgcagtgggcgtgtcctactggaaagcttcagaaggagccgagtatgatgatcagacatcccagagggagaaagaagacgacaaggtatttccaggtgggtctcatacctatgtgtggcaagtgctcaaagagaatggccctatggcaagcgatccgccgtgtttgacttacagctacctttcacacgttgacctcgtcaaggacctcaactccgggttgattggagccttgttggtatgcagggaaggatctcttgccaaagagaagacacagaccctccacaagtttatccttctctttgctgtgttcgatgagggcaaaagttggcatagcgaaacgaagaattccctcatgcaggatcgcgacgcagccagcgccagagcttggcccaagatgcacactgtgaacggatatgtcaataggtcacttcctggcttgattgggtgtcatcggaaaagtgtctactggcacgtgatcggaatggggacaacaccagaggtccactccatatttctcgaaggccataccttccttgttcgaaaccacagacaggcatccttggagatctctcccattacctttctcactgcccaaacgctccttatggacttgggtcagttccttctcttctgccatatcagctcacaccagcatgatggtatggaagcttatgtgaaagtcgacagttgtcctgaggagccacagttgcgcatgaagaataatgaagaagccgaggattacgacgacgatctcaccgattctgagatggacgtggtgaggtttgatgacgacaactctccctccttcattcaaatccggagcgtggcgaagaaacaccccaagacttgggtccactatatagcggcggaagaggaggattgggattacgctcctcttgtattggcaccagatgaccgctcatacaaaagccagtacctcaacaacggaccgcagagaattggccggaagtataagaaagtgcgatttatggcctatacagacgaaacctttaagacaagggaggccatccagcatgagagtgggattttgggacctcttctttacggcgaagttggtgataccctcctcatcatcttcaagaatcaagcttctcgcccctataacatttacccacacgggatcactgacgttaggcctttgtatagcagaagacttcccaaaggcgtgaagcatctcaaagacttccccattttgccaggcgagatctttaagtacaaatggaccgtcacagtggaagatggaccgactaaatcagaccctcgatgccttacgcggtactattcctccttcgtgaatatggagagagatttggcaagcggactcataggaccactcctaatctgttacaaggaatctgtagaccagaggggtaaccagattatgagtgataaacgcaatgtgatcctttttagcgtcttcgacgagaaccggtcctggtacttgaccgagaatatacaaaggttccttcccaaccccgcaggcgttcagttggaagaccctgagtttcaggccagcaatattatgcactcaatcaacggctatgtgtttgatagcctccagctttctgtttgcctccatgaagtagcctattggtacatcttgtcaattggtgctcaaacagacttcctctccgtcttcttctccggctacacctttaagcacaagatggtgtatgaggacactctcacactctttccattttctggagaaaccgtgttcatgagcatggagaatccaggcctttggatcttgggttgccacaacagtgattttcgcaatcggggaatgactgctctcctcaaagtcagcagctgtgataagaacacaggcgactattacgaagattcttacgaggacataagtgcctacttgttgtccaagaataacgccattgagcccagatcattctcccagaatcctcccgtgcttaaaaggcatcagcgcgaaatcaccagaactactcttcagtctgatcaagaggagattgactatgacgacaccataagcgtggaaatgaagaaggaggatttcgatatctatgacgaagatgagaaccagtctccgcggagctttcagaagaagacgcgacactacttcattgcagcagtcgaaaggctttgggactacggtatgtcatcatcccctcatgtgttgcgcaatagagctcagagtggaagtgttccacagttcaagaaagtcgtctttcaagagtttacagatggcagcttcacacagcctctctatcggggcgagcttaacgaacatttgggactccttggtccctatatccgagccgaagtggaggacaacattatggttacctttaggaatcaagcctctcgcccctacagcttctactcctccctcatcagttatgagggggatcagagacaaggcgctgaaccacggaagaactttgtgaaaccgaatgagacgaagacctacttctggaaagtacagcaccacatggcccccacaaaagacgaattcgattgcaaagcatgggcgtatttttcagacgttgacttggagaaagatgtacattcaggacttattggtcctttgttggtgtgtcacactaacactctcaatccagcccatggcaggcaggtgacagtccaggaattcgctcttttctttaccatctttgatgagaccaagtcctggtacttcacggaaaacatggagcgcaattgcagagccccctgtaacatacagatggaggaccctacctttaaggaaaattatcggttccacgcaatcaacggatacattatggatacactccctggccttgtgatggctcaggaccaacgaatcaggtggtacctcctcagcatgggttctaatgagaacatacactccattcacttttcaggacatgtgttcactgtccggaagaaagaagagtataagatggccctctacaatttgtatccaggcgtgtttgagaccgttgaaatgcttccctctaaagctggcatctggagagtagagtgcttgatcggagaacatcttcacgcaggtatgagcaccttgttcctcgtgtacagcaacaaatgtcagaccccacttagcatggccagtggacacattcgcgactttcagatcacagcatctggccagtatggacaatgggccccaaagttggctcgcctccattactccggtagcataaatgcgtggtccactaaagaacctttcagctggattaaggtcgatcttcttgcccccatgatcatccacggcattaagacacagggagcgaggcagaaattctcctccctctacatctcacagttcattattatgtatagtttggacggcaagaagtggcaaacttatagaggtaacagtactggaacactcatggtgttcttcggcaacgttgatagctctggcatcaaacacaacatctttaatcctcccataatagctcggtacatcagattgcatccgacccactacagcattaggagtacactccgaatggagcttatgggttgcgacttgaattcctgttcaatgccactcggaatggagtctaaagccatctctgatgcacagataaccgccagtagctactttacgaacatgtttgctacgtggtcaccctctaaggcaaggcttcatttgcaaggccggtctaatgcctggagacctcaggtgaacaacccgaaagaatggctccaggtggactttcagaagaccatgaaagtaacaggtgtcactactcagggagttaagtccttgctcaccagcatgtatgtgaaggagttccttatttcctcatcacaagatggccaccagtggaccctcttctttcagaatggtaaggtcaaagtgtttcagggcaatcaagacagcttcacacccgtggtgaacagtcttgatcctccactcttgacacgataccttcgaatccatccacagtcttgggttcaccagattgcattgcgcatggaagtacttggatgcgaggctcaggacctctac

SEQ ID NO: 200 - protein, 1457 aa, synthetic construct
  REGION 1..1457: note = Variant of human B-domain deleted Factor VIII
MQIELSTCFFLCLLRFCFSATRRYYLGAVELSWDYMQSDLGELPVDARFPPRVPKSFPFNTSVVYKKTLFVEFTDHLFNIAKPRPPWMGLLGPTIQAEVYDTVVITLKNMASHPVSLHAVGVSYWKASEGAEYDDQTSQREKEDDKVFPGGSHTYVWQVLKENGPMASDPPCLTYSYLSHVDLVKDLNSGLIGALLVCREGSLAKEKTQTLHKFILLFAVFDEGKSWHSETKNSLMQDRDAASARAWPKMHTVNGYVNRSLPGLIGCHRKSVYWHVIGMGTTPEVHSIFLEGHTFLVRNHRQASLEISPITFLTAQTLLMDLGQFLLFCHISSHQHDGMEAYVKVDSCPEEPQLRMKNNEEAEDYDDDLTDSEMDVVRFDDDNSPSFIQIRSVAKKHPKTWVHYIAAEEEDWDYAPLVLAPDDRSYKSQYLNNGPQRIGRKYKKVRFMAYTDETFKTREAIQHESGILGPLLYGEVGDTLLIIFKNQASRPYNIYPHGITDVRPLYSRRLPKGVKHLKDFPILPGEIFKYKWTVTVEDGPTKSDPRCLTRYYSSFVNMERDLASGLIGPLLICYKESVDQRGNQIMSDKRNVILFSVFDENRSWYLTENIQRFLPNPAGVQLEDPEFQASNIMHSINGYVFDSLQLSVCLHEVAYWYILSIGAQTDFLSVFFSGYTFKHKMVYEDTLTLFPFSGETVFMSMENPGLWILGCHNSDFRNRGMTALLKVSSCDKNTGDYYEDSYEDISAYLLSKNNAIEPRSFSQNPPVLKRHQREITRTTLQSDQEEIDYDDTISVEMKKEDFDIYDEDENQSPRSFQKKTRHYFIAAVERLWDYGMSSSPHVLRNRAQSGSVPQFKKVVFQEFTDGSFTQPLYRGELNEHLGLLGPYIRAEVEDNIMVTFRNQASRPYSFYSSLISYEGDQRQGAEPRKNFVKPNETKTYFWKVQHHMAPTKDEFDCKAWAYFSDVDLEKDVHSGLIGPLLVCHTNTLNPAHGRQVTVQEFALFFTIFDETKSWYFTENMERNCRAPCNIQMEDPTFKENYRFHAINGYIMDTLPGLVMAQDQRIRWYLLSMGSNENIHSIHFSGHVFTVRKKEEYKMALYNLYPGVFETVEMLPSKAGIWRVECLIGEHLHAGMSTLFLVYSNKCQTPLSMASGHIRDFQITASGQYGQWAPKLARLHYSGSINAWSTKEPFSWIKVDLLAPMIIHGIKTQGARQKFSSLYISQFIIMYSLDGKKWQTYRGNSTGTLMVFFGNVDSSGIKHNIFNPPIIARYIRLHPTHYSIRSTLRMELMGCDLNSCSMPLGMESKAISDAQITASSYFTNMFATWSPSKARLHLQGRSNAWRPQVNNPKEWLQVDFQKTMKVTGVTTQGVKSLLTSMYVKEFLISSSQDGHQWTLFFQNGKVKVFQGNQDSFTPVVNSLDPPLLTRYLRIHPQSWVHQIALRMEVLGCEAQDLY

SEQ ID NO: 201 - DNA, 4371 bp, synthetic construct
  misc_feature 1..4371: note = Variant of human B-domain deleted Factor VIII
  source 1..4371: mol_type = other DNA
atgcagattgaactgtctacctgcttcttcctctgtttgctgaggttctgctttagcgccactagacggtactaccttggcgctgtggagctgtcctgggactatatgcagagtgatttgggagagcttcccgtcgacgcacgatttcctcctcgcgttccaaagtcatttcccttcaacacaagcgtggtgtacaagaagacgctcttcgtcgaattcaccgatcacctgttcaatatcgccaaacccagaccaccatggatgggtcttttggggcctaccatacaagcggaggtgtatgacacagttgttatcactctcaagaacatggcttctcatccggtaagtcttcacgcagtgggcgtgtcctactggaaagcttcagaaggagccgagtatgatgatcagacatcccagagggagaaagaagacgacaaggtatttccaggtgggtctcatacctatgtgtggcaagtgctcaaagagaatggccctatggcaagcgatccgccgtgtttgacttacagctacctttcacacgttgacctcgtcaaggacctcaactccgggttgattggagccttgttggtatgcagggaaggatctcttgccaaagagaagacacagaccctccacaagtttatccttctctttgctgtgttcgatgagggcaaaagttggcatagcgaaacgaagaattccctcatgcaggatcgcgacgcagccagcgccagagcttggcccaagatgcacactgtgaacggatatgtcaataggtcacttcctggcttgattgggtgtcatcggaaaagtgtctactggcacgtgatcggaatggggacaacaccagaggtccactccatatttctcgaaggccataccttccttgttcgaaaccacagacaggcatccttggagatctctcccattacctttctcactgcccaaacgctccttatggacttgggtcagttccttctcttctgccatatcagctcacaccagcatgatggtatggaagcttatgtgaaagtcgacagttgtcctgaggagccacagttgcgcatgaagaataatgaagaagccgaggattacgacgacgatctcaccgattctgagatggacgtggtgaggtttgatgacgacaactctccctccttcattcaaatccggagcgtggcgaagaaacaccccaagacttgggtccactatatagcggcggaagaggaggattgggattacgctcctcttgtattggcaccagatgaccgctcatacaaaagccagtacctcaacaacggaccgcagagaattggccggaagtataagaaagtgcgatttatggcctatacagacgaaacctttaagacaagggaggccatccagcatgagagtgggattttgggacctcttctttacggcgaagttggtgataccctcctcatcatcttcaagaatcaagcttctcgcccctataacatttacccacacgggatcactgacgttaggcctttgtatagcagaagacttcccaaaggcgtgaagcatctcaaagacttccccattttgccaggcgagatctttaagtacaaatggaccgtcacagtggaagatggaccgactaaatcagaccctcgatgccttacgcggtactattcctccttcgtgaatatggagagagatttggcaagcggactcataggaccactcctcatctgttacaaggaatctgtagaccagaggggtaaccagattatgagtgataaacgcaatgtgatcctttttagcgtcttcgacgagaaccggtcctggtacttgaccgagaatatacaaaggttccttcccaaccccgcaggcgttcagttggaagaccctgagtttcaggccagcaatattatgcactcaatcaacggctatgtgtttgatagtctccagctttctgtttgcctccatgaagtagcctattggtacatcttgtcaattggtgctcaaacagacttcctctccgtcttcttctccggctacacctttaagcacaagatggtgtatgaggacactctcacactctttccattttctggagaaaccgtgttcatgagcatggagaatccaggcctttggatcttgggttgccacaacagtgattttcgcaatcggggaatgactgctctcctcaaagtcagcagctgtgataagaacacaggcgactattacgaagattcttacgaggacataagtgcctacttgttgtccaagaataacgccattgagcccagatcattctcccagaatcctcccgtgcttaaaaggcatcagcgcgaaatcaccagaactactcttcagtctgatcaagaggagattgactatgacgactatataagcgtcgaacaaaagcgcgaggatttcgatatctatgacgaagatgagaaccagtctccgcggagctttcagaagaagacgcgacactacttcattgcagcagtcgaaaggctttgggactacggtatgtcatcatcccctcatgtgttgcgcaatagagctcagagtggaagtgttccacagttcaagaaagtcgtctttcaagagtttacagatggcagcttcacacagcctctctatcggggcgagcttaacgaacatttgggactccttggtccctatatccgagccgaagtggaggacaacattatggttacctttaggaatcaagcctctcgcccctacagcttctactcctccctcatcagttatgaggaggatcagagacaaggcgctgaaccacggaagaactttgtgaaaccgaatgagacgaagacctacttctggaaagtacagcaccacatggcccccacaaaagacgaattcgattgcaaagcatgggcgtatttttcagacgttgacttggagaaagatgtacattcaggacttattggtcctttgttggtgtgtcacactaacactctcaatccagcccatggcaggcaggtgacagtccaggaattcgctcttttctttaccatctttgatgagaccaagtcctggtacttcacggaaaacatggagcgcaattgcagagccccctgtaacatacagatggaggaccctacctttaaggaaaattatcggttccacgcaatcaacggatacattatggatacactccctggccttgtgatggctcaggaccaacgaatcaggtggtacctcctcagcatgggttctaatgagaacatacactccattcacttttcaggacatgtgttcactgtccggaagaaagaagagtataagatggccctctacaatttgtatccaggcgtgtttgagaccgttgaaatgcttccctctaaagctggcatctggagagtagagtgcttgatcggagaacatcttcacgcaggtatgagcaccttgttcctcgtgtacagcaacaaatgtcagaacccacttggcatggccagtggacacattcgcgactttcagatcacagcatctggccagtatggacaatgggccccaaagttggctcgcctccattactccggtagcataaatgcgtggtccactaaagaacctttcagctggattaaggtcgatcttcttgcccccatgatcatccacggcattaagacacagggagcgaggcagaaattctcctccctctacatctcacagttcattattatgtatagtttggacggcaagaagtggcaaacttatagaggtaacagtactggaacactcatggtgttcttcggcaacgttgatagctctggcatcaaacacaacatctttaatcctcccataatagctcggtacatcagattgcatccgacccactacagcattaggagtacactccgaatggagcttatgggttgcgacttgaattcctgttcaatgccactcggaatggagtctaaagccatctctgatgcacagataaccgccagtagctactttacgaacatgtttgctacgtggtcaccctctaaggcaaggcttcatttgcaaggccggtctaatgcctggagacctcaggtgaacaacccgaaagaatggctccaggtggactttcagaagaccatgaaagtaacaggtgtcactactcagggagttaagtccttgctcaccagcatgtatgtgaaggagttccttatttcctcatcacaagatggccaccagtggaccctcttctttcagaatggtaaggtcaaagtgtttcagggcaatcaagacagcttcacacccgtggtgaacagtcttgatcctccactcttgacacgataccttcgaatccatccacagtcttgggttcaccagattgcattgcgcatggaagtacttggatgcgaggctcaggacctctac

SEQ ID NO: 202 - protein, 1457 aa, synthetic construct
  REGION 1..1457: note = Variant of human B-domain deleted Factor VIII
MQIELSTCFFLCLLRFCFSATRRYYLGAVELSWDYMQSDLGELPVDARFPPRVPKSFPFNTSVVYKKTLFVEFTDHLFNIAKPRPPWMGLLGPTIQAEVYDTVVITLKNMASHPVSLHAVGVSYWKASEGAEYDDQTSQREKEDDKVFPGGSHTYVWQVLKENGPMASDPPCLTYSYLSHVDLVKDLNSGLIGALLVCREGSLAKEKTQTLHKFILLFAVFDEGKSWHSETKNSLMQDRDAASARAWPKMHTVNGYVNRSLPGLIGCHRKSVYWHVIGMGTTPEVHSIFLEGHTFLVRNHRQASLEISPITFLTAQTLLMDLGQFLLFCHISSHQHDGMEAYVKVDSCPEEPQLRMKNNEEAEDYDDDLTDSEMDVVRFDDDNSPSFIQIRSVAKKHPKTWVHYIAAEEEDWDYAPLVLAPDDRSYKSQYLNNGPQRIGRKYKKVRFMAYTDETFKTREAIQHESGILGPLLYGEVGDTLLIIFKNQASRPYNIYPHGITDVRPLYSRRLPKGVKHLKDFPILPGEIFKYKWTVTVEDGPTKSDPRCLTRYYSSFVNMERDLASGLIGPLLICYKESVDQRGNQIMSDKRNVILFSVFDENRSWYLTENIQRFLPNPAGVQLEDPEFQASNIMHSINGYVFDSLQLSVCLHEVAYWYILSIGAQTDFLSVFFSGYTFKHKMVYEDTLTLFPFSGETVFMSMENPGLWILGCHNSDFRNRGMTALLKVSSCDKNTGDYYEDSYEDISAYLLSKNNAIEPRSFSQNPPVLKRHQREITRTTLQSDQEEIDYDDYISVEQKREDFDIYDEDENQSPRSFQKKTRHYFIAAVERLWDYGMSSSPHVLRNRAQSGSVPQFKKVVFQEFTDGSFTQPLYRGELNEHLGLLGPYIRAEVEDNIMVTFRNQASRPYSFYSSLISYEEDQRQGAEPRKNFVKPNETKTYFWKVQHHMAPTKDEFDCKAWAYFSDVDLEKDVHSGLIGPLLVCHTNTLNPAHGRQVTVQEFALFFTIFDETKSWYFTENMERNCRAPCNIQMEDPTFKENYRFHAINGYIMDTLPGLVMAQDQRIRWYLLSMGSNENIHSIHFSGHVFTVRKKEEYKMALYNLYPGVFETVEMLPSKAGIWRVECLIGEHLHAGMSTLFLVYSNKCQNPLGMASGHIRDFQITASGQYGQWAPKLARLHYSGSINAWSTKEPFSWIKVDLLAPMIIHGIKTQGARQKFSSLYISQFIIMYSLDGKKWQTYRGNSTGTLMVFFGNVDSSGIKHNIFNPPIIARYIRLHPTHYSIRSTLRMELMGCDLNSCSMPLGMESKAISDAQITASSYFTNMFATWSPSKARLHLQGRSNAWRPQVNNPKEWLQVDFQKTMKVTGVTTQGVKSLLTSMYVKEFLISSSQDGHQWTLFFQNGKVKVFQGNQDSFTPVVNSLDPPLLTRYLRIHPQSWVHQIALRMEVLGCEAQDLY

SEQ ID NO: 203 - DNA, 4371 bp, synthetic construct
  misc_feature 1..4371: note = Variant of human B-domain deleted Factor VIII
  source 1..4371: mol_type = other DNA
atgcagattgaactgtctacctgcttcttcctctgtttgctgaggttctgctttagcgccactagacggtactaccttggcgctgtggagctgtcctgggactatatgcagagtgatttgggagagcttcccgtcgacgcacgatttcctcctcgcgttccaaagtcatttcccttcaacacaagcgtggtgtacaagaagacgctcttcgtcgaattcaccgatcacctgttcaatatcgccaaacccagaccaccatggatgggtcttttggggcctaccatacaagcggaggtgtatgacacagttgttatcactctcaagaacatggcttctcatccggtaagtcttcacgcagtgggcgtgtcctactggaaagcttcagaaggagccgagtatgatgatcagacatcccagagggagaaagaagacgacaaggtatttccaggtgggtctcatacctatgtgtggcaagtgctcaaagagaatggccctatggcaagcgatccgccgtgtttgacttacagctacctttcacacgttgacctcgtcaaggacctcaactccgggttgattggagccttgttggtatgcagggaaggatctcttgccaaagagaagacacagaccctccacaagtttatccttctctttgctgtgttcgatgagggcaaaagttggcatagcgaaacgaagaattccctcatgcaggatcgcgacgcagccagcgccagagcttggcccaagatgcacactgtgaacggatatgtcaataggtcacttcctggcttgattgggtgtcatcggaaaagtgtctactggcacgtgatcggaatggggacaacaccagaggtccactccatatttctcgaaggccataccttccttgttcgaaaccacagacaggcatccttggagatctctcccattacctttctcactgcccaaacgctccttatggacttgggtcagttccttctcttctgccatatcagctcacaccagcatgatggtatggaagcttatgtgaaagtcgacagttgtcctgaggagccacagttgcgcatgaagaataatgaagaagccgaggattacgacgacgatctcaccgattctgagatggacgtggtgaggtttgatgacgacaactctccctccttcattcaaatccggagcgtggcgaagaaacaccccaagacttgggtccactatatagcggcggaagaggaggattgggattacgctcctcttgtattggcaccagatgaccgctcatacaaaagccagtacctcaacaacggaccgcagagaattggccggaagtataagaaagtgcgatttatggcctatacagacgaaacctttaagacaagggaggccatccagcatgagagtgggattttgggacctcttctttacggcgaagttggtgataccctcctcatcatcttcaagaatcaagcttctcgcccctataacatttacccacacgggatcactgacgttaggcctttgtatagcagaagacttcccaaaggcgtgaagcatctcaaagacttccccattttgccaggcgagatctttaagtacaaatggaccgtcacagtggaagatggaccgactaaatcagaccctcgatgccttacgcggtactattcctccttcgtgaatatggagagagatttggcaagcggactcataggaacactcctcatctgttacaaggaatctgtagaccagaggggtaaccagattatgagtgataaacgcaatgtgatcctttttagcgtcttcgacgagaaccggtcctggtacttgaccgagaatatacaaaggttccttcccaaccccgcaggcgttcagttggaagaccctgagtttcaggccagcaatattatgcactcaatcaacggctatgtgtttgatagtctccagctttctgtttgcctccatgaagtagcctattggtacatcttgtcaattggtgctcaaacagacttcctctccgtcttcttctccggctacacctttaagcacaagatggtgtatgaggacactctcacactctttccattttctggagaaaccgtgttcatgagcatggagaatccaggcctttggatcttgggttgccacaacagtgattttcgcaatcggggaatgactgctctcctcaaagtcagcagctgtgataagaacacaggcgactattacgaagattcttacgaggacataagtgcctacttgttgtccaagaataacgccattgagcccagatcattctcccagaatcctcccgtgcttaaaaggcatcagcgcgaaatcaccagaactactcttcagtctgatcaagaggagattgactatgacgacaccataagcgtggaaatgaagaaggaggatttcgatatctatgacgaagatgagaaccagtctccgcggagctttcagaagaagacgcgacactacttcattgcagcagtcgaaaggctttgggactacggtatgtcatcatcccctcatgtgttgcgcaatagagctcagagtggaagtgttccacagttcaagaaagtcgtctttcaagagtttacagatggcagcttcacacagcctctctatcggggcgagcttaacgaacatttgggactccttggtccctatatccgagccgaagtggaggacaacattatggttacctttaggaatcaagcctctcgcccctacagcttctactcctccctcatcagttatgaggaggatcagagacaaggcgctgaaccacggaagaactttgtgaaaccgaatgagacgaagacctacttctggaaagtacagcaccacatggcccccacaaaagacgaattcgattgcaaagcatgggcgtatttttcagacgttgacttggagaaagatgtacattcaggacttattggtcctttgttggtgtgtcacactaacactctcaatccagcccatggcaggcaggtgacagtccaggaattcgctcttttctttaccatctttgatgagaccaagtcctggtacttcacggaaaacatggagcgcaattgcagagccccctgtaacatacagatggaggaccctacctttaaggaaaattatcggttccacgcaatcaacggatacattatggatacactccctggccttgtgatggctcaggaccaacgaatcaggtggtacctcctcagcatgggttctaatgagaacatacactccattcacttttcaggacatgtgttcactgtccgaaagaaagaagagtataagatggccctctacaatttgtatccaggcgtgtttgagaccgttgaaatgcttccctctaaagctggcatctggagagtagagtgcttgatcggagaacatcttcacgcaggtatgagcaccttgttcctcgtgtacagcaacaaatgtcagaacccacttggcatggccagtggacacattcgcgactttcagatcacagcatctggccagtatggacaatgggccccaaagttggctcgcctccattactccggtagcataaatgcgtggtccactaaagaacctttcagctggattaaggtcgatcttcttgcccccatgatcatccacggcattaagacacagggagcgaggcagaaattctcctccctctacatctcacagttcattattatgtatagtttggacggcaagaagtggcaaacttatagaggtaacagtactggaacactcatggtgttcttcggcaacgttgatagctctggcatcaaacacaacatctttaatcctcccataatagctcggtacatcagattgcatccgacccactacagcattaggagtacactccgaatggagcttatgggttgcgacttgaattcctgttcaatgccactcggaatggagtctaaagccatctctgatgcacagataaccgccagtagctactttacgaacatgtttgctacgtggtcaccctctaaggcaaggcttcatttgcaaggccggtctaatgcctggagacctcaggtgaacaacccgaaagaatggctccaggtggactttcagaagaccatgaaagtaacaggtgtcactactcagggagttaagtccttgctaaccagcatgtatgtgaaggagttccttatttcctcatcacaagatggccaccagtggaccctcttctttcagaatggtaaggtcaaagtgtttcagggcaatcaagacagcttcacacccgtggtgaacagtcttgatcctccactcttgacacgataccttcgaatccatccacagtcttgggttcaccagattgcattgcgcatggaagtacttggatgcgaggctcaggacctctac

SEQ ID NO: 204 - protein, 1457 aa, synthetic construct
  REGION 1..1457: note = Variant of human B-domain deleted Factor VIII
MQIELSTCFFLCLLRFCFSATRRYYLGAVELSWDYMQSDLGELPVDARFPPRVPKSFPFNTSVVYKKTLFVEFTDHLFNIAKPRPPWMGLLGPTIQAEVYDTVVITLKNMASHPVSLHAVGVSYWKASEGAEYDDQTSQREKEDDKVFPGGSHTYVWQVLKENGPMASDPPCLTYSYLSHVDLVKDLNSGLIGALLVCREGSLAKEKTQTLHKFILLFAVFDEGKSWHSETKNSLMQDRDAASARAWPKMHTVNGYVNRSLPGLIGCHRKSVYWHVIGMGTTPEVHSIFLEGHTFLVRNHRQASLEISPITFLTAQTLLMDLGQFLLFCHISSHQHDGMEAYVKVDSCPEEPQLRMKNNEEAEDYDDDLTDSEMDVVRFDDDNSPSFIQIRSVAKKHPKTWVHYIAAEEEDWDYAPLVLAPDDRSYKSQYLNNGPQRIGRKYKKVRFMAYTDETFKTREAIQHESGILGPLLYGEVGDTLLIIFKNQASRPYNIYPHGITDVRPLYSRRLPKGVKHLKDFPILPGEIFKYKWTVTVEDGPTKSDPRCLTRYYSSFVNMERDLASGLIGTLLICYKESVDQRGNQIMSDKRNVILFSVFDENRSWYLTENIQRFLPNPAGVQLEDPEFQASNIMHSINGYVFDSLQLSVCLHEVAYWYILSIGAQTDFLSVFFSGYTFKHKMVYEDTLTLFPFSGETVFMSMENPGLWILGCHNSDFRNRGMTALLKVSSCDKNTGDYYEDSYEDISAYLLSKNNAIEPRSFSQNPPVLKRHQREITRTTLQSDQEEIDYDDTISVEMKKEDFDIYDEDENQSPRSFQKKTRHYFIAAVERLWDYGMSSSPHVLRNRAQSGSVPQFKKVVFQEFTDGSFTQPLYRGELNEHLGLLGPYIRAEVEDNIMVTFRNQASRPYSFYSSLISYEEDQRQGAEPRKNFVKPNETKTYFWKVQHHMAPTKDEFDCKAWAYFSDVDLEKDVHSGLIGPLLVCHTNTLNPAHGRQVTVQEFALFFTIFDETKSWYFTENMERNCRAPCNIQMEDPTFKENYRFHAINGYIMDTLPGLVMAQDQRIRWYLLSMGSNENIHSIHFSGHVFTVRKKEEYKMALYNLYPGVFETVEMLPSKAGIWRVECLIGEHLHAGMSTLFLVYSNKCQNPLGMASGHIRDFQITASGQYGQWAPKLARLHYSGSINAWSTKEPFSWIKVDLLAPMIIHGIKTQGARQKFSSLYISQFIIMYSLDGKKWQTYRGNSTGTLMVFFGNVDSSGIKHNIFNPPIIARYIRLHPTHYSIRSTLRMELMGCDLNSCSMPLGMESKAISDAQITASSYFTNMFATWSPSKARLHLQGRSNAWRPQVNNPKEWLQVDFQKTMKVTGVTTQGVKSLLTSMYVKEFLISSSQDGHQWTLFFQNGKVKVFQGNQDSFTPVVNSLDPPLLTRYLRIHPQSWVHQIALRMEVLGCEAQDLY

SEQ ID NO: 205 - DNA, 4371 bp, synthetic construct
  misc_feature 1..4371: note = Variant of human B-domain deleted Factor VIII
  source 1..4371: mol_type = other DNA
atgcagattgaactgtctacctgcttcttcctctgtttgctgaggttctgctttagcgccactagacggtactaccttggcgctgtggagctgtcctgggactatatgcagagtgatttgggagagcttcccgtcgacgcacgatttcctcctcgcgttccaaagtcatttcccttcaacacaagcgtggtgtacaagaagacgctcttcgtcgaattcaccgatcacctgttcaatatcgccaaacccagaccaccatggatgggtcttttggggcctaccatacgcgcggaggtgtatgacacagttgttatcactctcaagaacatggcttctcatccggtaagtcttcacgcagtgggcgtgtcctactggaaagcttcagaaggagccgagtatgatgatcagacatcccagagggagaaagaagacgacaaggtatttccaggtgggtctcatacctatgtgtggcaagtgctcaaagagaatggccctatggcaagcgatccgccgtgtttgacttacagctacctttcacacgttgacctcgtcaaggacctcaactccgggttgattggagccttgttggtatgcagggaaggatctcttgccaaagagaagacacagaccctccacaagtttatccttctctttgctgtgttcgatgagggcaaaagttggcatagcgaaacgaagaattccctcatgcaggatcgcgacgcagccagcgccagagcttggcccaagatgcacactgtgaacggatatgtcaataggtcacttcctggcttgattgggtgtcatcggaaaagtgtctactggcacgtgatcggaatggggacaacaccagaggtccactccatatttctcgaaggccataccttccttgttcgaaaccacagacaggcatccttggagatctctcccattacctttctcactgcccaaacgctccttatggacttgggtcagttccttctcttctgccatatcagctcacaccagcatgatggtatggaagcttatgtgaaagtcgacagttgtcctgaggagccacagttgcgcatgaagaataatgaagaagccgaggattacgacgacgatctcaccgattctgagatggacgtggtgaggtttgatgacgacaactctccctccttcattcaaatccggagcgtggcgaagaaacaccccaagacttgggtccactatatagcggcggaagaggaggattgggattacgctcctcttgtattggcaccagatgaccgctcatacaaaagcctgtacctcaacaacggaccgcagagaattggccggaagtataagaaagtgcgatttatggcctatacagacgaaacctttaagacaagggaggccatccagcatgagagtgggattttgggacctcttctttacggcgaagttggtgataccctcctcatcatcttcaagaatcaagcttctcgcccctataacatttacccacacgggatcactgacgttaggcctttgtatagcagaagacttcccaaaggcgtgaagcatctcaaagacttccccattttgccaggcgagatctttaagtacaaatggaccgtcacagtggaagatggaccgactaaatcagaccctcgatgccttacgcggtactattcctccttcgtgaatatggagagagatttggcaagcggactcataggaccactcctcatctgttacaaggaatctgtagaccagaggggtaaccagattatgagtgataaacgcaatgtgatcctttttagcgtcttcgacgagaaccggtcctggtacttgaccgagaatatacaaaggttccttcccaaccccgcaggcgttcagttggaagaccctgagtttcaggccagcaatattatgcactcaatcaacggctatgtgtttgatagcctccagctttctgtttgcctccatgaagtagcctattggtacatcttgtcaattggtgctcaaacagacttcctctccgtcttcttctccggctacacctttaagcacaagatggtgtatgaggacactctcacactctttccattttctggagaaaccgtgttcatgagcatggagaatccaggcctttggatcttgggttgccacaacagtgattttcgcaatcggggaatgactgctctcctcaaagtcagcagctgtgataagaacacaggcgactattacgaagattcttacgaggacataagtgcctacttgttgtccaagaataacgccattgagcccagatcattctcccagaatcctcccgtgcttaaaaggcatcagcgcgaaatcaccagaactactcttcagtctgatcaagaggagattgactatgacgactatataagcgtcgaaacgaagcgcgaggatttcgatatctatgacgaagatgagaaccagtctccgcggagctttcagaagaagacgcgacactacttcattgcagcagtcgaaaggctttgggactacggtatgtcatcatcccctcatgtgttgcgcaatagagctcagagtggaagtgttccacagttcaagaaagtcgtctttcaagagtttacagatggcagcttcacacagcctctctatcggggcgagcttaacgaacatttgggactccttggtccctatatccgagccgaagtggaggacaacattatggttacctttaggaatcaagcctctcgcccctacagcttctactcctccctcatcagttatgaggaggatcagagacaaggcgctgaaccacggaagaactttgtgaaaccgaatgagacgaagacctacttctggaaagtacagcaccacatggcccccacaaaagacgaattcgattgcaaagcatgggcgtatttttcagacgttgacttggagaaagatgtacattcaggacttattggtcctttgttggtgtgtcacactaacactctcaatccagcccatggcaggcaggtgacagtccaggaattcgctcttttctttaccatctttgatgagaccaagtcctggtacttcacggaaaacatggagcgcaattgcagagccccctgtaacatacagatggaggaccctacctttaaggaaaattatcggttccacgcaatcaacggatacattatggatacactccctggccttgtgatggctcaggaccaacgaatcaggtggtacctcctcagcatgggttctaatgagaacatacactccattcacttttcaggacatgtgttcactgtccggaagaaagaagagtataagatggccctctacaatttgtatccaggcgtgtttgagaccgttgaaatgcttccctctaaagctggcatctggagagtagagtgcttgatcggagaacatcttcacgcaggtatgagcaccttgttcctcgtgtacagcaacaaatgtcagaccccacttggcatggccagtggacacattcgcgactttcagatcacagcatctggccagtatggacaatgggccccaaagttggctcgcctccattactccggtagcataaatgcgtggtccactaaagaacctttcagctggattaaggtcgatcttcttgcccccatgatcatccacggcattaagacacagggagcgaggcagaaattctcctccctctacatctcacagttcattattatgtatagtttggacggcaagaagtggcaaacttatagaggtaacagtactggaacactcatggtgttcttcggcaacgttgatagctctggcatcaaacacaacatctttaatcctcccataatagctcggtacatcagattgcatccgacccactacagcattaggagtacactccgaatggagcttatgggttgcgacttgaattcctgttcaatgccactcggaatggagtctaaagccatctctgatgcacagataaccgccagtagctactttacgaacatgtttgctacgtggtcaccctctaaggcaaggcttcatttgcaaggccggtctaatgcctggagacctcaggtgaacaacccgaaagaatggctccaggtggactttcagaagaccatgaaagtaacaggtgtcactactcagggagttaagtccttgctcaccagcatgtatgtgaaggagttccttatttcctcatcacaagatggccaccagtggaccctcttctttcagaatggtaaggtcaaagtgtttcagggcaatcaagacagcttcacacccgtggtgaacagtcttgatcctccactcttgacacgataccttcgaatccatccacagtcttgggttcaccagattgcattgcgcatggaagtacttggatgcgaggctcaggacctctac

SEQ ID NO: 206 - protein, 1457 aa, synthetic construct
  REGION 1..1457: note = Variant of human B-domain deleted Factor VIII
MQIELSTCFFLCLLRFCFSATRRYYLGAVELSWDYMQSDLGELPVDARFPPRVPKSFPFNTSVVYKKTLFVEFTDHLFNIAKPRPPWMGLLGPTIRAEVYDTVVITLKNMASHPVSLHAVGVSYWKASEGAEYDDQTSQREKEDDKVFPGGSHTYVWQVLKENGPMASDPPCLTYSYLSHVDLVKDLNSGLIGALLVCREGSLAKEKTQTLHKFILLFAVFDEGKSWHSETKNSLMQDRDAASARAWPKMHTVNGYVNRSLPGLIGCHRKSVYWHVIGMGTTPEVHSIFLEGHTFLVRNHRQASLEISPITFLTAQTLLMDLGQFLLFCHISSHQHDGMEAYVKVDSCPEEPQLRMKNNEEAEDYDDDLTDSEMDVVRFDDDNSPSFIQIRSVAKKHPKTWVHYIAAEEEDWDYAPLVLAPDDRSYKSLYLNNGPQRIGRKYKKVRFMAYTDETFKTREAIQHESGILGPLLYGEVGDTLLIIFKNQASRPYNIYPHGITDVRPLYSRRLPKGVKHLKDFPILPGEIFKYKWTVTVEDGPTKSDPRCLTRYYSSFVNMERDLASGLIGPLLICYKESVDQRGNQIMSDKRNVILFSVFDENRSWYLTENIQRFLPNPAGVQLEDPEFQASNIMHSINGYVFDSLQLSVCLHEVAYWYILSIGAQTDFLSVFFSGYTFKHKMVYEDTLTLFPFSGETVFMSMENPGLWILGCHNSDFRNRGMTALLKVSSCDKNTGDYYEDSYEDISAYLLSKNNAIEPRSFSQNPPVLKRHQREITRTTLQSDQEEIDYDDYISVETKREDFDIYDEDENQSPRSFQKKTRHYFIAAVERLWDYGMSSSPHVLRNRAQSGSVPQFKKVVFQEFTDGSFTQPLYRGELNEHLGLLGPYIRAEVEDNIMVTFRNQASRPYSFYSSLISYEEDQRQGAEPRKNFVKPNETKTYFWKVQHHMAPTKDEFDCKAWAYFSDVDLEKDVHSGLIGPLLVCHTNTLNPAHGRQVTVQEFALFFTIFDETKSWYFTENMERNCRAPCNIQMEDPTFKENYRFHAINGYIMDTLPGLVMAQDQRIRWYLLSMGSNENIHSIHFSGHVFTVRKKEEYKMALYNLYPGVFETVEMLPSKAGIWRVECLIGEHLHAGMSTLFLVYSNKCQTPLGMASGHIRDFQITASGQYGQWAPKLARLHYSGSINAWSTKEPFSWIKVDLLAPMIIHGIKTQGARQKFSSLYISQFIIMYSLDGKKWQTYRGNSTGTLMVFFGNVDSSGIKHNIFNPPIIARYIRLHPTHYSIRSTLRMELMGCDLNSCSMPLGMESKAISDAQITASSYFTNMFATWSPSKARLHLQGRSNAWRPQVNNPKEWLQVDFQKTMKVTGVTTQGVKSLLTSMYVKEFLISSSQDGHQWTLFFQNGKVKVFQGNQDSFTPVVNSLDPPLLTRYLRIHPQSWVHQIALRMEVLGCEAQDLY

SEQ ID NO: 207 - DNA, 4371 bp, synthetic construct
  misc_feature 1..4371: note = Variant of human B-domain deleted Factor VIII
  source 1..4371: mol_type = other DNA
atgcagattgaactgtctacctgcttcttcctctgtttgctgaggttctgctttagcgccactagacggtactaccttggcgctgtggagctgtcctgggactatatgcagagtgatttgggagagcttcccgtcgacgcacgatttcctcctcgcgttccaaagtcatttcccttcaacacaagcgtggtgtacaagaagacgctcttcgtcgaattcaccgatcacctgttcaatatcgccaaacccagaccaccatggatgggtcttttggggcctaccatacaagcggaggtgtatgacacagttgttatcactctcaagaacatggcttctcatccggtaagtcttcacgcagtgggcgtgtcctactggaaagcttcagaaggagccgagtatgatgatcagacatcccagagggagaaagaagacgacaaggtatttccaggtgggtctcatacctatgtgtggcaagtgctcaaagagaatggccctatggcaagcgatccgccgtgtttgacttacagctacctttcacacgttgacctcgtcaaggacctcaactccgggttgattggagccttgttggtatgcagggaaggatctcttgccaaagagaagacacagaccctccacaagtttatccttctctttgctgtgttcgatgagggcaaaagttggcatagcgaaacgaagaattccctcatgcaggatcgcgacgcagccagcgccagagcttggcccaagatgcacactgtgaacggatatgtcaataggtcacttcctggcttgattgggtgtcatcggaaaagtgtctactggcacgtgatcggaatggggacaacaccagaggtccactccatatttctcgaaggccataccttccttgttcgaaaccacagacaggcatccttggagatctctcccattacctttctcactgcccaaacgctccttatggacttgggtcagttccttctcttctgccatatcagctcacaccagcatgatggtatggaagcttatgtgaaagtcgacagttgtcctgaggagccacagttgcgcatgaagaataatgaagaagccgaggattacgacgacgatctcaccgattctgagatggacgtggtgaggtttgatgacgacaactctccctccttcattcaaatccggagcgtggcgaagaaacaccccaagacttgggtccactatatagcggcggaagaggaggattgggattacgctcctcttgtattggcaccagatgaccgctcatacaaaagcctgtacctcaacaacggaccgcagagaattggccggaagtataagaaagtgcgatttatggcctatacagacgaaacctttaagacaagggaggccatccagcatgagagtgggattttgggacctcttctttacggcgaagttggtgataccctcctcatcatcttcaagaatcaagcttctcgcccctataacatttacccacacgggatcactgacgttaggcctttgtatagcagaagacttcccaaaggcgtgaagcatctcaaagacttccccattttgccaggcgagatctttaagtacaaatggaccgtcacagtggaagatggaccgactaaatcagaccctcgatgccttacgcggtactattcctccttcgtgaatatggagagagatttggcaagcggactcataggaccactcctcatctgttacaaggaatctgtagaccagaggggtaaccagattatgagtgataaacgcaatgtgatcctttttagcgtcttcgacgagaaccggtcctggtacttgaccgagaatatacaaaggttccttcccaaccccgcaggcgttcagttggaagaccctgagtttcaggccagcaatattatgcactcaatcaacggctatgtgtttgatagtctccagctttctgtttgcctccatgaagtagcctattggtacatcttgtcaattggtgctcaaacagacttcctctccgtcttcttctccggctacacctttaagcacaagatggtgtatgaggacactctcacactctttccattttctggagaaaccgtgttcatgagcatggagaatccaggcctttggaccttgggttgccacaacagtgattttcgcaatcggggaatgactgctctcctcaaagtcagcagctgtgataaaaacacaggcgactattacgaagattcttacgaggacataagtgcctacttgttgtccaagaataacgccattgagcccagatcattctcccagaatcctcccgtgcttaaaaggcatcagcgcgaaatcaccagaactactcttcagtctgatcaagaggagattgactatgacgacaccataagcgtggaaatgaagaaggaggatttcgatatctatgacgaagatgagaaccagtctccgcggagctttcagaagaagacgcgacactacttcattgcagcagtcgaaaggctttgggactacggtatgtcatcatcccctcatgtgttgcgcaatagagctcagagtggaagtgttccacagttcaagaaagtcgtctttcaagagtttacagatggcagcttcacacagcctctctatcggggcgagcttaacgaacatttgggactccttggtccctatatccgagccgaagtggaggacaacattatggttacctttaggaatcaagcctctcgcccctacagcttctactcctccctcatcagttatgaggaggatcagagacaaggcgctgaaccacggaagaactttgtgaaaccgaatgagacgaagacctacttctggaaagtacagcaccacatggcccccacaaaagacgaattcgattgcaaagcatgggcgtatttttcagacgttgacttggagaaagatgtacattcaggacttattggtcctttgttggtgtgtcacactaacactctcaatccagcccatggcaggcaggtgacagtacaggaattcgctcttttctttaccatctttgatgagaccaagtcctggtacttcacggaaaacatggagcgcaattgcagagccccctgtaacatacagatggaggaccctacctttaaggaaaattatcggttccacgcaatcaacggatacattatggatacactccctggccttgtgatggctcaggaccaacgaatcaggtggtacctcctcagcatgggttctaatgagaacatacactccattcacttttcaggacatgtgttcactgtccggaagaaagaagagtataagatggccctctacaatttgtatccaggcgtgtttgagaccgttgaaatgcttccctctaaagctggcatctggagagtagagtgcttgatcggagaacatcttcacgcaggtatgagcaccttgttcctcgtgtacagcaacaaatgtcagaccccacttggcatggccagtggacacattcgcgactttcagatcacagcatctggccagtatggacaatgggccccaaagttggctcgcctccattactccggtagcataaatgcgtggtccactaaagaacctttcagctggattaaggtcgatcttcttgcccccatgatcatccacggcattaagacacagggagcgaggcagaaattctcctccctctacatctcacagttcattattatgtatagtttggacggcaagaagtggcaaacttatagaggtaacagtactggaacactcatggtgttcttcggcaacgttgatagctctggcatcaaacacaacatctttaatcctcccataatagctcggtacatcagattgcatccgacccactacagcattaggagtacactccgaatggagcttatgggttgcgacttgaattcctgttcaatgccactcggaatggagtctaaagccatctctgatgcacagataaccgccagtagctactttacgaacatgtttgctacgtggtcaccctctaaggcaaggcttcatttgcaaggccggtctaatgcctggagacctcaggtgaacaacccgaaagaatggctccaggtggactttcagaagaccatgaaagtaacaggtgtcactactcagggagttaagtccttgctcaccagcatgtatgtgaaggagttccttatttcctcatcacaagatggccaccagtggaccctcttctttcagaatggtaaggtcaaagtgtttcagggcaatcaagacagcttcacacccgtggtgaacagtattgatcctccactcttgacacgataccttcgaatccatccacagtcttgggttcaccagattgcattgcgcatggaagtacttggatgcgaggctcaggacctctac

SEQ ID NO: 208 - protein, 1457 aa, synthetic construct
  REGION 1..1457: note = Variant of human B-domain deleted Factor VIII
MQIELSTCFFLCLLRFCFSATRRYYLGAVELSWDYMQSDLGELPVDARFPPRVPKSFPFNTSVVYKKTLFVEFTDHLFNIAKPRPPWMGLLGPTIQAEVYDTVVITLKNMASHPVSLHAVGVSYWKASEGAEYDDQTSQREKEDDKVFPGGSHTYVWQVLKENGPMASDPPCLTYSYLSHVDLVKDLNSGLIGALLVCREGSLAKEKTQTLHKFILLFAVFDEGKSWHSETKNSLMQDRDAASARAWPKMHTVNGYVNRSLPGLIGCHRKSVYWHVIGMGTTPEVHSIFLEGHTFLVRNHRQASLEISPITFLTAQTLLMDLGQFLLFCHISSHQHDGMEAYVKVDSCPEEPQLRMKNNEEAEDYDDDLTDSEMDVVRFDDDNSPSFIQIRSVAKKHPKTWVHYIAAEEEDWDYAPLVLAPDDRSYKSLYLNNGPQRIGRKYKKVRFMAYTDETFKTREAIQHESGILGPLLYGEVGDTLLIIFKNQASRPYNIYPHGITDVRPLYSRRLPKGVKHLKDFPILPGEIFKYKWTVTVEDGPTKSDPRCLTRYYSSFVNMERDLASGLIGPLLICYKESVDQRGNQIMSDKRNVILFSVFDENRSWYLTENIQRFLPNPAGVQLEDPEFQASNIMHSINGYVFDSLQLSVCLHEVAYWYILSIGAQTDFLSVFFSGYTFKHKMVYEDTLTLFPFSGETVFMSMENPGLWTLGCHNSDFRNRGMTALLKVSSCDKNTGDYYEDSYEDISAYLLSKNNAIEPRSFSQNPPVLKRHQREITRTTLQSDQEEIDYDDTISVEMKKEDFDIYDEDENQSPRSFQKKTRHYFIAAVERLWDYGMSSSPHVLRNRAQSGSVPQFKKVVFQEFTDGSFTQPLYRGELNEHLGLLGPYIRAEVEDNIMVTFRNQASRPYSFYSSLISYEEDQRQGAEPRKNFVKPNETKTYFWKVQHHMAPTKDEFDCKAWAYFSDVDLEKDVHSGLIGPLLVCHTNTLNPAHGRQVTVQEFALFFTIFDETKSWYFTENMERNCRAPCNIQMEDPTFKENYRFHAINGYIMDTLPGLVMAQDQRIRWYLLSMGSNENIHSIHFSGHVFTVRKKEEYKMALYNLYPGVFETVEMLPSKAGIWRVECLIGEHLHAGMSTLFLVYSNKCQTPLGMASGHIRDFQITASGQYGQWAPKLARLHYSGSINAWSTKEPFSWIKVDLLAPMIIHGIKTQGARQKFSSLYISQFIIMYSLDGKKWQTYRGNSTGTLMVFFGNVDSSGIKHNIFNPPIIARYIRLHPTHYSIRSTLRMELMGCDLNSCSMPLGMESKAISDAQITASSYFTNMFATWSPSKARLHLQGRSNAWRPQVNNPKEWLQVDFQKTMKVTGVTTQGVKSLLTSMYVKEFLISSSQDGHQWTLFFQNGKVKVFQGNQDSFTPVVNSIDPPLLTRYLRIHPQSWVHQIALRMEVLGCEAQDLY

SEQ ID NO: 209 - DNA, 4371 bp, synthetic construct
  misc_feature 1..4371: note = Variant of human B-domain deleted Factor VIII
  source 1..4371: mol_type = other DNA
atgcagattgaactgtctacctgcttcttcctctgtttgctgaggttctgctttagcgccactagacggtactaccttggcgctgtggagctgtcctgggactatatgcagagtgatttgggagagcttcccgtcgacgcacgatttcctcctcgcgttccaaagtcatttcccttcaacacaagcgtggtgtacaagaagacgctcttcgtcgaattcaccgatcacctgttcaatatcgccaaacccagaccaccatggatgggtcttttggggcctaccatacaagcggaggtgtatgacacagttgttatcactctcaagaacatggcttctcatccggtaagtcttcacgcagtgggcgtgtcctactggaaagcttcagaaggagccgagtatgatgatcagacatcccagagggagaaagaagacgacaaggtatttccaggtgggtctcatacctatgtgtggcaagtgctcaaagagaatggccctatggcaagcgatccgccgtgtttgacttacagctacctttcacacgttgacctcgtcaaggacctcaactccgggttgattggagccttgttggtatgcagggaaggatctcttgccaaagagaagacacagaccctccacaagtttatccttctctttgctgtgttcgatgagggcaaaagttggcatagcgaaacgaagaattccctcatgcaggatcgcgacgcagccagcgccagagcttggcccaagatgcacactgtgaacggatatgtcaataggtcacttcctggcttgattgggtgtcatcggaaaagtgtctactggcacgtgatcggaatggggacaacaccagaggtccactccatatttctcgaaggccataccttccttgttcgaaaccacagacaggcatccttggagatctctcccattacctttctcactgcccaaacgctccttatggacttgggtcagttccttctcttctgccatatcagctcacaccagcatgatggtatggaagcttatgtgaaagtcgacagttgtcctgaggagccacagttgcgcatgaagaataatgaagaagccgaggattacgacgacgatctcaccgattctgagatggacgtggtgaggtttgatgacgacaactctccctccttcattcaaatccggagcgtggcgaagaaacaccccaagacttgggtccactatatagcggcggaagaggaggattgggattacgctcctcttgtattggcaccagatgaccgctcatacaaaagcctgtacctcaacaacggaccgcagagaattggccggaagtataagaaagtgcgatttatggcctatacagacgaaacctttaagacaagggaggccatccagcatgagagtgggattttgggacctcttctttacggcgaagttggtgataccctcctcatcatcttcaagaatcaagcttctcgcccctataacatttacccacacgggatcactgacgttaggcctttgtatagcagaagacttcccaaaggcgtgaagcatctcaaagacttccccattttgccaggcgagatctttaagtacaaatggaccgtcacagtggaagatggaccgactaaatcagaccctcgatgccttacgcggtactattcctccttcgtgaatatggagagagatttggcaagcggactcataggaccactcctcatctgttacaaggaatctgtagaccagaggggtaaccagattatgagtgataaacgcaatgtgatcctttttagcgtcttcgacgagaaccggtcctggtacttgaccgagaatatacaaaggttccttcccaaccccgcaggcgttcagttggaagaccctgagtttcaggccagcaatattatgcactcaatcaacggctatgtgtttgatagtctccagctttctgtttgcctccatgaagtagcctattggtacatcttgtcaattggtgctcaaacagacttcctctccgtcttcttctccggctacacctttaagcacaagatggtgtatgaggacactctcacactctttccattttctggagaaaccgtgttcatgagcatggagaatccaggcctttggatcttgggttgccacaacagtgattttcgcaatcggggaatgactgctctcctcaaagtcagcagctgtgataagaacacaggcgactattacgaagattcttacgaggacataagtgcctacttgttgtccaagaataacgccattgagcccagatcattctcccagaatcctcccgtgcttaaaaggcatcagcgcgaaatcaccagaactactcttcagtctgatcaagaggagattgactatgacgacaccataagcgtggaaatgaagaaggaggatttcgatatctatgacgaagatgagaaccagtctccgcggagctttcagaagaagacgcgacactacttcattgcagcagtcgaaaggctttgggactacggtatgtcatcatcccctcatgtgttgcgcaatagagctcagagtggaagtgttccacagttcaagaaagtcgtctttcaagagtttacagatggcagcttcacacagcctctctatcggggcgagcttaacgaacatttgggactccttggtccctatatccgagccgaagtggaggacaacattatggttacctttaggaatcaagcctctcgcccctacagcttctactcctccctcatcagttatgaggaggatcagagacaaggcgctgaaccacggaagaactttgtgaaaccgaatgagacgaagacctacttctggaaagtacagcaccacatggcccccacaaaagacgaattcgattgcaaagcatgggcgtatttttcagacgttgacttggagaaagatgtacattcaggacttattggtcctttgttggtgtgtcacactaacactctcaatccagcccatggcaggcaggtgacagtccaggaattcgctcttttctttaccatctttgatgagaccaagtcctggtacttcacggaaaacatggagcgcaattgcagagccccctgtaacatacagatggaggaccctacctttaaggaaaattatcggttccacgcaatcaacggatacattatggatacactccctggccttgtgatggctcaggaccaacgaatcaggtggtacctcctcagcatgggttctaatgagaacatacactccattcacttttcaggacatgtgttcactgtccggaagaaagaagagtataagatggccctctacaatttgtatccaggcgtgtttgagaccgttgaaatgcttccctctaaagctggcatctggagagtagagtgcttgatcggagaacatcttcacgcaggtatgagcaccttgttcctcgtgtacagcaacaaatgtcagaccccacttggcatggccagtggacacattcgcgactttcagatcacagcatctggccagtatggacaatgggccccaaagttggctcgcctccattactccggtagcataaatgcgtggtccactaaagaacctttcagctggattaaggtcgatcttcttgcccccatgatcatccacggcattaagacacagggagcgaggcagaaattctcctccctctacatctcacagttcattattatgtatagtttggacggcaagaagtggcaaacttatagaggtaacagtactggaacactcatggtgttcttcggcaacgttgatagctctggcatcaaacacaacatctttaatcctcccataatagctcggtacatcagattgcatccgacccactacagcattaggagtacactccgaatggagcttatgggttgcgacttgaattcctgttcaatgccactcggaatggagtctaaagccatctctgatgcacagataaccgccagtagctactttacgaacatgtttgctacgtggtcaccctctaaggcaaggcttcatttgcaaggccggtctaatgcctggagacctcaggtgaacaacccgaaagaatggctccaggtggactttcagaagaccatgaaagtaacaggtgtcactactcagggagttaagtccttgctcaccagcatgtatgtgaaggagttccttatttcctcatcacaagatggccaccagtggaccctcttctttcagaatggtaaggtcaaagtgtttcagggcaatcaagacagcttcacacccgtggtgaacagtcttgatcctccactcttgacacgataccttcgaatccatccacagtcttgggttcaccagattgcattgcgcatggaagtacttggatgcgaggctcaggacctctac

SEQ ID NO: 210 - protein, 1457 aa, synthetic construct
  REGION 1..1457: note = Variant of human B-domain deleted Factor VIII
MQIELSTCFFLCLLRFCFSATRRYYLGAVELSWDYMQSDLGELPVDARFPPRVPKSFPFNTSVVYKKTLFVEFTDHLFNIAKPRPPWMGLLGPTIQAEVYDTVVITLKNMASHPVSLHAVGVSYWKASEGAEYDDQTSQREKEDDKVFPGGSHTYVWQVLKENGPMASDPPCLTYSYLSHVDLVKDLNSGLIGALLVCREGSLAKEKTQTLHKFILLFAVFDEGKSWHSETKNSLMQDRDAASARAWPKMHTVNGYVNRSLPGLIGCHRKSVYWHVIGMGTTPEVHSIFLEGHTFLVRNHRQASLEISPITFLTAQTLLMDLGQFLLFCHISSHQHDGMEAYVKVDSCPEEPQLRMKNNEEAEDYDDDLTDSEMDVVRFDDDNSPSFIQIRSVAKKHPKTWVHYIAAEEEDWDYAPLVLAPDDRSYKSLYLNNGPQRIGRKYKKVRFMAYTDETFKTREAIQHESGILGPLLYGEVGDTLLIIFKNQASRPYNIYPHGITDVRPLYSRRLPKGVKHLKDFPILPGEIFKYKWTVTVEDGPTKSDPRCLTRYYSSFVNMERDLASGLIGPLLICYKESVDQRGNQIMSDKRNVILFSVFDENRSWYLTENIQRFLPNPAGVQLEDPEFQASNIMHSINGYVFDSLQLSVCLHEVAYWYILSIGAQTDFLSVFFSGYTFKHKMVYEDTLTLFPFSGETVFMSMENPGLWILGCHNSDFRNRGMTALLKVSSCDKNTGDYYEDSYEDISAYLLSKNNAIEPRSFSQNPPVLKRHQREITRTTLQSDQEEIDYDDTISVEMKKEDFDIYDEDENQSPRSFQKKTRHYFIAAVERLWDYGMSSSPHVLRNRAQSGSVPQFKKVVFQEFTDGSFTQPLYRGELNEHLGLLGPYIRAEVEDNIMVTFRNQASRPYSFYSSLISYEEDQRQGAEPRKNFVKPNETKTYFWKVQHHMAPTKDEFDCKAWAYFSDVDLEKDVHSGLIGPLLVCHTNTLNPAHGRQVTVQEFALFFTIFDETKSWYFTENMERNCRAPCNIQMEDPTFKENYRFHAINGYIMDTLPGLVMAQDQRIRWYLLSMGSNENIHSIHFSGHVFTVRKKEEYKMALYNLYPGVFETVEMLPSKAGIWRVECLIGEHLHAGMSTLFLVYSNKCQTPLGMASGHIRDFQITASGQYGQWAPKLARLHYSGSINAWSTKEPFSWIKVDLLAPMIIHGIKTQGARQKFSSLYISQFIIMYSLDGKKWQTYRGNSTGTLMVFFGNVDSSGIKHNIFNPPIIARYIRLHPTHYSIRSTLRMELMGCDLNSCSMPLGMESKAISDAQITASSYFTNMFATWSPSKARLHLQGRSNAWRPQVNNPKEWLQVDFQKTMKVTGVTTQGVKSLLTSMYVKEFLISSSQDGHQWTLFFQNGKVKVFQGNQDSFTPVVNSLDPPLLTRYLRIHPQSWVHQIALRMEVLGCEAQDLY

SEQ ID NO: 211 - DNA, 4371 bp, synthetic construct
  misc_feature 1..4371: note = Variant of human B-domain deleted Factor VIII
  source 1..4371: mol_type = other DNA
atgcagattgaactgtctacctgcttcttcctctgtttgctgaggttctgctttagcgccactagacggtactaccttggcgctgtggagctgtcctgggactatatgcagagtgatttgggagagcttcccgtcgacgcacgatttcctcctcgcgttccaaagtcatttcccttcaacacaagcgtggtgtacaagaagacgctcttcgtcgaattcaccgatcacctgttcaatatcgccaaacccagaccaccatggatgggtcttttggggcctaccatacaagcggaggtgtatgacacagttgttatcactctcaagaacatggcttctcatccggtaagtcttcacgcagtgggcgtgtcctactggaaagcttcagaaggagccgagtatgatgatcagacatcccagagggagaaagaagacgacaaggtatttccaggtgggtctcatacctatgtgtggcaagtgctcaaagagaatggccctatggcaagcgatccgctctgtttgacttacagctacctttcacacgttgacctcgtcaaggacctcaactccgggttgattggagccttgttggtatgcagggaaggatctcttgccaaagagaagacacagaccctccacaagtttatccttctctttgctgtgttcgatgagggcaaaagttggcatagcgaaacgaagaattccctcatgcaggatcgcgacgcagccagcgccagagcttggcccaagatgcacactgtgaacggatatgtcaataggtcacttcctggcttgattgggtgtcatcggaaaagtgtctactggcacgtgatcggaatgggtacaacaccagaggtccactccatatttctcgaaggccataccttccttgttcgaaaccacagacaggcatccttggagatctctcccattacctttctcactgcccaaacgctccttatgtacttgggtcagttccttctcttctgccatatcagctcacaccagcatgatggtatggaagcttatgtgaaagtcgacagttgtcctgaggagccacagttgcgcatgaagaataatgaagaaccagaggattacgacgacgatctcaccgattctgagatggacgtggtgaggtttgatgacgacaactctccctccttcattcaaatccggagcgtggcgaagaaacaccccaagacttgggtccactatatagcggcggaagaggaggattgggattacgctcctcttgtattggcaccagatgaccgctcatacaaaagccagtacctcaacaacggaccgcagagaattggccggaagtataagaaagtgcgatttatggcctatacagacgaaacctttaagacaagggaggccatccagcatgagagtgggattttgggacctcttctttacggcgaagttggtgataccctcctcatcatcttcaagaatcaagcttctcgcccctataacatttacccacacgggatcactgacgttaggcctttgtatagcagaagacttcccaaaggcgtgaagcatctcaaagacttccccattttgccaggcgagatctttaagtacaaatggaccgtcacagtggaagatggaccgactaaatcagaccctcgatgccttacgcggtactattcctccttcgtgaatatggagagagatttggcaagcggactcataggaccactcctcatctgttacaaggaatctgtagaccagaggggtaaccagattatgagtgataaacgcaatgtgatcctttttagcgtcttcgacgagaaccggtcctggtacttgaccgagaatatacaaaggttccttcccaaccccgcaggcgttcagttggaagaccctgagtttcaggccagcaatattatgcactcaatcaacggctatgtgtttgatagtctccagctttctgtttgcctccatgaagtagcctattggtacatcttgtcaattggtgctcaaacagacttcctctccgtcttcttctccggctacacctttaagcacaagatggtgtatgaggacactctcacactctttccattttctggagaaaccgtgttcatgagcatggagaatccaggcctttggatcttgggttgccacaacagtgattttcgcaatcggggaatgactgctctcctcaaagtcagcagctgtgatgaaaacacaggcgactattacgaagattcttacgaggacataagtgcctacttgttgtccaagaataacgccattgagcccagatcattctcccagaatcctcccgtgcttaaaaggcatcagcgcgaaatcaccagaactactcttcagtctgatcaagaggagattgactatgacgacacgataagcgtcgaaacgaagcgcgaggatttcgatatctatgacgaagatgagaaccagtctccgcggagctttcagaagaagacgcgacactacttcattgcagcagtcgaaaggctttgggactacggtatgtcatcatcccctcatgtgttgcgcaatagagctcagagtggaagtgttccacagttcaagaaagtcgtctttcaagagtttacagatggcagcttcacacagcctctctatcggggcgagcttaacgaacatttgggactccttggtccctatatccgagccgaagtggaggacaacattatggttacctttaggaatcaagcctctcgcccctacagcttctactcctccctcatcagttatgaggaggatcagagacaaggcgctgaaccacggaagaactttgtgaaaccgaatgagacgaagacctacttctggaaagtacagcaccacatggcccccacaaaagacgaattcgattgcaaagcatgggcgtatttttcagacgttgacttggagaaagatgtacattcaggacttattggtcctttgttggtgtgtcacactaacactctcaatccagcccatggcaggcaggtgacagtccaggaattcgctcttttctttaccatctttgatgagaccaagtcctggtacttcacggaaaacatggagcgcaattgcagagccccctgtaacatacagatggaggaccctacctttaaggaaaattatcggttccacgcaatcaacggatacattatggatacactccctggccttgtgatggctcaggaccaacgaatcaggtggtacctcctcagcatgggttctaatgagaacatacactccattcacttttcaggacatgtgttcactgtccggaagaaagaagagtataagatggccctctacaatttgtatccaggcgtgtttgagaccgttgaaatgcttccctctaaagctggcatctggagagtagagtgcttgatcggagaacatcttcacgcaggtatgagcaccttgttcctcgtgtacagcaacaaatgtcagaccccacttggcatggccagtggacacattcgcgactttcagatcacagcatctggccagtatggacaatgggccccaaagttggctcgcctccattactccggtagcataaatgcgtggtccactaaagaacctttcagctggattaaggtcgatcttcttgcccccatgatcatccacggcattaagacacagggagcgaggcagaaattctcctccctctacatctcacagttcattattatgtatagtttggacggcaagaagtggcaaacttatagaggtaacagtactggaacactcatggtgttcttcggcaacgttgatagctctggcatcaaacacaacatctttaatcctcccataatagctcggtacatcagattgcatccgacccactacagcattaggagtacactccgaatggagcttatgggttgcgacttgaattcctgttcaatgccactcggaatggagtctaaagccatctctgatgcacagataaccgccagtagctactttacgaacatgtttgctacgtggtcaccctctaaggcaaggcttcatttgcaaggccggtctaatgcctggagacctcaggtgaacaacccgaaagaatggctccaggtggactttcagaagaccatgaaagtaacaggtgtcactactcagggagttaagtccttgctcaccagcatgtatgtgaaggagttccttatttcctcatcacaagatggccaccagtggaccctcttctttcagaatggtaaggtcaaagtgtttcagggcaatcaagacagcttcacacccgtggtgaacagtcttgatcctccactcttgacacgataccttcgaatccatccacagtcttgggttcaccagattgcattgcgcatggaagtacttggatgcgaggctcaggacctctac

SEQ ID NO: 212 - protein, 1457 aa, synthetic construct
  REGION 1..1457: note = Variant of human B-domain deleted Factor VIII
MQIELSTCFFLCLLRFCFSATRRYYLGAVELSWDYMQSDLGELPVDARFPPRVPKSFPFNTSVVYKKTLFVEFTDHLFNIAKPRPPWMGLLGPTIQAEVYDTVVITLKNMASHPVSLHAVGVSYWKASEGAEYDDQTSQREKEDDKVFPGGSHTYVWQVLKENGPMASDPLCLTYSYLSHVDLVKDLNSGLIGALLVCREGSLAKEKTQTLHKFILLFAVFDEGKSWHSETKNSLMQDRDAASARAWPKMHTVNGYVNRSLPGLIGCHRKSVYWHVIGMGTTPEVHSIFLEGHTFLVRNHRQASLEISPITFLTAQTLLMYLGQFLLFCHISSHQHDGMEAYVKVDSCPEEPQLRMKNNEEPEDYDDDLTDSEMDVVRFDDDNSPSFIQIRSVAKKHPKTWVHYIAAEEEDWDYAPLVLAPDDRSYKSQYLNNGPQRIGRKYKKVRFMAYTDETFKTREAIQHESGILGPLLYGEVGDTLLIIFKNQASRPYNIYPHGITDVRPLYSRRLPKGVKHLKDFPILPGEIFKYKWTVTVEDGPTKSDPRCLTRYYSSFVNMERDLASGLIGPLLICYKESVDQRGNQIMSDKRNVILFSVFDENRSWYLTENIQRFLPNPAGVQLEDPEFQASNIMHSINGYVFDSLQLSVCLHEVAYWYILSIGAQTDFLSVFFSGYTFKHKMVYEDTLTLFPFSGETVFMSMENPGLWILGCHNSDFRNRGMTALLKVSSCDENTGDYYEDSYEDISAYLLSKNNAIEPRSFSQNPPVLKRHQREITRTTLQSDQEEIDYDDTISVETKREDFDIYDEDENQSPRSFQKKTRHYFIAAVERLWDYGMSSSPHVLRNRAQSGSVPQFKKVVFQEFTDGSFTQPLYRGELNEHLGLLGPYIRAEVEDNIMVTFRNQASRPYSFYSSLISYEEDQRQGAEPRKNFVKPNETKTYFWKVQHHMAPTKDEFDCKAWAYFSDVDLEKDVHSGLIGPLLVCHTNTLNPAHGRQVTVQEFALFFTIFDETKSWYFTENMERNCRAPCNIQMEDPTFKENYRFHAINGYIMDTLPGLVMAQDQRIRWYLLSMGSNENIHSIHFSGHVFTVRKKEEYKMALYNLYPGVFETVEMLPSKAGIWRVECLIGEHLHAGMSTLFLVYSNKCQTPLGMASGHIRDFQITASGQYGQWAPKLARLHYSGSINAWSTKEPFSWIKVDLLAPMIIHGIKTQGARQKFSSLYISQFIIMYSLDGKKWQTYRGNSTGTLMVFFGNVDSSGIKHNIFNPPIIARYIRLHPTHYSIRSTLRMELMGCDLNSCSMPLGMESKAISDAQITASSYFTNMFATWSPSKARLHLQGRSNAWRPQVNNPKEWLQVDFQKTMKVTGVTTQGVKSLLTSMYVKEFLISSSQDGHQWTLFFQNGKVKVFQGNQDSFTPVVNSLDPPLLTRYLRIHPQSWVHQIALRMEVLGCEAQDLY

SEQ ID NO: 213 - DNA, 4371 bp, synthetic construct
  misc_feature 1..4371: note = Variant of human B-domain deleted Factor VIII
  source 1..4371: mol_type = other DNA
atgcagattgaactgtctacctgcttcttcctctgtttgctgaggttctgctttagcgccactagacggtactaccttggcgctgtggagctgtcctgggactatatgcagagtgatttgggagagcttcccgtcgacgcacgatttcctcctcgcgttccaaagtcatttcccttcaacacaagcgtggtgtacaagaagacgctcttcgtcgaattcaccgatcacctgttcaatatcgccaaacccagaccaccatggatgggtcttttggggcctaccatacaagcggaggtgtatgacacagttgttatcactctcaagaacatggcttctcatccggtaagtcttcacgcagtgggcgtgtcctactggaaagcttcagaaggagccgagtatgatgatcagacatcccagagggagaaagaagacgacaaggtatttccaggtgggtctcatacctatgtgtggcaagtgctcaaagagaatggccctatggcaagcgatccgccgtgtttgacttacagctacctttcacacgttgacctcgtcaaggacctcaactccgggttgattggagccttgttggtatgcagggaaggatctcttgccaaagagaagacacagaccctccacaagtttatccttctctttgctgtgttcgatgagggcaaaagttggcatagcgaaacgaagaattccctcatgcaggatcgcgacgcagccagcgccagagcttggcccaagatgcacactgtgaacggatatgtcaataggtcacttcctggcttgattgggtgtcatcggaaaagtgtctactggcacgtgatcggaatggggacaacaccagaggtccactccatatttctcgaaggccataccttccttgttcgaaaccacagacaggcatccttggagatctctcccattacctttctcactgcccaaacgctccttatggacttgggtcagttccttctcttctgccatatcagctcacaccagcatgatggtatggaagcttatgtgaaagtcgacagttgtcctgaggagccacagttgcgcatgaagaataatgaagaagccgaggattacgacgacgatctcaccgattctgagatggacgtggtgaggtttgatgacgacaactctccctccttcattcaaatccggagcgtggcgaagaaacaccccaagacttgggtccactatatagcggcggaagaggaggattgggattacgctcctcttgtattggcaccagatgaccgctcatacaaaagccagtacctcaacaacggaccgcagagaattggccggaagtataagaaagtgcgatttatggcctatacagacgaaacctttaagacaagggaggccatccagcatgagagtgggattttgggacctcttctttacggcgaagttggtgataccctcctcatcatcttcaagaatcaagcttctcgcccctataacatttacccacacgggatcactgacgttaggcctttgtatagcagaagacttcccaaaggcgtgaagcatctcaaagacttccccattttgccaggcgagatctttaagtacaaatggaccgtcacagtggaagatggaccgactaaatcagaccctcgatgccttacgcggtactattcctccttcgtgaatatggagagagatttggcaagcggactcataggaccactcctcatctgttacaaggaatctgtagaccagaggggtaaccagattatgagtgataaacgcaatgtgatcctttttagcgtcttcgacgagaaccggtcctggtacttgaccgagaatatacaaaggttccttcccaaccccgcaggcgttcagttggaagaccctgagtttcaggccagcaatattatgcactcaatcaacggctatgtgtttgatagtctccagctttctgtttgcctccatgaagtagcctattggtacatcttgtcaattggtgctcaaacagacttcctctccgtcttcttctccggctacacctttaagcacaagatggtgtatgaggacactctcacactctttccattttctggagaaaccgtgttcatgagcatggagaatccaggcctttggatcttgggttgccacaacagtgattttcgcaatcggggaatgactgctctcctcaaagtcagcagctgtgataagaacacaggcgactattacgaagattcttacgaggacataagtgcctacttgttgtccaagaataacgccattgagcccagatcattctcccagaatcctcccgtgcttaaaaggcatcagcgcgaaatcaccagaactactcttcagtctgatcaagaggagattgactatgacgacaccataagcgtggaaatgaagaaggaggatttcgatatctatgacgaagatgagaaccagtctccgcggagctttcagaagaagacgcgacactacttcattgcagcagtcgaaaggctttgggactacggtatgtcatcatcccctcatgtgttgcgcaatagagctcagagtggaagtgttccacagttcaagaaagtcgtctttcaagagtttacagatggcagcttcacacagcctctctatcggggcgagcttaacgaacatttgggactccttggtccctatatccgagccgaagtggaggacaacattatggttacctttaggaatcaagcctctcgcccctacagcttctactcctccctcatcagttatgaggaggatcagagacaaggcgctgaaccacggaagaactttgtgaaaccgaatgagacgaagacctacttctggaaagtacagcaccacatggcccccacaaaagacgaattcgattgcaaagcatgggcgtatttttcagacgttgacttggagaaagatgtacattcaggacttattggtcctttgttggtgtgtcacactaacactctcaatccagcccatggcaggcaggtgacagtccaggaattcgctcttttctttaccatctttgatgagaccaagtcctggtacttcacggaaaacatggagcgcaattgcagagccccctgtaacatacagatggaggaccctacctttaaggaaaattatcggttccacgcaatcaacggatacattatggatacactccctggccttgtgatggctcaggaccaacgaatcaggtggtacctcctcagcatgggttctaatgagaacatacactccattcacttttcaggacatgtgttcactgtccggaagaaagaagagtataagatggccatctacaatttgtatccaggcgtgtttgagaccgttgaaatgcttccctctaaagctggcatctggagagtagagtgcttgatcggagaacatcttcacgcaggtatgagcaccttgttcctcgtgtacagcaacaaatgtcagaccccacttggcatggccagtggacacattcgcgactttcagatcacagcatctggccagtatggacaatgggccccaaagttggctcgcctccattactccggtagcataaatgcgtggtccactaaagaacctttcagctggattaaggtcgatcttcttgcccccatgatcatccacggcattaagacacagggagcgaggcagaaattctcctccctctacatctcacagttcattattatgtatagtttggacggcaagaagtggcaaacttatagaggtaacagtactggaacactcatggtgttcttcggcaacgttgatagctctggcatcaaacacaacatctttaatcctcccataatagctcggtacatcagattgcatccgacccactacagcattaggagtacactccgaatggagcttatgggttgcgacttgaattcctgttcaatgccactcggaatggagtctaaagccatctctgatgcacagataaccgccagtagctactttacgaacatgtttgctacgtggtcaccctctaaggcaaggcttcatttgcaaggccggtctaatgcctggagacctcaggtgaacaacccgaaagaatggctccaggtggactttcagaagaccatgaaagtaacaggtgtcactactcagggagttaagtccttgctcaccagcatgtatgtgaaggagttccttatttcctcatcacaagatggccaccagtggaccctcttctttcagaatggtaaggtcaaagtgtttcagggcaatcaagacagcttcacacccgtggtgaacagtcttgatcctccactcttgacacgataccttcgaatccatccacagtcttgggttcaccagattgcattgcgcatggaagtacttggatgcgaggctcaggacctctac

SEQ ID NO: 214 - protein, 1457 aa, synthetic construct
  REGION 1..1457: note = Variant of human B-domain deleted Factor VIII
MQIELSTCFFLCLLRFCFSATRRYYLGAVELSWDYMQSDLGELPVDARFPPRVPKSFPFNTSVVYKKTLFVEFTDHLFNIAKPRPPWMGLLGPTIQAEVYDTVVITLKNMASHPVSLHAVGVSYWKASEGAEYDDQTSQREKEDDKVFPGGSHTYVWQVLKENGPMASDPPCLTYSYLSHVDLVKDLNSGLIGALLVCREGSLAKEKTQTLHKFILLFAVFDEGKSWHSETKNSLMQDRDAASARAWPKMHTVNGYVNRSLPGLIGCHRKSVYWHVIGMGTTPEVHSIFLEGHTFLVRNHRQASLEISPITFLTAQTLLMDLGQFLLFCHISSHQHDGMEAYVKVDSCPEEPQLRMKNNEEAEDYDDDLTDSEMDVVRFDDDNSPSFIQIRSVAKKHPKTWVHYIAAEEEDWDYAPLVLAPDDRSYKSQYLNNGPQRIGRKYKKVRFMAYTDETFKTREAIQHESGILGPLLYGEVGDTLLIIFKNQASRPYNIYPHGITDVRPLYSRRLPKGVKHLKDFPILPGEIFKYKWTVTVEDGPTKSDPRCLTRYYSSFVNMERDLASGLIGPLLICYKESVDQRGNQIMSDKRNVILFSVFDENRSWYLTENIQRFLPNPAGVQLEDPEFQASNIMHSINGYVFDSLQLSVCLHEVAYWYILSIGAQTDFLSVFFSGYTFKHKMVYEDTLTLFPFSGETVFMSMENPGLWILGCHNSDFRNRGMTALLKVSSCDKNTGDYYEDSYEDISAYLLSKNNAIEPRSFSQNPPVLKRHQREITRTTLQSDQEEIDYDDTISVEMKKEDFDIYDEDENQSPRSFQKKTRHYFIAAVERLWDYGMSSSPHVLRNRAQSGSVPQFKKVVFQEFTDGSFTQPLYRGELNEHLGLLGPYIRAEVEDNIMVTFRNQASRPYSFYSSLISYEEDQRQGAEPRKNFVKPNETKTYFWKVQHHMAPTKDEFDCKAWAYFSDVDLEKDVHSGLIGPLLVCHTNTLNPAHGRQVTVQEFALFFTIFDETKSWYFTENMERNCRAPCNIQMEDPTFKENYRFHAINGYIMDTLPGLVMAQDQRIRWYLLSMGSNENIHSIHFSGHVFTVRKKEEYKMAIYNLYPGVFETVEMLPSKAGIWRVECLIGEHLHAGMSTLFLVYSNKCQTPLGMASGHIRDFQITASGQYGQWAPKLARLHYSGSINAWSTKEPFSWIKVDLLAPMIIHGIKTQGARQKFSSLYISQFIIMYSLDGKKWQTYRGNSTGTLMVFFGNVDSSGIKHNIFNPPIIARYIRLHPTHYSIRSTLRMELMGCDLNSCSMPLGMESKAISDAQITASSYFTNMFATWSPSKARLHLQGRSNAWRPQVNNPKEWLQVDFQKTMKVTGVTTQGVKSLLTSMYVKEFLISSSQDGHQWTLFFQNGKVKVFQGNQDSFTPVVNSLDPPLLTRYLRIHPQSWVHQIALRMEVLGCEAQDLY

SEQ ID NO: 215 - DNA, 4371 bp, synthetic construct
  misc_feature 1..4371: note = Variant of human B-domain deleted Factor VIII
  source 1..4371: mol_type = other DNA
atgcagattgaactgtctacctgcttcttcctctgtttgctgaggttctgctttagcgccactagacggtactaccttggcgctgtggagctgtcctgggactatatgcagagtgatttgggagagcttcccgtcgacgcacgatttcctcctcgcgttccaaagtcatttcccttcaacacaagcgtggtgtacaagaagacgctcttcgtcgaattcaccgatcacctgttcaatatcgccaaacccagaccaccatggatgggtcttttggggcctaccatacaagcggaggtgtatgacacagttgttatcactctcaagaacatggcttctcatccggtaagtcttcacgcagtgggcgtgtcctactggaaagcttcagaaggagccgagtatgatgatcagacatcccagagggagaaagaagacgacaaggtatttccaggtgggtctcatacctatgtgtggcaagtgctcaaagagaatggccctatggcaagcgatccgctctgtttgacttacagctacctttcacacgttgacctcgtcaaggacctcaactccgggttgattggagccttgttggtatgcagggaaggatctcttgccaaagagaagacacagaccctccacaagtttatccttctctttgctgtgttcgatgagggcaaaagttggcatagcgaaacgaagaattccctcatgcaggatcgcgacgcagccagcgccagagcttggcccaagatgcacactgtgaacggatatgtcaataggtcacttcctggcttgattgggtgtcatcggaaaagtgtctactggcacgtgatcggaatggggacaacaccagaggtccactccatatttctcgaaggccataccttccttgttcgaaaccacagacaggcatccttggagatctctcccattacctttctcactgcccaaacgctccttatggacttgggtcagttccttctcttctgccatatcagctcacaccagcatgatggtatggaagcttatgtgaaagtcgacagttgtcctgaggagccacagttgcgcatgaagaataatgaagaagccgaggattacgacgacgatctcaccgattctgagatggacgtggtgaggtttgatgacgacaactctccctccttcattcaaatccggagcgtggcgaagaaacaccccaagacttgggtccactatatagcggcggaagaggaggattgggattacgctcctcttgtattggcaccagatgaccgctcatacaaaagccagtacctcaacaacggaccgcagagaattggccggaagtataagaaagtgcgatttatggcctatacagacgaaacctttaagacaagggaggccatccagcatgagagtgggattttgggacctcttctttacggcgaagttggtgataccctcctcatcatcttcaagaatcaagcttctcgcccctataacatttacccacacgggatcactgacgttaggcctttgtatagcagaagacttcccaaaggcgtgaagcatctcaaagacttccccattttgccaggcgagatctttaagtacaaatggaccgtcacagtggaagatggaccgactaaatcagaccctcgatgccttacgcggtactattcctccttcgtgaatatggagagagatttggcaagcggactaataggaccactcctcatctgttacaaggaatctgtagaccagaggggtaaccagattatgagtgataaacgcaatgtgatcctttttagcgtcttcgacgagaaccggtcctggtacttgaccgagaatatacaaaggttccttcccaaccccgcaggcgttcagttggaagaccctgagtttcaggccagcaatattatgcactcaatcaacggctatgtgtttgatagtctccagctttctgtttgcctccatgaagtagcctattggtacatcttgtcaattggtgctcaaacagacttcctctccgtcttcttctccggctacacctttaagcacaagatggtgtatgaggacactctcacactctttccattttctggagaaaccgtgttcatgagcatggagaatccaggcctttggaccttgggttgccacaacagtgattttcgcaatcggggaatgactgctctcctcaaagtcagcagctgtgataagaacacaggcgactattacgaagattcttacgaggacataagtgcctacttgttgtccaagaataacgccattgagcccagatcattctcccagaatcctcccgtgcttaaaaggcatcagcgcgaaatcaccagaactactcttcagtctgatcaagaggagattgactatgacgacaccataagcgtggaaatgaagaaggaggatttcgatatctatgacgaagatgagaaccagtctccgcggagctttcagaagaagacgcgacactacttcattgcagcagtcgaaaggctttgggactacggtatgtcatcatcccctcatgtgttgcgcaatagagctcagagtggaagtgttccacagttcaagaaagtcgtctttcaagagtttacagatggcagcttcacacagcctctctatcggggcgagcttaacgaacatttgggactccttggtccctatatccgagccgaagtggaggacaacattatggttacctttaggaatcaagcctctcgcccctacagcttctactcctccctcatcagttatgaggaggatcagagacaaggcgctgaaccacggaagaactttgtgaaaccgaatgagacgaagacctacttctggaaagtacagcaccacatggcccccacaaaagacgaattcgattgcaaagcatgggcgtatttttcagacgttgacttggagaaagatgtacattcaggacttattggtcctttgttggtgtgtcacactaacactctcaatccagcccatggcaggcaggtgacagtccaggaattcgctcttttctttaccatctttgatgagaccaagtcctggtacttcacggaaaacatggagcgcaattgcagagccccctgtaacatacagatggaggaccctacctttaaggaaaattatcggttccacgcaatcaacggatacattatggatacactccctggccttgtgatggctcaggaccaacgaatcaggtggtacctcctcagcatgggttctaatgagaacatacactccattcacttttcaggacatgtgttcactgtccggaagaaagaagagtataagatggccctctacaatttgtatccaggcgtgtttgagaccgttgaaatgcttccctctaaagctggcatctggagagtagagtgcttgatcggagaacatcttcacgcaggtatgagcaccttgttcctcgtgtacagcaacaaatgtcagaacccacttggcatggccagtggacacattcgcgactttcagatcacagcatctggccagtatggacaatgggccccaaagttggctcgcctccattactccggtagcataaatgagtggtccactaaagaacctttcagctggattaaggtcgatcttcttgcccccatgatcatccacggcattaagacacagggagcgaggcagaaattctcctccctctacatctcacagttcattattatgtatagtttggacggcaagaagtggcaaacttatagaggtaacagtactggaacactcatggtgttcttcggcaacgttgatagctctggcatcaaacacaacatctttaatcctcccataatagctcggtacatcagattgcatccgacccactacagcattaggagtacactccgaatggagcttatgggttgcgacttgaattcctgttcaatgccactcggaatggagtctaaagccatctctgatgcacagataaccgccagtagctactttacgaacatgtttgctacgtggtcaccctctaaggcaaggcttcatttgcaaggccggtctaatgcctggagacctcaggtgaacaacccgaaagaatggctccaggtggactttcagaagaccatgaaagtaacaggtgtcactactcagggagttaagtccttgctcaccagcatgtatgtgaaggagttccttatttcctcatcacaagatggccaccagtggaccctcttctttcagaatggtaaggtcaaagtgtttcagggcaatcaagacagcttcacacccgtggtgaacagtcttgatcctccactcttgacacgataccttcgaatccatccacagtcttgggttcaccagattgcattgcgcatggaagtacttggatgcgaggctcaggacctctac

SEQ ID NO: 216 - protein, 1457 aa, synthetic construct
  REGION 1..1457: note = Variant of human B-domain deleted Factor VIII
MQIELSTCFFLCLLRFCFSATRRYYLGAVELSWDYMQSDLGELPVDARFPPRVPKSFPFNTSVVYKKTLFVEFTDHLFNIAKPRPPWMGLLGPTIQAEVYDTVVITLKNMASHPVSLHAVGVSYWKASEGAEYDDQTSQREKEDDKVFPGGSHTYVWQVLKENGPMASDPLCLTYSYLSHVDLVKDLNSGLIGALLVCREGSLAKEKTQTLHKFILLFAVFDEGKSWHSETKNSLMQDRDAASARAWPKMHTVNGYVNRSLPGLIGCHRKSVYWHVIGMGTTPEVHSIFLEGHTFLVRNHRQASLEISPITFLTAQTLLMDLGQFLLFCHISSHQHDGMEAYVKVDSCPEEPQLRMKNNEEAEDYDDDLTDSEMDVVRFDDDNSPSFIQIRSVAKKHPKTWVHYIAAEEEDWDYAPLVLAPDDRSYKSQYLNNGPQRIGRKYKKVRFMAYTDETFKTREAIQHESGILGPLLYGEVGDTLLIIFKNQASRPYNIYPHGITDVRPLYSRRLPKGVKHLKDFPILPGEIFKYKWTVTVEDGPTKSDPRCLTRYYSSFVNMERDLASGLIGPLLICYKESVDQRGNQIMSDKRNVILFSVFDENRSWYLTENIQRFLPNPAGVQLEDPEFQASNIMHSINGYVFDSLQLSVCLHEVAYWYILSIGAQTDFLSVFFSGYTFKHKMVYEDTLTLFPFSGETVFMSMENPGLWTLGCHNSDFRNRGMTALLKVSSCDKNTGDYYEDSYEDISAYLLSKNNAIEPRSFSQNPPVLKRHQREITRTTLQSDQEEIDYDDTISVEMKKEDFDIYDEDENQSPRSFQKKTRHYFIAAVERLWDYGMSSSPHVLRNRAQSGSVPQFKKVVFQEFTDGSFTQPLYRGELNEHLGLLGPYIRAEVEDNIMVTFRNQASRPYSFYSSLISYEEDQRQGAEPRKNFVKPNETKTYFWKVQHHMAPTKDEFDCKAWAYFSDVDLEKDVHSGLIGPLLVCHTNTLNPAHGRQVTVQEFALFFTIFDETKSWYFTENMERNCRAPCNIQMEDPTFKENYRFHAINGYIMDTLPGLVMAQDQRIRWYLLSMGSNENIHSIHFSGHVFTVRKKEEYKMALYNLYPGVFETVEMLPSKAGIWRVECLIGEHLHAGMSTLFLVYSNKCQNPLGMASGHIRDFQITASGQYGQWAPKLARLHYSGSINEWSTKEPFSWIKVDLLAPMIIHGIKTQGARQKFSSLYISQFIIMYSLDGKKWQTYRGNSTGTLMVFFGNVDSSGIKHNIFNPPIIARYIRLHPTHYSIRSTLRMELMGCDLNSCSMPLGMESKAISDAQITASSYFTNMFATWSPSKARLHLQGRSNAWRPQVNNPKEWLQVDFQKTMKVTGVTTQGVKSLLTSMYVKEFLISSSQDGHQWTLFFQNGKVKVFQGNQDSFTPVVNSLDPPLLTRYLRIHPQSWVHQIALRMEVLGCEAQDLY

SEQ ID NO: 217 - DNA, 4371 bp, synthetic construct
  misc_feature 1..4371: note = Variant of human B-domain deleted Factor VIII
  source 1..4371: mol_type = other DNA
atgcagattgaactgtctacctgcttcttcctctgtttgctgaggttctgctttagcgccactagacggtactaccttggcgctgtggagctgtcctgggactatatgcagagtgatttgggagagcttcccgtcgacgcacgatttcctcctcgcgttccaaagtcatttcccttcaacacaagcgtggtgtacaagaagacgctcttcgtcgaattcaccgatcacctgttcaatatcgccaaacccagaccaccatggatgggtcttttggggcctaccatacaagcggaggtgtatgacacagttgttatcactctcaagaacatggcttctcatccggtaagtcttcacgcagtgggcgtgtcctactggaaagcttcagaaggagccgagtatgatgatcagacatcccagagggagaaagaagacgacaaggtatttccaggtgggtctcatacctatgtgtggcaagtgctcaaagagaatggccctatggcaagcgatccgctctgtttgacttacagctacctttcacacgttgacctcgtcaaggacctcaactccgggttgattggagccttgttggtatgcagggaaggatctcttgccaaagagaagacacagaccctccacaagtttatccttctctttgctgtgttcgatgagggcaaaagttggcatagcgaaacgaagaattccctcatgcaggatcgcgacgcagccagcgccagagcttggcccaagatgcacactgtgaacggatatgtcaataggtcacttcctggcttgattgggtgtcatcggaaaagtgtctactggcacgtgatcggaatggggacaacaccagaggtccactccatatttctcgaaggccataccttccttgttcgaaaccacagacaggcatccttggagatctctcccattacctttctcactgcccaaacgctccttatggacttgggtcagttccttctcttctgccatatcagctcacaccagcatgatggtatggaagcttatgtgaaagtcgacagttgtcctgaggagccacagttgcgcatgaagaataatgaagaagccgaggattacgacgacgatctcaccgattctgagatggacgtggtgaggtttgatgacgacaactctccctccttcattcaaatccggagcgtggcgaagaaacaccccaagacttgggtccactatatagcggcggaagaggaggattgggattacgctcctcttgtattggcaccagatgaccgctcatacaaaagcctgtacctcaacaacggaccgcagagaattggccggaagtataagaaagtgcgatttatggcctatacagacgaaacctttaagacaagggaggccatccagcatgagagtgggattttgggacctcttctttacggcgaagttggtgataccctcctcatcatcttcaagaatcaagcttctcgcccctataacatttacccacacgggatcactgacgttaggcctttgtatagcagaagacttcccaaaggcgtgaagcatctcaaagacttccccattttgccaggcgagatctttaagtacaaatggaccgtcacagtggaagatggaccgactaaatcagaccctcgatgccttacgcggtactattcctccttcgtgaatatggagagagatttggcaagcggactcataggaccactcctcatctgttacaaggaatctgtagaccagaggggtaaccagattatgagtgataaacgcaatgtgatcctttttagcgtcttcgacgagaaccggtcctggtacttgaccgagaatatacaaaggttccttcccaaccccgcaggcgttcagttggaagaccctgagtttcaggccagcaatattatgcactcaatcaacggctatgtgtttgatagcctccagctttctgtttgcctccatgaagtagcctattggtacatcttgtcaattggtgctcaaacagacttcctctccgtcttcttctccggctacacctttaagcacaagatggtgtatgaggacactctcacactctttccattttctggagaaaccgtgttcatgagcatggagaatccaggcctttggatcttgggttgccacaacagtgattttcgcaatcggggaatgactgctatcctcaaagtcagcagctgtgatgaaaacacaggcgactattacgaagattcttacgaggacataagtgcctacttgttgtccaagaataacgccattgagcccagatcattctcccagaatcctcccgtgcttaaaaggcatcagcgcgaaatcaccagaactactcttcagtctgatcaagaggagattgactatgacgacaccataagcgtggaaatgaagaaggaggatttcgatatctatgacgaagatgagaaccagtctccgcggagctttcagaagaagacgcgacactacttcattgcagcagtcgaaaggctttgggactacggtatgtcatcatcccctcatgtgttgcgcaatagagctcagagtggaagtgttccacagttcaagaaagtcgtctttcaagagtttacagatggcagcttcacacagcctctctatcggggcgagcttaacgaacatttgggactccttggtccctatatccgagccgaagtggaggacaacattatggttacctttaggaatcaagcctctcgcccctacagcttctactcctccctcatcagttatgaggaggatcagagacaaggcgctgaaccacggaagaactttgtgaaaccgaatgagacgaagacctacttctggaaagtacagcaccacatggcccccacaaaagacgaattcgattgcaaagcatgggcgtatttttcagacgttgacttggagaaagatgtacattcaggacttattggtcctttgttggtgtgtcacactaacactctcaatccagcccatggcaggcaggtgacagtccaggaattcgctcttttctttaccatctttgatgagaccaagtcctggtacttcacggaaaacatggagcgcaattgcagagccccctgtaacatacagatggaggaccctacctttaaggaaaattatcggttccacgcaatcaacggatacattatggatacactccctggccttgtgatggctcaggaccaacgaatcaggtggtacctcctcagcatgggttctaatgagaacatacactccattcacttttcaggacatgtgttcactgtccggaagaaagaagagtataagatggccctctacaatttgtatccaggcgtgtttgagaccgttgaaatgcttccctctaaagctggcatctggagagtagagtgcttgatcggagaacatcttcacgcaggtatgagcaccttgttcctcgtgtacagcaacaaatgtcagaacccacttggcatggccagtggacacattcgcgactttcagatcacagcatctggccagtatggacaatgggccccaaagttggctcgcctccattactccggtagcataaatgcgtggtccactaaagaacctttcagctggattaaggtcgatcttcttgcccccatgatcatccacggcattaagacacagggagcgaggcagaaattctcctccctctacatctcacagttcattattatgtatagtttggacggcaagaagtggcaaacttatagaggtaacagtactggaacactcatggtgttcttcggcaacgttgatagctctggcatcaaacacaacatctttaatcctcccataatagctcggtacatcagattgcatccgacccactacagcattaggagtacactccgaatggagcttatgggttgcgacttgaattcctgttcaatgccactcggaatggagtctaaagccatctctgatgcacagataaccgccagtagctactttacgaacatgtttgctacgtggtcaccctctaaggcaaggcttcatttgcaaggccggtctaatgcctggagacctcaggtgaacaacccgaaagaatggctccaggtggactttcagaagaccatgaaagtaacaggtgtcactactcagggagttaagtccttgctcaccagcatgtatgtgaaggagttccttatttcctcatcacaagatggccaccagtggaccctcttctttcagaatggtaaggtcaaagtgtttcagggcaatcaagacagcttcacacccgtggtgaacagtcttgatcctccactcttgacacgataccttcgaatccatccacagtcttgggttcaccagattgcattgcgcatggaagtacttggatgcgaggctcaggacctctac

SEQ ID NO: 218 - protein, 1457 aa, synthetic construct
  REGION 1..1457: note = Variant of human B-domain deleted Factor VIII
MQIELSTCFFLCLLRFCFSATRRYYLGAVELSWDYMQSDLGELPVDARFPPRVPKSFPFNTSVVYKKTLFVEFTDHLFNIAKPRPPWMGLLGPTIQAEVYDTVVITLKNMASHPVSLHAVGVSYWKASEGAEYDDQTSQREKEDDKVFPGGSHTYVWQVLKENGPMASDPLCLTYSYLSHVDLVKDLNSGLIGALLVCREGSLAKEKTQTLHKFILLFAVFDEGKSWHSETKNSLMQDRDAASARAWPKMHTVNGYVNRSLPGLIGCHRKSVYWHVIGMGTTPEVHSIFLEGHTFLVRNHRQASLEISPITFLTAQTLLMDLGQFLLFCHISSHQHDGMEAYVKVDSCPEEPQLRMKNNEEAEDYDDDLTDSEMDVVRFDDDNSPSFIQIRSVAKKHPKTWVHYIAAEEEDWDYAPLVLAPDDRSYKSLYLNNGPQRIGRKYKKVRFMAYTDETFKTREAIQHESGILGPLLYGEVGDTLLIIFKNQASRPYNIYPHGITDVRPLYSRRLPKGVKHLKDFPILPGEIFKYKWTVTVEDGPTKSDPRCLTRYYSSFVNMERDLASGLIGPLLICYKESVDQRGNQIMSDKRNVILFSVFDENRSWYLTENIQRFLPNPAGVQLEDPEFQASNIMHSINGYVFDSLQLSVCLHEVAYWYILSIGAQTDFLSVFFSGYTFKHKMVYEDTLTLFPFSGETVFMSMENPGLWILGCHNSDFRNRGMTAILKVSSCDENTGDYYEDSYEDISAYLLSKNNAIEPRSFSQNPPVLKRHQREITRTTLQSDQEEIDYDDTISVEMKKEDFDIYDEDENQSPRSFQKKTRHYFIAAVERLWDYGMSSSPHVLRNRAQSGSVPQFKKVVFQEFTDGSFTQPLYRGELNEHLGLLGPYIRAEVEDNIMVTFRNQASRPYSFYSSLISYEEDQRQGAEPRKNFVKPNETKTYFWKVQHHMAPTKDEFDCKAWAYFSDVDLEKDVHSGLIGPLLVCHTNTLNPAHGRQVTVQEFALFFTIFDETKSWYFTENMERNCRAPCNIQMEDPTFKENYRFHAINGYIMDTLPGLVMAQDQRIRWYLLSMGSNENIHSIHFSGHVFTVRKKEEYKMALYNLYPGVFETVEMLPSKAGIWRVECLIGEHLHAGMSTLFLVYSNKCQNPLGMASGHIRDFQITASGQYGQWAPKLARLHYSGSINAWSTKEPFSWIKVDLLAPMIIHGIKTQGARQKFSSLYISQFIIMYSLDGKKWQTYRGNSTGTLMVFFGNVDSSGIKHNIFNPPIIARYIRLHPTHYSIRSTLRMELMGCDLNSCSMPLGMESKAISDAQITASSYFTNMFATWSPSKARLHLQGRSNAWRPQVNNPKEWLQVDFQKTMKVTGVTTQGVKSLLTSMYVKEFLISSSQDGHQWTLFFQNGKVKVFQGNQDSFTPVVNSLDPPLLTRYLRIHPQSWVHQIALRMEVLGCEAQDLY

SEQ ID NO: 219 - DNA, 4371 bp, synthetic construct
  misc_feature 1..4371: note = Variant of human B-domain deleted Factor VIII
  source 1..4371: mol_type = other DNA
atgcagattgaactgtctacctgcttcttcctctgtttgctgaggttctgctttagcgccactagacggtactaccttggcgctgtggagctgtcctgggactatatgcagagtgatttgggagagcttcccgtcgacgcacgatttcctcctcgcgttccaaagtcatttcccttcaacacaagcgtggtgtacaagaagacgctcttcgtcgaattcaccgatcacctgttcaatatcgccaaacccagaccaccatggatgggtcttttggggcctaccatacaagcggaggtgtatgacacagttgttatcactctcaagaacatggcttctcatccggtaagtcttcacgcagtgggcgtgtcctactggaaagcttcagaaggagccgagtatgatgatcagacatcccagagggagaaagaagacgacaaggtatttccaggtgggtctcatacctatgtgtggcaagtgctcaaagagaatggccctatggcaagcgatccgccgtgtttgacttacagctacctttcacacgttgacctcgtcaaggacctcaactccgggttgattggagccttgttggtatgcagggaaggatctcttgccaaagagaagacacagaccctccacaagtttatccttctctttgctgtgttcgatgagggcaaaagttggcatagcgaaacgaagaattccctcatgcaggatcgcgacgcagccagcgccagagcttggcccaagatgcacactgtgaacggatatgtcaataggtcacttcctggcttgattgggtgtcatcggaaaagtgtctactggcacgtgatcggaatggggacaacaccagaggtccactccatatttctcgaaggccataccttccttgttcgaaaccacagacaggcatccttggagatctctcccattacctttctcactgcccaaacgctccttatggacttgggtcagttccttctcttctgccatatcagctcacaccagcatgatggtatggaagcttatgtgaaagtcgacagttgtcctgaggagccacagttgcgcatgaagaataatgaagaagaggaggattacgacgacgatctcaccgattctgagatggacgtggtgaggtttgatgacgacaactctccctccttcattcaaatccggagcgtggcgaagaaacaccccaagacttgggtccactatatagcggcggaagaggaggattgggattacgctcctcttgtattggcaccagatgaccgctcatacaaaagccagtacctcaacaacggaccgcagagaattggccggaagtataagaaagtgcgatttatggcctatacagacgaaacctttaagacaagggaggccatccagcatgagagtgggattttgggacctcttctttacggcgaagttggtgataccctcctcatcatcttcaagaatcaagcttctcgcccctataacatttacccacacgggatcactgacgttaggcctttgtatagcagaagacttcccaaaggcgtgaagcatctcaaagacttccccattttgccaggcgagatctttaagtacaaatggaccgtcacagtggaagatggaccgactaaatcagaccctcgatgccttacgcggtactattcctccttcgtgaatatggagagagatttggcaagcggactcataggaccactcctcatctgttacaaggaatctgtagaccagaggggtaaccagattatgagtgataaacgcaatgtgatcctttttagcgtcttcgacgagaaccggtcctggtacttgaccgagaatatacaaaggttccttcccaaccccgcaggcgttcagttggaagaccctgagtttcaggccagcaatattatgcactcaatcaacggctatgtgtttgatagcctccagctttctgtttgcctccatgaagtagcctattggtacatcttgtcaattggtgctcaaacagacttcctctccgtcttcttctccggctacacctttaagcacaagatggtgtatgaggacactctcacactctttccattttctggagaaaccgtgttcatgagcatggagaatccaggcctttggatcttgggttgccacaacagtgattttcgcaatcggggaatgactgctctcctcaaagtcagcagctgtgataagaacacaggcgactattacgaagattcttacgaggacataagtgcctacttgttgtccaagaataacgccattgagcccagatcattctcccagaatcctcccgtgcttaaaaggcatcagcgcgaaatcaccagaactactcttcagtctgatcaagaggagattgactatgacgacacgataagcaccgaacaaaagatggaggatttcgatatctatgacgaagatgagaaccagtctccgcggagctttcagaagaagacgcgacactacttcattgcagcagtcgaaaggctttgggactacggtatgtcatcatcccctcatgtgttgcgcaatagagctcagagtggaagtgttccacagttcaagaaagtcgtctttcaagagtttacagatggcagcttcacacagcctctctatcggggcgagcttaacgaacatttgggactccttggtccctatatccgagccgaagtggaggacaacattatggttacctttaggaatcaagcctctcgcccctacagcttctactcctccctcatcagttatgaggaggatcagagacaaggcgctgaaccacggaagaactttgtgaaaccgaatgagacgaagacctacttctggaaagtacagcaccacatggcccccacaaaagacgaattcgattgcaaagcatgggcgtatttttcagacgttgacttggagaaagatgtacattcaggacttattggtcctttgttggtgtgtcacactaacactctcaatccagcccatggcaggcaggtgacagtccaggaattcgctcttttctttaccatctttgatgagaccaagtcctggtacttcacggaaaacatggagcgcaattgcagagccccctgtaacatacagatggaggaccctacctttaaggaaaattatcggttccacgcaatcaacggatacattatggatacactccctggccttgtgatggctcaggaccaacgaatcaggtggtacctcctcagcatgggttctaatgagaacatacactccattcacttttcaggacatgtgttcactgtccggaagaaagaagagtataagatggccctctacaatttgtatccaggcgtgtttgagaccgttgaaatgcttccctctaaagctggcatctggagagtagagtgcttgatcggagaacatcttcacgcaggtatgagcaccttgttcctcgtgtacagcaacaaatgtcagaccccacttggcatggccagtggacacattcgcgactttcagatcacagcatctggccagtatggacaatgggccccaaagttggctcgcctccattactccggtagcataaatgcgtggtccactaaagaacctttcagctggattaaggtcgatcttcttgcccccatgatcatccacggcattaagacacagggagcgaggcagaaattctcctccctctacatctcacagttcattattatgtatagtttggacggcaagaagtggcaaacttatagaggtaacagtactggaacactcatggtgttcttcggcaacgttgatagctctggcatcaaacacaacatctttaatcctcccataatagctcggtacatcagattgcatccgacccactacagcattaggagtacactccgaatggagcttatgggttgcgacttgaattcctgttcaatgccactcggaatggagtctaaagccatctctgatgcacagataaccgccagtagctactttacgaacatgtttgctacgtggtcaccctctaaggcaaggcttcatttgcaaggccggtctaatgcctggagacctcaggtgaacaacccgaaagaatggctccaggtggactttcagaagaccatgaaagtaacaggtgtcactactcagggagttaagtccttgctcaccagcatgtatgtgaaggagttccttatttcctcatcacaagatggccaccagtggaccctcttctttcagaatggtaaggtcaaagtgtttcagggcaatcaagacagcttcacacccgtggtgaacagtcttgatcctccactcttgacacgataccttcgaatccatccacagtcttgggttcaccagattgcattgcgcatggaagtacttggatgcgaggctcaggacctctac

SEQ ID NO: 220 - protein, 1457 aa, synthetic construct
  REGION 1..1457: note = Variant of human B-domain deleted Factor VIII
MQIELSTCFFLCLLRFCFSATRRYYLGAVELSWDYMQSDLGELPVDARFPPRVPKSFPFNTSVVYKKTLFVEFTDHLFNIAKPRPPWMGLLGPTIQAEVYDTVVITLKNMASHPVSLHAVGVSYWKASEGAEYDDQTSQREKEDDKVFPGGSHTYVWQVLKENGPMASDPPCLTYSYLSHVDLVKDLNSGLIGALLVCREGSLAKEKTQTLHKFILLFAVFDEGKSWHSETKNSLMQDRDAASARAWPKMHTVNGYVNRSLPGLIGCHRKSVYWHVIGMGTTPEVHSIFLEGHTFLVRNHRQASLEISPITFLTAQTLLMDLGQFLLFCHISSHQHDGMEAYVKVDSCPEEPQLRMKNNEEEEDYDDDLTDSEMDVVRFDDDNSPSFIQIRSVAKKHPKTWVHYIAAEEEDWDYAPLVLAPDDRSYKSQYLNNGPQRIGRKYKKVRFMAYTDETFKTREAIQHESGILGPLLYGEVGDTLLIIFKNQASRPYNIYPHGITDVRPLYSRRLPKGVKHLKDFPILPGEIFKYKWTVTVEDGPTKSDPRCLTRYYSSFVNMERDLASGLIGPLLICYKESVDQRGNQIMSDKRNVILFSVFDENRSWYLTENIQRFLPNPAGVQLEDPEFQASNIMHSINGYVFDSLQLSVCLHEVAYWYILSIGAQTDFLSVFFSGYTFKHKMVYEDTLTLFPFSGETVFMSMENPGLWILGCHNSDFRNRGMTALLKVSSCDKNTGDYYEDSYEDISAYLLSKNNAIEPRSFSQNPPVLKRHQREITRTTLQSDQEEIDYDDTISTEQKMEDFDIYDEDENQSPRSFQKKTRHYFIAAVERLWDYGMSSSPHVLRNRAQSGSVPQFKKVVFQEFTDGSFTQPLYRGELNEHLGLLGPYIRAEVEDNIMVTFRNQASRPYSFYSSLISYEEDQRQGAEPRKNFVKPNETKTYFWKVQHHMAPTKDEFDCKAWAYFSDVDLEKDVHSGLIGPLLVCHTNTLNPAHGRQVTVQEFALFFTIFDETKSWYFTENMERNCRAPCNIQMEDPTFKENYRFHAINGYIMDTLPGLVMAQDQRIRWYLLSMGSNENIHSIHFSGHVFTVRKKEEYKMALYNLYPGVFETVEMLPSKAGIWRVECLIGEHLHAGMSTLFLVYSNKCQTPLGMASGHIRDFQITASGQYGQWAPKLARLHYSGSINAWSTKEPFSWIKVDLLAPMIIHGIKTQGARQKFSSLYISQFIIMYSLDGKKWQTYRGNSTGTLMVFFGNVDSSGIKHNIFNPPIIARYIRLHPTHYSIRSTLRMELMGCDLNSCSMPLGMESKAISDAQITASSYFTNMFATWSPSKARLHLQGRSNAWRPQVNNPKEWLQVDFQKTMKVTGVTTQGVKSLLTSMYVKEFLISSSQDGHQWTLFFQNGKVKVFQGNQDSFTPVVNSLDPPLLTRYLRIHPQSWVHQIALRMEVLGCEAQDLY

SEQ ID NO: 221 - DNA, 4371 bp, synthetic construct
  misc_feature 1..4371: note = Variant of human B-domain deleted Factor VIII
  source 1..4371: mol_type = other DNA
atgcagattgaactgtctacctgcttcttcctctgtttgctgaggttctgctttagcgccactagacggtactaccttggcgctgtggagctgtcctgggactatatgcagagtgatttgggagagcttcccgtcgacgcacgatttcctcctcgcgttccaaagtcatttcccttcaacacaagcgtggtgtacaagaagacgctcttcgtcgaattcaccgatcacctgttcaatatcgccaaacccagaccaccatggatgggtcttttggggcctaccatacaagcggaggtgtatgacacagttgttatcactctcaagaacatggcttctcatccggtaagtcttcacgcagtgggcgtgtcctactggaaagcttcagaaggagccgagtatgatgatcagacatcccagagggagaaagaagacgacaaggtatttccaggtgggtctcatacctatgtgtggcaagtgctcaaagagaatggccctatggcaagcgatccgccgtgtttgacttacagctacctttcacacgttgacctcgtcaaggacctcaactccgggttgattggagccttgttggtatgcagggaaggatctcttgccaaagagaagacacagaccctccacaagtttatccttctctttgctgtgttcgatgagggcaaaagttggcatagcgaaacgaagaattccctcatgcaggatcgcgacgcagccagcgccagagcttggcccaagatgcacactgtgaacggatatgtcaataggtcacttcctggcttgattgggtgtcatcggaaaagtgtctactggcacgtgatcggaatggggacaacaccagaggtccactccatatttctcgaaggccataccttccttgttcgaaaccacagacaggcatccttggagatctctcccattacctttctcactgcccaaacgctccttatggacttgggtcagttccttctcttctgccatatcagctcacaccagcatgatggtatggaagcttatgtgaaagtcgacagttgtcctgaggagccacagttgcgcatgaagaataatgaagaagccgaggattacgacgacgatctcaccgattctgagatggacgtggtgaggtttgatgacgacaactctccctccttcattcaaatccggagcgtggcgaagaaacaccccaagacttgggtccactatatagcggcggaagaggaggattgggattacgctcctcttgtattggcaccagatgaccgctcatacaaaagcctgtacctcaacaacggaccgcagagaattggccggaagtataagaaagtgcgatttatggcctatacagacgaaacctttaagacaagggaggccatccagcatgagagtgggattttgggacctcttctttacggcgaagttggtgataccctcctcatcatcttcaagaatcaagcttctcgcccctataacatttacccacacgggatcactgacgttaggcctttgtatagcagaagacttcccaaaggcgtgaagcatctcaaagacttccccattttgccaggcgagatctttaagtacaaatggaccgtcacagtggaagatggaccgactaaatcagaccctcgatgccttacgcggtactattcctccttcgtgaatatggagagagatttggcaagcggactcataggaccactcctcatctgttacaaggaatctgtagaccagaggggtaaccagattatgagtgataaacgcaatgtgatcctttttagcgtcttcgacgagaaccggtcctggtacttgaccgagaatatacaaaggttccttcccaaccccgcaggcgttcagttggaagaccctgagtttcaggccagcaatattatgcactcaatcaacggctatgtgtttgatagtctccagctttctgtttgcctccatgaagtagcctattggtacatcttgtcaattggtgctcaaacagacttcctctccgtcttcttctccggctacacctttaagcacaagatggtgtatgaggacactctcacactctttccattttctggagaaaccgtgttcatgagcatggagaatccaggcctttggatcttgggttgccacaacagtgattttcgcaatcggggaatgactgctctcctcaaagtcagcagctgtgatgaaaacacaggcgactattacgaagattcttacgaggacataagtgcctacttgttgtccaagaataacgccattgagcccagatcattctcccagaatcctcccgtgcttaaaaggcatcagcgcgaaatcaccagaactactcttcagtctgatcaagaggagattgactatgacgacaccataagcgtggaaatgaagaaggaggatttcgatatctatgacgaagatgagaaccagtctccgcggagctttcagaagaagacgcgacactacttcattgcagcagtcgaaaggctttgggactacggtatgtcatcatcccctcatgtgttgcgcaatagagctcagagtggaagtgttccacagttcaagaaagtcgtctttcaagagtttacagatggcagcttcacacagcctctctatcggggcgagcttaacgaacatttgggactccttggtccctatatccgagccgaagtggaggacaacattatggttacctttaggaatcaagcctctcgcccctacagcttctactcctccctcatcagttatgaggaggatcagagacaaggcgctgaaccacggaagaactttgtgaaaccgaatgagacgaagacctacttctggaaagtacagcaccacatggcccccacaaaagacgaattcgattgcaaagcatgggcgtatttttcagacgttgacttggagaaagatgtacattcaggacttattggtcctttgttggtgtgtcacactaacactctcaatccagcccatggcaggcaggtgacagtccaggaattcgctcttttctttaccatctttgatgagaccaagtcctggtacttcacggaaaacatggagcgcaattgcagagccccctgtaacatacagatggaggaccctacctttaaggaaaattatcggttccacgcaatcaacggatacattatggatacactccctggccttgtgatggctcaggaccaacgaatcaggtggtacctcctcagcatgggttctaatgagaacatacactccattcacttttcaggacatgtgttcactgtccggaagaaagaagagtataagatggccctctacaatttgtatccaggcgtgtttgagaccgttgaaatgcttccctctaaagctggcatctggagagtagagtgcttgatcggagaacatcttcacgcaggtatgagcaccttgttcctcgtgtacagcaacaaatgtcagaccccacttggcatggccagtggacacattcgcgactttcagatcacagcatctggccagtatggacaatgggccccaaagttggctcgcctccattactccggtagcataaatgcgtggtccactaaagaacctttcagctggattaaggtcgatcttcttgcccccatgatcatccacggcattaagacacagggagcgaggcagaaattctcctccctctacatctcacagttcattattatgtatagtttggacggcaagaagtggcaaacttatagaggtaacagtactggaacactcatggtgttcttcggcaacgttgatagctctggcatcaaacacaacatctttaatcctcccataatagctcggtacatcagattgcatccgacccactacagcattaggagtacactccgaatggagcttatgggttgcgacttgaattcctgttcaatgccactcggaatggagtctaaagccatctctgatgcacagataaccgccagtagctactttacgaacatgtttgctacgtggtcaccctctaaggcaaggcttcatttgcaaggccggtctaatgcctggagacctcaggtgaacaacccgaaagaatggctccaggtggactttcagaagaccatgaaagtaacaggtgtcactactcagggagttaagtccttgctcaccagcatgtatgtgaaggagttccttatttcctcatcacaagatggccaccagtggaccctcttctttcagaatggtaaggtcaaagtgtttcagggcaatcaagacagcttcacacccgtggtgaacagtcttgatcctccactcttgacacgataccttcgaatccatccacagtcttgggttcaccagattgcattgcgcatggaagtacttggatgcgaggctcaggacctctac

SEQ ID NO: 222 - protein, 1457 aa, synthetic construct
  REGION 1..1457: note = Variant of human B-domain deleted Factor VIII
MQIELSTCFFLCLLRFCFSATRRYYLGAVELSWDYMQSDLGELPVDARFPPRVPKSFPFNTSVVYKKTLFVEFTDHLFNIAKPRPPWMGLLGPTIQAEVYDTVVITLKNMASHPVSLHAVGVSYWKASEGAEYDDQTSQREKEDDKVFPGGSHTYVWQVLKENGPMASDPPCLTYSYLSHVDLVKDLNSGLIGALLVCREGSLAKEKTQTLHKFILLFAVFDEGKSWHSETKNSLMQDRDAASARAWPKMHTVNGYVNRSLPGLIGCHRKSVYWHVIGMGTTPEVHSIFLEGHTFLVRNHRQASLEISPITFLTAQTLLMDLGQFLLFCHISSHQHDGMEAYVKVDSCPEEPQLRMKNNEEAEDYDDDLTDSEMDVVRFDDDNSPSFIQIRSVAKKHPKTWVHYIAAEEEDWDYAPLVLAPDDRSYKSLYLNNGPQRIGRKYKKVRFMAYTDETFKTREAIQHESGILGPLLYGEVGDTLLIIFKNQASRPYNIYPHGITDVRPLYSRRLPKGVKHLKDFPILPGEIFKYKWTVTVEDGPTKSDPRCLTRYYSSFVNMERDLASGLIGPLLICYKESVDQRGNQIMSDKRNVILFSVFDENRSWYLTENIQRFLPNPAGVQLEDPEFQASNIMHSINGYVFDSLQLSVCLHEVAYWYILSIGAQTDFLSVFFSGYTFKHKMVYEDTLTLFPFSGETVFMSMENPGLWILGCHNSDFRNRGMTALLKVSSCDENTGDYYEDSYEDISAYLLSKNNAIEPRSFSQNPPVLKRHQREITRTTLQSDQEEIDYDDTISVEMKKEDFDIYDEDENQSPRSFQKKTRHYFIAAVERLWDYGMSSSPHVLRNRAQSGSVPQFKKVVFQEFTDGSFTQPLYRGELNEHLGLLGPYIRAEVEDNIMVTFRNQASRPYSFYSSLISYEEDQRQGAEPRKNFVKPNETKTYFWKVQHHMAPTKDEFDCKAWAYFSDVDLEKDVHSGLIGPLLVCHTNTLNPAHGRQVTVQEFALFFTIFDETKSWYFTENMERNCRAPCNIQMEDPTFKENYRFHAINGYIMDTLPGLVMAQDQRIRWYLLSMGSNENIHSIHFSGHVFTVRKKEEYKMALYNLYPGVFETVEMLPSKAGIWRVECLIGEHLHAGMSTLFLVYSNKCQTPLGMASGHIRDFQITASGQYGQWAPKLARLHYSGSINAWSTKEPFSWIKVDLLAPMIIHGIKTQGARQKFSSLYISQFIIMYSLDGKKWQTYRGNSTGTLMVFFGNVDSSGIKHNIFNPPIIARYIRLHPTHYSIRSTLRMELMGCDLNSCSMPLGMESKAISDAQITASSYFTNMFATWSPSKARLHLQGRSNAWRPQVNNPKEWLQVDFQKTMKVTGVTTQGVKSLLTSMYVKEFLISSSQDGHQWTLFFQNGKVKVFQGNQDSFTPVVNSLDPPLLTRYLRIHPQSWVHQIALRMEVLGCEAQDLY

SEQ ID NO: 223 - DNA, 4371 bp, synthetic construct
  misc_feature 1..4371: note = Variant of human B-domain deleted Factor VIII
  source 1..4371: mol_type = other DNA
atgcagattgaactgtctacctgcttcttcctctgtttgctgaggttctgctttagcgccactagacggtactaccttggcgctgtggagctgtcctgggactatatgcagagtgatttgggagagcttcccgtcgacgcacgatttcctcctcgcgttccaaagtcatttcccttcaacacaagcgtggtgtacaagaagacgctcttcgtcgaattcaccgatcacctgttcaatatcgccaaacccagaccaccatggatgggtcttttggggcctaccatacgcgcggaggtgtatgacacagttgttatcactctcaagaacatggcttctcatccggtaagtcttcacgcagtgggcgtgtcctactggaaagcttcagaaggagccgagtatgatgatcagacatcccagagggagaaagaagacgacaaggtatttccaggtgggtctcatacctatgtgtggcaagtgctcaaagagaatggccctatggcaagcgatccgccgtgtttgacttacagctacctttcacacgttgacctcgtcaaggacctcaactccgggttgattggagccttgttggtatgcagggaaggatctcttgccaaagagaagacacagaccctccacaagtttatccttctctttgctgtgttcgatgagggcaaaagttggcatagcgaaacgaagaattccctcatgcaggatcgcgacgcagccagcgccagagcttggcccaagatgcacactgtgaacggatatgtcaataggtcacttcctggcttgattgggtgtcatcggaaaagtgtctactggcacgtgatcggaatggggacaacaccagaggtccactccatatttctcgaaggccataccttccttgttcgaaaccacagacaggcatccttggagatctctcccattacctttctcactgcccaaacgctccttatggacttgggtcagttccttctcttctgccatatcagctcacaccagcatgatggtatggaagcttatgtgaaagtcgacagttgtcctgaggagccacagttgcgcatgaagaataatgaagaagccgaggattacgacgacgatctcaccgattctgagatggacgtggtgaggtttgatgacgacaactctccctccttcattcaaatccggagcgtggcgaagaaacaccccaagacttgggtccactatatagcggcggaagaggaggattgggattacgctcctcttgtattggcaccagatgaccgctcatacaaaagccagtacctcaacaacggaccgcagagaattggccggaagtataagaaagtgcgatttatggcctatacagacgaaacctttaagacaagggaggccatccagcatgagagtgggattttgggacctcttctttacggcgaagttggtgataccctcctcatcatcttcaagaatcaagcttctcgcccctataacatttacccacacgggatcactgacgttaggcctttgtatagcagaagacttcccaaaggcgtgaagcatctcaaagacttccccattttgccaggcgagatctttaagtacaaatggaccgtcacagtggaagatggaccgactaaatcagaccctcgatgccttacgcggtactattcctccttcgtgaatatggagagagatttggcaagcggactcataggaccactcctcatctgttacaaggaatctgtagaccagaggggtaaccagattatgagtgataaacgcaatgtgatcctttttagcgtcttcgacgagaaccggtcctggtacttgaccgagaatatacaaaggttccttcccaaccccgcaggcgttcagttggaagaccctgagtttcaggccagcaatattatgcactcaatcaacggctatgtgtttgataacctccagctttctgtttgcctccatgaagtagcctattggtacatcttgtcaattggtgctcaaacagacttcctctccgtcttcttctccggctacacctttaagcacaagatggtgtatgaggacactctcacactctttccattttctggagaaaccgtgttcatgagcatggagaatccaggcctttggatcttgggttgccacaacagtgattttcgcaatcggggaatgactgctctcctcaaagtcagcagctgtgataagaacacaggcgactattacgaagattcttacgaggacataagtgcctacttgttgtccaagaataacgccattgagcccagatcattctcccagaatcctcccgtgcttaaaaggcatcagcgcgaaatcaccagaactactcttcagtctgatcaagaggagattgactatgacgacacgataagcgtcgaaacgaagcgcgaggatttcgatatctatgacgaagatgagaaccagtctccgcggagctttcagaagaagacgcgacactacttcattgcagcagtcgaaaggctttgggactacggtatgtcatcatcccctcatgtgttgcgcaatagagctcagagtggaagtgttccacagttcaagaaagtcgtctttcaagagtttacagatggcagcttcacacagcctctctatcggggcgagcttaacgaacatttgggactccttggtccctatatccgagccgaagtggaggacaacattatggttacctttaggaatcaagcctctcgcccctacagcttctactcctccctcatcagttatgaggaggatcagagacaaggcgctgaaccacggaagaactttgtgaaaccgaatgagacgaagacctacttctggaaagtacagcaccacatggcccccacaaaagacgaattcgattgcaaagcatgggcgtatttttcagacgttgacttggagaaagatgtacattcaggacttattggtcctttgttggtgtgtcacactaacactctcaatccagcccatggcaggcaggtgacagtccaggaattcgctcttttctttaccatctttgatgagaccaagtcctggtacttcacggaaaacatggagcgcaattgcagagccccctgtaacatacagatggaggaccctacctttaaggaaaattatcggttccacgcaatcaacggatacattatggatacactccctggccttgtgatggctcaggaccaacgaatcaggtggtacctcctcagcatgggttctaatgagaacatacactccattcacttttcaggacatgtgttcactgtccggaagaaagaagagtataagatggccctctacaatttgtatccaggcgtgtttgagaccgttgaaatgcttccctctaaagctggcatctggagagtagagtgcttgatcggagaacatcttcacgcaggtatgagcaccttgttcctcgtgtacagcaacaaatgtcagaccccacttggcatggccagtggacacattcgcgactttcagatcacagcatctggccagtatggacaatgggccccaaagttggctcgcctccattactccggtagcataaatgcgtggtccactaaagaacctttcagctggattaaggtcgatcttcttgcccccatgatcatccacggcattaagacacagggagcgaggcagaaattctcctccctctacatctcacagttcattattatgtatagtttggacggcaagaagtggcaaacttatagaggtaacagtactggaacactcatggtgttcttcggcaacgttgatagctctggcatcaaacacaacatctttaatcctcccataatagctcggtacatcagattgcatccgacccactacagcattaggagtacactccgaatggagcttatgggttgcgacttgaattcctgttcaatgccactcggaatggagtctaaagccatctctgatgcacagataaccgccagtagctactttacgaacatgtttgctacgtggtcaccctctaaggcaaggcttcatttgcaaggccggtctaatgcctggagacctcaggtgaacaacccgaaagaatggctccaggtggactttcagaagaccatgaaagtaacaggtgtcactactcagggagttaagtccttgctcaccagcatgtatgtgaaggagttccttatttcctcatcacaagatggccaccagtggaccctcttctttcagaatggtaaggtcaaagtgtttcagggcaatcaagacagcttcacacccgtggtgaacagtcttgatcctccactcttgacacgataccttcgaatccatccacagtcttgggttcaccagattgcattgcgcatggaagtacttggatgcgaggctcaggacctctac

SEQ ID NO: 224 - protein, 1457 aa, synthetic construct
  REGION 1..1457: note = Variant of human B-domain deleted Factor VIII
MQIELSTCFFLCLLRFCFSATRRYYLGAVELSWDYMQSDLGELPVDARFPPRVPKSFPFNTSVVYKKTLFVEFTDHLFNIAKPRPPWMGLLGPTIRAEVYDTVVITLKNMASHPVSLHAVGVSYWKASEGAEYDDQTSQREKEDDKVFPGGSHTYVWQVLKENGPMASDPPCLTYSYLSHVDLVKDLNSGLIGALLVCREGSLAKEKTQTLHKFILLFAVFDEGKSWHSETKNSLMQDRDAASARAWPKMHTVNGYVNRSLPGLIGCHRKSVYWHVIGMGTTPEVHSIFLEGHTFLVRNHRQASLEISPITFLTAQTLLMDLGQFLLFCHISSHQHDGMEAYVKVDSCPEEPQLRMKNNEEAEDYDDDLTDSEMDVVRFDDDNSPSFIQIRSVAKKHPKTWVHYIAAEEEDWDYAPLVLAPDDRSYKSQYLNNGPQRIGRKYKKVRFMAYTDETFKTREAIQHESGILGPLLYGEVGDTLLIIFKNQASRPYNIYPHGITDVRPLYSRRLPKGVKHLKDFPILPGEIFKYKWTVTVEDGPTKSDPRCLTRYYSSFVNMERDLASGLIGPLLICYKESVDQRGNQIMSDKRNVILFSVFDENRSWYLTENIQRFLPNPAGVQLEDPEFQASNIMHSINGYVFDNLQLSVCLHEVAYWYILSIGAQTDFLSVFFSGYTFKHKMVYEDTLTLFPFSGETVFMSMENPGLWILGCHNSDFRNRGMTALLKVSSCDKNTGDYYEDSYEDISAYLLSKNNAIEPRSFSQNPPVLKRHQREITRTTLQSDQEEIDYDDTISVETKREDFDIYDEDENQSPRSFQKKTRHYFIAAVERLWDYGMSSSPHVLRNRAQSGSVPQFKKVVFQEFTDGSFTQPLYRGELNEHLGLLGPYIRAEVEDNIMVTFRNQASRPYSFYSSLISYEEDQRQGAEPRKNFVKPNETKTYFWKVQHHMAPTKDEFDCKAWAYFSDVDLEKDVHSGLIGPLLVCHTNTLNPAHGRQVTVQEFALFFTIFDETKSWYFTENMERNCRAPCNIQMEDPTFKENYRFHAINGYIMDTLPGLVMAQDQRIRWYLLSMGSNENIHSIHFSGHVFTVRKKEEYKMALYNLYPGVFETVEMLPSKAGIWRVECLIGEHLHAGMSTLFLVYSNKCQTPLGMASGHIRDFQITASGQYGQWAPKLARLHYSGSINAWSTKEPFSWIKVDLLAPMIIHGIKTQGARQKFSSLYISQFIIMYSLDGKKWQTYRGNSTGTLMVFFGNVDSSGIKHNIFNPPIIARYIRLHPTHYSIRSTLRMELMGCDLNSCSMPLGMESKAISDAQITASSYFTNMFATWSPSKARLHLQGRSNAWRPQVNNPKEWLQVDFQKTMKVTGVTTQGVKSLLTSMYVKEFLISSSQDGHQWTLFFQNGKVKVFQGNQDSFTPVVNSLDPPLLTRYLRIHPQSWVHQIALRMEVLGCEAQDLY

SEQ ID NO: 225 - DNA, 4371 bp, synthetic construct
  misc_feature 1..4371: note = Variant of human B-domain deleted Factor VIII
  source 1..4371: mol_type = other DNA
atgcagattgaactgtctacctgcttcttcctctgtttgctgaggttctgctttagcgccactagacggtactaccttggcgctgtggagctgtcctgggactatatgcagagtgatttgggagagcttcccgtcgacgcacgatttcctcctcgcgttccaaagtcatttcccttcaacacaagcgtggtgtacaagaagacgctcttcgtcgaattcaccgatcacctgttcaatatcgccaaacccagaccaccatggatgggtcttttggggcctaccatacaagcggaggtgtatgacacagttgttatcactctcaagaacatggcttctcatccggtaagtcttcacgcagtgggcgtgtcctactggaaagcttcagaaggagccgagtatgatgatcagacatcccagagggagaaagaagacgacaaggtatttccaggtgggtctcatacctatgtgtggcaagtgctcaaagagaatggccctatggcaagcgatccgccgtgtttgacttacagctacctttcacacgttgacctcgtcaaggacctcaactccgggttgattggagccttgttggtatgcagggaaggatctcttgccaaagagaagacacagaccctccacaagtttatccttctctttgctgtgttcgatgagggcaaaagttggcatagcgaaacgaagaattccctcatgcaggatcgcgacgcagccagcgccagagcttggcccaagatgcacactgtgaacggatatgtcaataggtcacttcctggcttgattgggtgtcatcggaaaagtgtctactggcacgtgatcggaatggggacaacaccagaggtccactccatatttctcgaaggccataccttccttgttcgaaaccacagacaggcatccttggagatctctcccattacctttctcactgcccaaacgctccttatggacttgggtcagttccttctcttctgccatatcagctcacaccagcatgatggtatggaagcttatgtgaaagtcgacagttgtcctgaggagccacagttgcgcatgaagaataatgaagaagcggaggattacgacgacgatctcaccgattctgagatggacgtggtgaggtttgatgacgacaactctccctccttcattcaaatccggagcgtggcgaagaaacaccccaagacttgggtccactatatagcggcggaagaggaggattgggattacgctcctcttgtattggcaccagatgaccgctcatacaaaagccagtacctcaacaacggaccgcagagaattggccggaagtataagaaagtgcgatttatggcctatacagacgaaacctttaagacaagggaggccatccagcatgagagtgggattttgggacctcttctttacggcgaagttggtgataccctcctcatcatcttcaagaatcaagcttctcgcccctataacatttacccacacgggatcactgacgttaggcctttgtatagcagaagacttcccaaaggcgtgaagcatctcaaagacttccccattttgccaggcgagatctttaagtacaaatggaccgtcacagtggaagatggaccgactaaatcagaccctcgatgccttacgcggtactattcctccttcgtgaatatggagagagatttggcaagcggactcataggaccactcctcatctgttacaaggaatctgtagaccagaggggtaaccagattatgagtgataaacgcaatgtgatcctttttagcgtcttcgacgagaaccggtcctggtacttgaccgagaatatacaaaggttccttcccaaccccgcaggcgttcagttggaagaccctgagtttcaggccagcaatattatgcactcaatcaacggctatgtgtttgatagtctccagctttctgtttgcctccatgaagtagcctattggtacatcttgtcaattggtgctcaaacagacttcctctccgtcttcttctccggctacacctttaagcacaagatggtgtatgaggacactctcacactctttccattttctggagaaaccgtgttcatgagcatggagaatccaggcctttggatcttgggttgccacaacagtgattttcgcaatcggggaatgactgctctcctcaaagtcagcagctgtgataagaacacaggcgactattacgaagattcttacgaggacataagtgcctacttgttgtccaagaataacgccattgagcccagatcattctcccagaatcctcccgtgcttaaaaggcatcagcgcgaaatcaccagaactactcttcagtctgatcaagaggagattgactatgacgactatataagcgtcgaaacgaagatggaggatttcgatatctatgacgaagatgagaaccagtctccgcggagctttcagaagaagacgcgacactacttcattgcagcagtcgaaaggctttgggactacggtatgtcatcatcccctcatgtgttgcgcaatagagctcagagtggaagtgttccacagttcaagaaagtcgtctttcaagagtttacagatggcagcttcacacagcctctctatcggggcgagcttaacgaacatttgggactccttggtccctatatccgagccgaagtggaggacaacattatggttacctttaggaatcaagcctctcgcccctacagcttctactcctccctcatcagttatgaggaggatcagagacaaggcgctgaaccacggaagaactttgtgaaaccgaatgagacgaagacctacttctggaaagtacagcaccacatggcccccacaaaagacgaattcgattgcaaagcatgggcgtatttttcagacgttgacttggagaaagatgtacattcaggacttattggtcctttgttggtgtgtcacactaacactctcaatccagcccatggcaggcaggtgacagtccaggaattcgctcttttctttaccatctttgatgagaccaagtcctggtacttcacggaaaacatggagcgcaattgcagagccccctgtaacatacagatggaggaccctacctttaaggaaaattatcggttccacgcaatcaacggatacattatggatacactccctggccttgtgatggctcaggaccaacgaatcaggtggtacctcctcagcatgggttctaatgagaacatacactccattcacttttcaggacatgtgttcactgtccggaagaaagaagagtataagatggccctctacaatttgtatccaggcgtgtttgagaccgttgaaatgcttccctctaaagctggcatctggagagtagagtgcttgatcggagaacatcttcacgcaggtatgagcaccttgttcctcgtgtacagcaacaaatgtcagaccccacttggcatggccagtggacacattcgcgactttcagatcacagcatctggccagtatggacaatgggccccaaagttggctcgcctccattactccggtagcataaatgcgtggtccactaaagaacctttcagctggattaaggtcgatcttcttgcccccatgatcatccacggcattaagacacagggagcgaggcagaaattctcctccctctacatctcacagttcattattatgtatagtttggacggcaagaagtggcaaacttatagaggtaacagtactggaacactcatggtgttcttcggcaacgttgatagctctggcatcaaacacaacatctttaatcctcccataatagctcggtacatcagattgcatccgacccactacagcattaggagtacactccgaatggagcttatgggttgcgacttgaattcctgttcaatgccactcggaatggagtctaaagccatctctgatgcacagataaccgccagtagctactttacgaacatgtttgctacgtggtcaccctctaaggcaaggcttcatttgcaaggccggtctaatgcctggagacctcaggtgaacaacccgaaagaatggctccaggtggactttcagaagaccatgaaagtaacaggtgtcactactcagggagttaagtccttgctcaccagcatgtatgtgaaggagttccttatttcctcatcacaagatggccaccagtggaccctcttctttcagaatggtaaggtcaaagtgtttcagggcaatcaagacagcttcacacccgtggtgaacagtcttgatcctccactcttgacacgataccttcgaatccatccacagtcttgggttcaccagattgcattgcgcatggaagtacttggatgcgaggctcaggacctctac

SEQ ID NO: 226 - protein, 1457 aa, synthetic construct
  REGION 1..1457: note = Variant of human B-domain deleted Factor VIII
MQIELSTCFFLCLLRFCFSATRRYYLGAVELSWDYMQSDLGELPVDARFPPRVPKSFPFNTSVVYKKTLFVEFTDHLFNIAKPRPPWMGLLGPTIQAEVYDTVVITLKNMASHPVSLHAVGVSYWKASEGAEYDDQTSQREKEDDKVFPGGSHTYVWQVLKENGPMASDPPCLTYSYLSHVDLVKDLNSGLIGALLVCREGSLAKEKTQTLHKFILLFAVFDEGKSWHSETKNSLMQDRDAASARAWPKMHTVNGYVNRSLPGLIGCHRKSVYWHVIGMGTTPEVHSIFLEGHTFLVRNHRQASLEISPITFLTAQTLLMDLGQFLLFCHISSHQHDGMEAYVKVDSCPEEPQLRMKNNEEAEDYDDDLTDSEMDVVRFDDDNSPSFIQIRSVAKKHPKTWVHYIAAEEEDWDYAPLVLAPDDRSYKSQYLNNGPQRIGRKYKKVRFMAYTDETFKTREAIQHESGILGPLLYGEVGDTLLIIFKNQASRPYNIYPHGITDVRPLYSRRLPKGVKHLKDFPILPGEIFKYKWTVTVEDGPTKSDPRCLTRYYSSFVNMERDLASGLIGPLLICYKESVDQRGNQIMSDKRNVILFSVFDENRSWYLTENIQRFLPNPAGVQLEDPEFQASNIMHSINGYVFDSLQLSVCLHEVAYWYILSIGAQTDFLSVFFSGYTFKHKMVYEDTLTLFPFSGETVFMSMENPGLWILGCHNSDFRNRGMTALLKVSSCDKNTGDYYEDSYEDISAYLLSKNNAIEPRSFSQNPPVLKRHQREITRTTLQSDQEEIDYDDYISVETKMEDFDIYDEDENQSPRSFQKKTRHYFIAAVERLWDYGMSSSPHVLRNRAQSGSVPQFKKVVFQEFTDGSFTQPLYRGELNEHLGLLGPYIRAEVEDNIMVTFRNQASRPYSFYSSLISYEEDQRQGAEPRKNFVKPNETKTYFWKVQHHMAPTKDEFDCKAWAYFSDVDLEKDVHSGLIGPLLVCHTNTLNPAHGRQVTVQEFALFFTIFDETKSWYFTENMERNCRAPCNIQMEDPTFKENYRFHAINGYIMDTLPGLVMAQDQRIRWYLLSMGSNENIHSIHFSGHVFTVRKKEEYKMALYNLYPGVFETVEMLPSKAGIWRVECLIGEHLHAGMSTLFLVYSNKCQTPLGMASGHIRDFQITASGQYGQWAPKLARLHYSGSINAWSTKEPFSWIKVDLLAPMIIHGIKTQGARQKFSSLYISQFIIMYSLDGKKWQTYRGNSTGTLMVFFGNVDSSGIKHNIFNPPIIARYIRLHPTHYSIRSTLRMELMGCDLNSCSMPLGMESKAISDAQITASSYFTNMFATWSPSKARLHLQGRSNAWRPQVNNPKEWLQVDFQKTMKVTGVTTQGVKSLLTSMYVKEFLISSSQDGHQWTLFFQNGKVKVFQGNQDSFTPVVNSLDPPLLTRYLRIHPQSWVHQIALRMEVLGCEAQDLY

SEQ ID NO: 227 - DNA, 4371 bp, synthetic construct
  misc_feature 1..4371: note = Variant of human B-domain deleted Factor VIII
  source 1..4371: mol_type = other DNA
atgcagattgaactgtctacctgcttcttcctctgtttgctgaggttctgctttagcgccactagacggtactaccttggcgctgtggagctgtcctgggactatatgcagagtgatttgggagagcttcccgtcgacgcacgatttcctcctcgcgttccaaagtcatttcccttcaacacaagcgtggtgtacaagaagacgctcttcgtcgaattcaccgatcacctgttcaatatcgccaaacccagaccaccatggatgggtcttttggggcctaccatacaagcggaggtgtatgacacagttgttatcactctcaagaacatggcttctcatccggtaagtcttcacgcagtgggcgtgtcctactggaaagcttcagaaggagccgagtatgatgatcagacatcccagagggagaaagaagacgacaaggtatttccaggtgggtctcatacctatgtgtggcaagtgctcaaagagaatggccctatggcaagcgatccgctctgtttgacttacagctacctttcacacgttgacctcgtcaaggacctcaactccgggttgattggagccttgttggtatgcagggaaggatctcttgccaaagagaagacacagaccctccacaagtttatccttctctttgctgtgttcgatgagggcaaaagttggcatagcgaaacgaagaattccctcatgcaggatcgcgacgcagccagcgccagagcttggcccaagatgcacactgtgaacggatatgtcaataggtcacttcctggcttgattgggtgtcatcggaaaagtgtctactggcacgtgatcggaatggggacaacaccagaggtccactccatatttctcgaaggccataccttccttgttcgaaaccacagacaggcatccttggagatctctcccattacctttctcactgcccaaacgctccttatggacttgggtcagttccttctcttctgccatatcagctcacaccagcatgatggtatggaagcttatgtgaaagtcgacagttgtcctgaggagccacagttgcgcatgaagaataatgaagaagccgaggattacgacgacgatctcaccgattctgagatggacgtggtgaggtttgatgacgacaactctccctccttcattcaaatccggagcgtggcgaagaaacaccccaagacttgggtccactatatagcggcggaagaggaggattgggattacgctcctcttgtattggcaccagatgaccgctcatacaaaagccagtacctcaacaacggaccgcagagaattggccggaagtataagaaagtgcgatttatggcctatacagacgaaacctttaagacaagggaggccatccagcatgagagtgggattttgggacctcttctttacggcgaagttggtgataccctcctcatcatcttcaagaatcaagcttctcgcccctataacatttacccacacgggatcactgacgttagtcctttgtatagcagaagacttcccaaaggcgtgaagcatctcaaagacttccccattttgccaggcgagatctttaagtacaaatggaccgtcacagtggaagatggaccgactaaatcagaccctcgatgccttacgcggtactattcctccttcgtgaatatggagagagatttggcaagcggactcataggaccactcctcatctgttacaaggaatctgtagaccagaggggtaaccagattatgagtgataaacgcaatgtgatcctttttagcgtcttcgacgagaaccggtcctggtacttgaccgagaatatacaaaggttccttcccaaccccgcaggcgttcagttggaagaccctgagtttcaggccagcaatattatgcactcaatcaacggctatgtgtttgatagcctccagctttctgtttgcctccatgaagtagcctattggtacatcttgtcaattggtgctcaaacagacttcctctccgtcttcttctccggctacacctttaagcacaagatggtgtatgaggacactctcacactctttccattttctggagaaaccgtgttcatgagcatggagaatccaggcctttggatcttgggttgccacaacagtgattttcgcaatcggggaatgactgctctcctcaaagtcagcagctgtgataaaaacacaggcgactattacgaagattcttacgaggacataagtgcctacttgttgtccaagaataacgccattgagcccagatcattctcccagaatcctcccgtgcttaaaaggcatcagcgcgaaatcaccagaactactcttcagtctgatcaagaggagattgactatgacgacaccataagcgtggaaatgaagaaggaggatttcgatatctatgacgaagatgagaaccagtctccgcggagctttcagaagaagacgcgacactacttcattgcagcagtcgaaaggctttgggactacggtatgtcatcatcccctcatgtgttgcgcaatagagctcagagtggaagtgttccacagttcaagaaagtcgtctttcaagagtttacagatggcagcttcacacagcctctctatcggggcgagcttaacgaacatttgggactccttggtccctatatccgagccgaagtggaggacaacattatggttacctttaggaatcaagcctctcgcccctacagcttctactcctccctcatcagttatgaggaggatcagagacaaggcgctgaaccacggaagaactttgtgaaaccgaatgagacgaagacctacttctggaaagtacagcaccacatggcccccacaaaagacgaattcgattgcaaagcatgggcgtatttttcagacgttgacttggagaaagatgtacattcaggacttattggtcctttgttggtgtgtcacactaacactctcaatccagcccatggcaggcaggtgacagtccaggaattcgctcttttctttaccatctttgatgagaccaagtcctggtacttcacggaaaacatggagcgcaattgcagagccccctgtaacatacagatggaggaccctacctttaaggaaaattatcggttccacgcaatcaacggatacattatggatacactccctggccttgtgatggctcaggaccaacgaatcaggtggtacctcctcagcatgggttctaatgagaacatacactccattcacttttcaggacatgtgttcactgtccggaagaaagaagagtataagatggccctctacaatttgtatccaggcgtgtttgagaccgttgaaatgcttccctctaaagctggcatctggagagtagagtgcttgatcggagaacatcttcacgcaggtatgagcaccttgttcctcgtgtacagcaacaaatgtcagaccccacttggcatggccagtggacacattcgcgactttcagatcacagcatctggccagtatggacaatgggccccaaagttggctcgcctccattactccggtagcataaatgcgtggtccactaaagaacctttcagctggattaaggtcgatcttcttgcccccatgatcatccacggcattaagacacagggagcgaggcagaaattctcctccctctacatctcacagttcattattatgtatagtttggacggcaagaagtggcaaacttatagaggtaacagtactggaacactcatggtgttcttcggcaacgttgatagctctggcatcaaacacaacatctttaatcctcccataatagctcggtacatcagattgcatccgacccactacagcattaggagtacactccgaatggagcttatgggttgcgacttgaattcctgttcaatgccactcggaatggagtctaaagccatctctgatgcacagataaccgccagtagctactttacgaacatgtttgctacgtggtcaccctctaaggcaaggcttcatttgcaaggccggtctaatgcctggagacctcaggtgaacaacccgaaagaatggctccaggtggactttcagaagaccatgaaagtaacaggtgtcactactcagggagttaagtccttgctcaccagcatgtatgtgaaggagttccttatttcctcatcacaagatggccaccagtggaccctcttctttcagaatggtaaggtcaaagtgtttcagggcaatcaagacagcttcacacccgtggtgaacagtcttgatcctccactcttgacacgataccttcgaatccatccacagtcttgggttcaccagattgcattgcgcatggaagtacttggatgcgaggctcaggacctctac

SEQ ID NO: 228 - protein, 1457 aa, synthetic construct
  REGION 1..1457: note = Variant of human B-domain deleted Factor VIII
MQIELSTCFFLCLLRFCFSATRRYYLGAVELSWDYMQSDLGELPVDARFPPRVPKSFPFNTSVVYKKTLFVEFTDHLFNIAKPRPPWMGLLGPTIQAEVYDTVVITLKNMASHPVSLHAVGVSYWKASEGAEYDDQTSQREKEDDKVFPGGSHTYVWQVLKENGPMASDPLCLTYSYLSHVDLVKDLNSGLIGALLVCREGSLAKEKTQTLHKFILLFAVFDEGKSWHSETKNSLMQDRDAASARAWPKMHTVNGYVNRSLPGLIGCHRKSVYWHVIGMGTTPEVHSIFLEGHTFLVRNHRQASLEISPITFLTAQTLLMDLGQFLLFCHISSHQHDGMEAYVKVDSCPEEPQLRMKNNEEAEDYDDDLTDSEMDVVRFDDDNSPSFIQIRSVAKKHPKTWVHYIAAEEEDWDYAPLVLAPDDRSYKSQYLNNGPQRIGRKYKKVRFMAYTDETFKTREAIQHESGILGPLLYGEVGDTLLIIFKNQASRPYNIYPHGITDVSPLYSRRLPKGVKHLKDFPILPGEIFKYKWTVTVEDGPTKSDPRCLTRYYSSFVNMERDLASGLIGPLLICYKESVDQRGNQIMSDKRNVILFSVFDENRSWYLTENIQRFLPNPAGVQLEDPEFQASNIMHSINGYVFDSLQLSVCLHEVAYWYILSIGAQTDFLSVFFSGYTFKHKMVYEDTLTLFPFSGETVFMSMENPGLWILGCHNSDFRNRGMTALLKVSSCDKNTGDYYEDSYEDISAYLLSKNNAIEPRSFSQNPPVLKRHQREITRTTLQSDQEEIDYDDTISVEMKKEDFDIYDEDENQSPRSFQKKTRHYFIAAVERLWDYGMSSSPHVLRNRAQSGSVPQFKKVVFQEFTDGSFTQPLYRGELNEHLGLLGPYIRAEVEDNIMVTFRNQASRPYSFYSSLISYEEDQRQGAEPRKNFVKPNETKTYFWKVQHHMAPTKDEFDCKAWAYFSDVDLEKDVHSGLIGPLLVCHTNTLNPAHGRQVTVQEFALFFTIFDETKSWYFTENMERNCRAPCNIQMEDPTFKENYRFHAINGYIMDTLPGLVMAQDQRIRWYLLSMGSNENIHSIHFSGHVFTVRKKEEYKMALYNLYPGVFETVEMLPSKAGIWRVECLIGEHLHAGMSTLFLVYSNKCQTPLGMASGHIRDFQITASGQYGQWAPKLARLHYSGSINAWSTKEPFSWIKVDLLAPMIIHGIKTQGARQKFSSLYISQFIIMYSLDGKKWQTYRGNSTGTLMVFFGNVDSSGIKHNIFNPPIIARYIRLHPTHYSIRSTLRMELMGCDLNSCSMPLGMESKAISDAQITASSYFTNMFATWSPSKARLHLQGRSNAWRPQVNNPKEWLQVDFQKTMKVTGVTTQGVKSLLTSMYVKEFLISSSQDGHQWTLFFQNGKVKVFQGNQDSFTPVVNSLDPPLLTRYLRIHPQSWVHQIALRMEVLGCEAQDLY

SEQ ID NO: 229 - DNA, 4371 bp, synthetic construct
  misc_feature 1..4371: note = Variant of human B-domain deleted Factor VIII
  source 1..4371: mol_type = other DNA
atgcagattgaactgtctacctgcttcttcctctgtttgctgaggttctgctttagcgccactagacggtactaccttggcgctgtggagctgtcctgggactatatgcagagtgatttgggagagcttcccgtcgacgcacgatttcctcctcgcgttccaaagtcatttcccttcaacacaagcgtggtgtacaagaagacgctcttcgtcgaattcaccgatcacctgttcaatatcgccaaacccagaccaccatggatgggtcttttggggcctaccatacaagcggaggtgtatgacacagttgttatcactctcaagaacatggcttctcatccggtaagtcttcacgcagtgggcgtgtcctactggaaagcttcagaaggagccgagtatgatgatcagacatcccagagggagaaagaagacgacaaggtatttccaggtgggtctcatacctatgtgtggcaagttctcaaagagaatggccctatggcaagcgatccgccgtgtttgacttacagctacctttcacacgttgacctcgtcaaggacctcaactccgggttgattggagccttgttggtatgcagggaaggatctcttgccaaagagaagacacagaccctccacaagtttatccttctctttgctgtgttcgatgagggcaaaagttggcatagcgaaacgaagaattccctcatgcaggatcgcgacgcagccagcgccagagcttggcccaagatgcacactgtgaacggatatgtcaataggtcacttcctggcttgattgggtgtcatcggaaaagtgtctactggcacgtgatcggaatggggacaacaccagaggtccactccatatttctcgaaggccataccttccttgttcgaaaccacagacaggcatccttggagatctctcccattacctttctcactgcccaaacgctccttatggacttgggtcagttccttctcttctgccatatcagctcacaccagcatgatggtatggaagcttatgtgaaagtcgacagttgtcctgaggagccacagttgcgcatgaagaataatgaagaagccgaggattacgacgacgatctcaccgattctgagatggacgtggtgaggtttgatgacgacaactctccctccttcattcaaatccggagcgtggcgaagaaacaccccaagacttgggtccactatatagcggcggaagaggaggattgggattacgctcctcttgtattggcaccagatgaccgctcatacaaaagccagtacctcaacaacggaccgcagagaattggccggaagtataagaaagtgcgatttatggcctatacagacgaaacctttaagacaagggaggccatccagcatgagagtgggattttgggacctcttctttacggcgaagttggtgataccctcctcatcatcttcaagaatcaagcttctcgcccctataacatttacccacacgggatcactgacgttaggcctttgtatagcagaagacttcccaaaggcgtgaagcatctcaaagacttccccattttgccaggcgagatctttaagtacaaatggaccgtcacagtggaagatggaccgactaaatcagaccctcgatgccttacgcggtactattcctccttcgtgaatatggagagagatttggcaagcggactcataggaccactcctcatctgttacaaggaatctgtagaccagaggggtaaccagattatgagtgataaacgcaatgtgatcctttttagcgtcttcgacgagaaccggtcctggtacttgaccgagaatatacaaaggttccttcccaaccccgcaggcgttcagttggaagaccctgagtttcaggccagcaatattatgcactcaatcaacggctatgtgtttgatagtctccagctttctgtttgcctccatgaagtagcctattggtacatcttgtcaattggtgctcaaacagacttcctctccgtcttcttctccggctacacctttaagcacaagatggtgtatgaggacactctcacactctttccattttctggagaaaccgtgttcatgagcatggagaatccaggcctttggatcttgggttgccacaacagtgattttcgcaatcggggaatgactgctctcctcaaagtcagcagctgtgatgaaaacacaggcgactattacgaagattcttacgaggacataagtgcctacttgttgtccaagaataacgccattgagcccagatcattctcccagaatcctcccgtgcttaaaaggcatcagcgcgaaatcaccagaactactcttcagtctgatcaagaggagattgactatgacgacaccataagcgtggaaatgaagaaggaggatttcgatatctatgacgaagatgagaaccagtctccgcggagctttcagaagaagacgcgacactacttcattgcagcagtcgaaaggctttgggactacggtatgtcatcatcccctcatgtgttgcgcaatagagctcagagtggaagtgttccacagttcaagaaagtcgtctttcaagagtttacagatggcagcttcacacagcctctctatcggggcgagcttaacgaacatttgggactccttggtccctatatccgagccgaagtggaggacaacattatggttacctttaggaatcaagcctctcgcccctacagcttctactcctccctcatcagttatgaggaggatcagagacaaggcgctgaaccacggaagaactttgtgaaaccgaatgagacgaagacctacttctggaaagtacagcaccacatggcccccacaaaagacgaattcgattgcaaagcatgggcgtatttttcagacgttgacttggagaaagatgtacattcaggacttattggtcctttgttggtgtgtcacactaacactctcaatccagcccatggcaggcaggtgacagtccaggaattcgctcttttctttaccatctttgatgagaccaagtcctggtacttcacggaaaacatggagcgcaattgcagagccccctgtaacatacagatggaggaccctacctttaaggaaaattatcggttccacgcaatcaacggatacattatggatacactccctggccttgtgatggctcaggaccaacgaatcaggtggtacctcctcagcatgggttctaatgagaacatacactccattcacttttcaggacatgtgttcactgtccggaagaaagaagagtataagatggccctctacaatttgtatccaggcgtgtttgagaccgttgaaatgcttccctctaaagctggcatctggagagtagagtgcttgatcggagaacatcttcacgcaggtatgagcaccttgttcctcgtgtacagcaacaaatgtcagaccccacttggcatggccagtggacacattcgcgactttcagatcacagcatctggccagtatggacaatgggccccaaagttggctcgcctccattactccggtagcataaatgcgtggtccactaaagaacctttcagctggattaaggtcgatcttcttgcccccatgatcatccacggcattaagacacagggagcgaggcagaaattctcctccctctacatctcacagttcattattatgtatagtttggacggcaagaagtggcaaacttatagaggtaacagtactggaacactcatggtgttcttcggcaacgttgatagctctggcatcaaacacaacatctttaatcctcccataatagctcggtacatcagattgcatccgacccactacagcattaggagtacactccgaatggagcttatgggttgcgacttgaattcctgttcaatgccactcggaatggagtctaaagccatctctgatgcacagataaccgccagtagctactttacgaacatgtttgctacgtggtcaccctctaaggcaaggcttcatttgcaaggccggtctaatgcctggagacctcaggtgaacaacccgaaagaatggctccaggtggactttcagaagaccatgaaagtaacaggtgtcactactcagggagttaagtccttgctcaccagcatgtatgtgaaggagttccttatttcctcatcacaagatggccaccagtggaccctcttctttcagaatggtaaggtcaaagtgtttcagggcaatcaagacagcttcacacccgtggtgaacagtcttgatcctccactcttgacacgataccttcgaatccatccacagtcttgggttcaccagattgcattgcgcatggaagtacttggatgcgaggctcaggacctctac

SEQ ID NO: 230 - protein, 1457 aa, synthetic construct
  REGION 1..1457: note = Variant of human B-domain deleted Factor VIII
MQIELSTCFFLCLLRFCFSATRRYYLGAVELSWDYMQSDLGELPVDARFPPRVPKSFPFNTSVVYKKTLFVEFTDHLFNIAKPRPPWMGLLGPTIQAEVYDTVVITLKNMASHPVSLHAVGVSYWKASEGAEYDDQTSQREKEDDKVFPGGSHTYVWQVLKENGPMASDPPCLTYSYLSHVDLVKDLNSGLIGALLVCREGSLAKEKTQTLHKFILLFAVFDEGKSWHSETKNSLMQDRDAASARAWPKMHTVNGYVNRSLPGLIGCHRKSVYWHVIGMGTTPEVHSIFLEGHTFLVRNHRQASLEISPITFLTAQTLLMDLGQFLLFCHISSHQHDGMEAYVKVDSCPEEPQLRMKNNEEAEDYDDDLTDSEMDVVRFDDDNSPSFIQIRSVAKKHPKTWVHYIAAEEEDWDYAPLVLAPDDRSYKSQYLNNGPQRIGRKYKKVRFMAYTDETFKTREAIQHESGILGPLLYGEVGDTLLIIFKNQASRPYNIYPHGITDVRPLYSRRLPKGVKHLKDFPILPGEIFKYKWTVTVEDGPTKSDPRCLTRYYSSFVNMERDLASGLIGPLLICYKESVDQRGNQIMSDKRNVILFSVFDENRSWYLTENIQRFLPNPAGVQLEDPEFQASNIMHSINGYVFDSLQLSVCLHEVAYWYILSIGAQTDFLSVFFSGYTFKHKMVYEDTLTLFPFSGETVFMSMENPGLWILGCHNSDFRNRGMTALLKVSSCDENTGDYYEDSYEDISAYLLSKNNAIEPRSFSQNPPVLKRHQREITRTTLQSDQEEIDYDDTISVEMKKEDFDIYDEDENQSPRSFQKKTRHYFIAAVERLWDYGMSSSPHVLRNRAQSGSVPQFKKVVFQEFTDGSFTQPLYRGELNEHLGLLGPYIRAEVEDNIMVTFRNQASRPYSFYSSLISYEEDQRQGAEPRKNFVKPNETKTYFWKVQHHMAPTKDEFDCKAWAYFSDVDLEKDVHSGLIGPLLVCHTNTLNPAHGRQVTVQEFALFFTIFDETKSWYFTENMERNCRAPCNIQMEDPTFKENYRFHAINGYIMDTLPGLVMAQDQRIRWYLLSMGSNENIHSIHFSGHVFTVRKKEEYKMALYNLYPGVFETVEMLPSKAGIWRVECLIGEHLHAGMSTLFLVYSNKCQTPLGMASGHIRDFQITASGQYGQWAPKLARLHYSGSINAWSTKEPFSWIKVDLLAPMIIHGIKTQGARQKFSSLYISQFIIMYSLDGKKWQTYRGNSTGTLMVFFGNVDSSGIKHNIFNPPIIARYIRLHPTHYSIRSTLRMELMGCDLNSCSMPLGMESKAISDAQITASSYFTNMFATWSPSKARLHLQGRSNAWRPQVNNPKEWLQVDFQKTMKVTGVTTQGVKSLLTSMYVKEFLISSSQDGHQWTLFFQNGKVKVFQGNQDSFTPVVNSLDPPLLTRYLRIHPQSWVHQIALRMEVLGCEAQDLY

SEQ ID NO: 231 - DNA, 4371 bp, synthetic construct
  misc_feature 1..4371: note = Variant of human B-domain deleted Factor VIII
  source 1..4371: mol_type = other DNA
atgcagattgaactgtctacctgcttcttcctctgtttgctgaggttctgctttagcgccactagacggtactaccttggcgctgtggagctgtcctgggactatatgcagagtgatttgggagagcttcccgtcgacgcacgatttcctcctcgcgttccaaagtcatttcccttcaacacaagcgtggtgtacaagaagacgctcttcgtcgaattcaccgatcacctgttcaatatcgccaaacccagaccaccatggatgggtcttttggggcctaccatacaagcggaggtgtatgacacagttgttatcactctcaagaacatggcttctcatccggtaagtcttcacgcagtgggcgtgtcctactggaaagcttcagaaggagccgagtatgatgatcagacatcccagagggagaaagaagacgacaaggtatttccaggtgggtctcatacctatgtgtggcaagtgctcaaagagaatggccctatggcaagcgatccgctctgtttgacttacagctacctttcacacgttgacctcgtcaaggacctcaactccgggttgattggagccttgttggtatgcagggaaggatctcttgccaaagagaagacacagaccctccacaagtttatccttctctttgctgtgttcgatgagggcaaaagttggcatagcgaaacgaagaattccctcatgcaggatcgcgacgcagccagcgccagagcttggcccaagatgcacactgtgaacggatatgtcaataggtcacttcctggcttgattgggtgtcatcggaaaagtgtctactggcacgtgatcggaatggggacaacaccagaggtccactccatatttctcgaaggccataccttccttgttcgaaaccacagacaggcatccttggagatctctcccattacctttctcactgcccaaacgctccttatggacttgggtcagttccttctcttctgccatatcagctcacaccagcatgatggtatggaagcttatgtgaaagtcgacagttgtcctgaggagccacagttgcgcatgaagaataatgaagaagcggaggattacgacgacgatctcaccgattctgagatggacgtggtgaggtttgatgacgacaactctccctccttcattcaaatccggagcgtggcgaagaaacaccccaagacttgggtccactatatagcggcggaagaggaggattgggattacgctcctcttgtattggcaccagatgaccgctcatacaaaagccagtacctcaacaacggaccgcagagaattggccggaagtataagaaagtgcgatttatggcctatacagacgaaacctttaagacaagggaggccatccagcatgagagtgggattttgggacctcttctttacggcgaagttggtgataccctcctcatcatcttcaagaatcaagcttctcgcccctataacatttacccacacgggatcactgacgttaggcctttgtatagcagaagacttcccaaaggcgtgaagcatctcaaagacttccccattttgccaggcgagatctttaagtacaaatggaccgtcacagtggaagatggaccgactaaatcagaccctcgatgccttacgcggtactattcctccttcgtgaatatggagagagatttggcaagcggactcataggaccactcctcatctgttacaaggaatctgtagaccagaggggtaaccagattatgagtgataaacgcaatgtgatcctttttagcgtcttcgacgagaaccggtcctggtacttgaccgagaatatacaaaggttccttcccaaccccgcaggcgttcagttggaagaccctgagtttcaggccagcaatattatgcactcaatcaacggctatgtgtttgatagtctccagctttctgtttgcctccatgaagtagcctattggtacatcttgtcaattggtgctcaaacagacttcctctccgtcttcttctccggctacacctttaagcacaagatggtgtatgaggacactctcacactctttccattttctggagaaaccgtgttcatgagcatggagaatccaggcctttggatcttgggttgccacaacagtgattttcgcaatcggggaatgactgctctcctcaaagtcagcagctgtgataagaacacaggcgactattacgaagattcttacgaggacataagtgcctacttgttgtccaagaataacgccattgagcccagatcattctcccagaatcctcccgtgcttaaaaggcatcagcgcgaaatcaccagaactactcttcagtctgatcaagaggagattgactatgacgacaccataagcgtggaaatgaagaaggaggatttcgatatctatgacgaagatgagaaccagtctccgcggagctttcagaagaagacgcgacactacttcattgcagcagtcgaaaggctttgggactacggtatgtcatcatcccctcatgtgttgcgcaatagagctcagagtggaagtgttccacagttcaagaaagtcgtctttcaagagtttacagatggcagcttcacacagcctctctatcggggcgagcttaacgaacatttgggactccttggtccctatatccgagccgaagtggaggacaacattatggttacctttaggaatcaagcctctcgcccctacagcttctactcctccctcatcagttatgaggaggatcagagacaaggcgctgaaccacggaagaactttgtgaaaccgaatgagacgaagacctacttctggaaagtacagcaccacatggcccccacaaaagacgaattcgattgcaaagcatgggcgtatttttcagacgttgacttggagaaagatgtacattcaggacttattggtcctttgttggtgtgtcacactaacactctcaatccagcccatggcaggcaggtgacagtccaggaattcgctcttttctttaccatctttgatgagaccaagtcctggtacttcacggaaaacatggagcgcaattgcagagccccctgtaacatacagatggaggaccctacctttaaggaaaattatcggttccacgcaatcaacggatacattatggatacactccctggccttgtgatggctcaggaccaacgaatcaggtggtacctcctcagcatgggttctaatgagaacatacactccattcacttttcaggacatgtgttcactgtccggaagaaagaagagtataagatggccctctacaatttgtatccaggcgtgtttgagaccgttgaaatgcttccctctaaagctggcatctggagagtagagtgcttgatcggagaacatcttcacgcaggtatgagcaccttgttcctcgtgtacagcaacaaatgtcagaacccacttggcatggccagtggacacattcgcgactttcagatcacagcatctggccagtatggacaatgggccccaaagttggctcgcctccattactccggtagcataaatgcgtggtccactaaagaacctttaagctggattaaggtcgatcttcttgcccccatgatcatccacggcattaagacacagggagcgaggcagaaattctcctccctctacatctcacagttcattattatgtatagtttggacggcaagaagtggcaaacttatagaggtaacagtactggaacactcatggtgttcttcggcaacgttgatagctctggcatcaaacacaacatctttaatcctcccataatagctcggtacatcagattgcatccgacccactacagcattaggagtacactccgaatggagcttatgggttgcgacttgaattcctgttcaatgccactcggaatggagtctaaagccatctctgatgcacagataaccgccagtagctactttacgaacatgtttgctacgtggtcaccctctaaggcaaggcttcatttgcaaggccggtctaatgcctggagacctcaggtgaacaacccgaaagaatggctccaggtggactttcagaagaccatgaaagtaacaggtgtcactactcagggagttaagtccttgctcaccagcatgtatgtgaaggagttccttatttcctcatcacaagatggccaccagtggaccctcttctttcagaatggtaaggtcaaagtgtttcagggcaatcaagacagcttcacacccgtggtgaacagtcttgatcctccactcttgacacgataccttcgaatccatccacagtcttgggttcaccagattgcattgcgcatggaagtacttggatgcgaggctcaggacctctac

SEQ ID NO: 232 - protein, 1457 aa, synthetic construct
  REGION 1..1457: note = Variant of human B-domain deleted Factor VIII
MQIELSTCFFLCLLRFCFSATRRYYLGAVELSWDYMQSDLGELPVDARFPPRVPKSFPFNTSVVYKKTLFVEFTDHLFNIAKPRPPWMGLLGPTIQAEVYDTVVITLKNMASHPVSLHAVGVSYWKASEGAEYDDQTSQREKEDDKVFPGGSHTYVWQVLKENGPMASDPLCLTYSYLSHVDLVKDLNSGLIGALLVCREGSLAKEKTQTLHKFILLFAVFDEGKSWHSETKNSLMQDRDAASARAWPKMHTVNGYVNRSLPGLIGCHRKSVYWHVIGMGTTPEVHSIFLEGHTFLVRNHRQASLEISPITFLTAQTLLMDLGQFLLFCHISSHQHDGMEAYVKVDSCPEEPQLRMKNNEEAEDYDDDLTDSEMDVVRFDDDNSPSFIQIRSVAKKHPKTWVHYIAAEEEDWDYAPLVLAPDDRSYKSQYLNNGPQRIGRKYKKVRFMAYTDETFKTREAIQHESGILGPLLYGEVGDTLLIIFKNQASRPYNIYPHGITDVRPLYSRRLPKGVKHLKDFPILPGEIFKYKWTVTVEDGPTKSDPRCLTRYYSSFVNMERDLASGLIGPLLICYKESVDQRGNQIMSDKRNVILFSVFDENRSWYLTENIQRFLPNPAGVQLEDPEFQASNIMHSINGYVFDSLQLSVCLHEVAYWYILSIGAQTDFLSVFFSGYTFKHKMVYEDTLTLFPFSGETVFMSMENPGLWILGCHNSDFRNRGMTALLKVSSCDKNTGDYYEDSYEDISAYLLSKNNAIEPRSFSQNPPVLKRHQREITRTTLQSDQEEIDYDDTISVEMKKEDFDIYDEDENQSPRSFQKKTRHYFIAAVERLWDYGMSSSPHVLRNRAQSGSVPQFKKVVFQEFTDGSFTQPLYRGELNEHLGLLGPYIRAEVEDNIMVTFRNQASRPYSFYSSLISYEEDQRQGAEPRKNFVKPNETKTYFWKVQHHMAPTKDEFDCKAWAYFSDVDLEKDVHSGLIGPLLVCHTNTLNPAHGRQVTVQEFALFFTIFDETKSWYFTENMERNCRAPCNIQMEDPTFKENYRFHAINGYIMDTLPGLVMAQDQRIRWYLLSMGSNENIHSIHFSGHVFTVRKKEEYKMALYNLYPGVFETVEMLPSKAGIWRVECLIGEHLHAGMSTLFLVYSNKCQNPLGMASGHIRDFQITASGQYGQWAPKLARLHYSGSINAWSTKEPLSWIKVDLLAPMIIHGIKTQGARQKFSSLYISQFIIMYSLDGKKWQTYRGNSTGTLMVFFGNVDSSGIKHNIFNPPIIARYIRLHPTHYSIRSTLRMELMGCDLNSCSMPLGMESKAISDAQITASSYFTNMFATWSPSKARLHLQGRSNAWRPQVNNPKEWLQVDFQKTMKVTGVTTQGVKSLLTSMYVKEFLISSSQDGHQWTLFFQNGKVKVFQGNQDSFTPVVNSLDPPLLTRYLRIHPQSWVHQIALRMEVLGCEAQDLY

SEQ ID NO: 233 - DNA, 4371 bp, synthetic construct
  misc_feature 1..4371: note = Variant of human B-domain deleted Factor VIII
  source 1..4371: mol_type = other DNA
atgcagattgaactgtctacctgcttcttcctctgtttgctgaggttctgctttagcgccactagacggtactaccttggcgctgtggagctgtcctgggactatatgcagagtgatttgggagagcttcccgtcgacgcacgatttcctcctcgcgttccaaagtcatttcccttcaacacaagcgtggtgtacaagaagacgctcttcgtcgaattcaccgatcacctgttcaatatcgccaaacccagaccaccatggatgggtcttttggggcctaccatacgcgcggaggtgtatgacacagttgttatcactctcaagaacatggcttctcatccggtaagtcttcacgcagtgggcgtgtcctactggaaagcttcagaaggagccgagtatgatgatcagacatcccagagggagaaagaagacgacaaggtatttccaggtgggtctcatacctatgtgtggcaagtgctcaaagagaatggccctatggcaagcgatccgccgtgtttgacttacagctacctttcacacgttgacctcgtcaaggacctcaactccgggttgattggagccttgttggtatgcagggaaggatctcttgccaaagagaagacacagaccctccacaagtttatccttctctttgctgtgttcgatgagggcaaaagttggcatagcgaaacgaagaattccctcatgcaggatcgcgacgcagccagcgccagagcttggcccaagatgcacactgtgaacggatatgtcaataggtcacttcctggcttgattgggtgtcatcggaaaagtgtctactggcacgtgatcggaatggggacaacaccagaggtccactccatatttctcgaaggccataccttccttgttcgaaaccacagacaggcatccttggagatctctcccattacctttctcactgcccaaacgctccttatggacttgggtcagttccttctcttctgccatatcagctcacaccagcatgatggtatggaagcttatgtgaaagtcgacagttgtcctgaggagccacagttgcgcatgaagaataatgaagaagaggaggattacgacgacgatctcaccgattctgagatggacgtggtgaggtttgatgacgacaactctccctccttcattcaaatccggagcgtggcgaagaaacaccccaagacttgggtccactatatagcggcggaagaggaggattgggattacgctcctcttgtattggcaccagatgaccgctcatacaaaagcctgtacctcaacaacggaccgcagagaattggccggaagtataagaaagtgcgatttatggcctatacagacgaaacctttaagacaagggaggccatccagcatgagagtgggattttgggacctcttctttacggcgaagttggtgataccctcctcatcatcttcaagaatcaagcttctcgcccctataacatttacccacacgggatcactgacgttaggcctttgtatagcagaagacttcccaaaggcgtgaagcatctcaaagacttccccattttgccaggcgagatctttaagtacaaatggaccgtcacagtggaagatggaccgactaaatcagaccctcgatgccttacgcggtactattcctccttcgtgaatatggagagagatttggcaagcggactcataggaccactcctcatctgttacaaggaatctgtagaccagaggggtaaccagattatgagtgataaacgcaatgtgatcctttttagcgtcttcgacgagaaccggtcctggtacttgaccgagaatatacaaaggttccttcccaaccccgcaggcgttcagttggaagaccctgagtttcaggccagcaatattatgcactcaatcaacggctatgtgtttgatagtctccagctttctgtttgcctccatgaagtagcctattggtacatcttgtcaattggtgctcaaacagacttcctctccgtcttcttctccggctacacctttaagcacaagatggtgtatgaggacactctcacactctttccattttctggagaaaccgtgttcatgagcatggagaatccaggcctttggatcttgggttgccacaacagtgattttcgcaatcggggaatgactgctctcctcaaagtcagcagctgtgatcgcaacacaggcgactattacgaagattcttacgaggacataagtgcctacttgttgtccaagaataacgccattgagcccagatcattctcccagaatcctcccgtgcttaaaaggcatcagcgcgaaatcaccagaactactcttcagtctgatcaagaggagattgactatgacgacacgataagcaccgaacaaaagaaggaggatttcgatatctatgacgaagatgagaaccagtctccgcggagctttcagaagaagacgcgacactacttcattgcagcagtcgaaaggctttgggactacggtatgtcatcatcccctcatgtgttgcgcaatagagctcagagtggaagtgttccacagttcaagaaagtcgtctttcaagagtttacagatggcagcttcacacagcctctctatcggggcgagcttaacgaacatttgggactccttggtccctatatccgagccgaagtggaggacaacattatggttacctttaggaatcaagcctctcgcccctacagcttctactcctccctcatcagttatgaggaggatcagagacaaggcgctgaaccacggaagaactttgtgaaaccgaatgagacgaagacctacttctggaaagtacagcaccacatggcccccacaaaagacgaattcgattgcaaagcatgggcgtatttttcagacgttgacttggagaaagatgtacattcaggacttattggtcctttgttggtgtgtcacactaacactctcaatccagcccatggcaggcaggtgacagtccaggaattcgctcttttctttaccatctttgatgagaccaagtcctggtacttcacggaaaacatggagcgcaattgcagagccccctgtaacatacagatggaggaccctacctttaaggaaaattatcggttccacgcaatcaacggatacattatggatacactccctggccttgtgatggctcaggaccaacgaatcaggtggtacctcctcagcatgggttctaatgagaacatacactccattcacttttcaggacatgtgttcactgtccggaagaaagaagagtataagatggccctctacaatttgtatccaggcgtgtttgagaccgttgaaatgcttccctctaaagctggcatctggagagtagagtgcttgatcggagaacatcttcacgcaggtatgagcaccttgttcctcgtgtacagcaacaaatgtcagaccccacttggcatggccagtggacacattcgcgactttcagatcacagcatctggccagtatggacaatgggccccaaagttggctcgcctccattactccggtagcataaatgcgtggtccactaaagaacctttcagctggattaaggtcgatcttcttgcccccatgatcatccacggcattaagacacagggagcgaggcagaaattctcctccctctacatctcacagttcattattatgtatagtttggacggcaagaagtggcaaacttatagaggtaacagtactggaacactcatggtgttcttcggcaacgttgatagctctggcatcaaacacaacatctttaatcctcccataatagctcggtacatcagattgcatccgacccactacagcattaggagtacactccgaatggagcttatgggttgcgacttgaattcctgttcaatgccactcggaatggagtctaaagccatctctgatgcacagataaccgccagtagctactttacgaacatgtttgctacgtggtcaccctctaaggcaaggcttcatttgcaaggccggtctaatgcctggagacctcaggtgaacaacccgaaagaatggctccaggtggactttcagaagaccatgaaagtaacaggtgtcactactcagggagttaagtccttgctcaccagcatgtatgtgaaggagttccttatttcctcatcacaagatggccaccagtggaccctcttctttcagaatggtaaggtcaaagtgtttcagggcaatcaagacagcttcacacccgtggtgaacagtcttgatcctccactcttgacacgataccttcgaatccatccacagtcttgggttcaccagattgcattgcgcatggaagtacttggatgcgaggctcaggacctctac

SEQ ID NO: 234 - protein, 1457 aa, synthetic construct
  REGION 1..1457: note = Variant of human B-domain deleted Factor VIII
MQIELSTCFFLCLLRFCFSATRRYYLGAVELSWDYMQSDLGELPVDARFPPRVPKSFPFNTSVVYKKTLFVEFTDHLFNIAKPRPPWMGLLGPTIRAEVYDTVVITLKNMASHPVSLHAVGVSYWKASEGAEYDDQTSQREKEDDKVFPGGSHTYVWQVLKENGPMASDPPCLTYSYLSHVDLVKDLNSGLIGALLVCREGSLAKEKTQTLHKFILLFAVFDEGKSWHSETKNSLMQDRDAASARAWPKMHTVNGYVNRSLPGLIGCHRKSVYWHVIGMGTTPEVHSIFLEGHTFLVRNHRQASLEISPITFLTAQTLLMDLGQFLLFCHISSHQHDGMEAYVKVDSCPEEPQLRMKNNEEEEDYDDDLTDSEMDVVRFDDDNSPSFIQIRSVAKKHPKTWVHYIAAEEEDWDYAPLVLAPDDRSYKSLYLNNGPQRIGRKYKKVRFMAYTDETFKTREAIQHESGILGPLLYGEVGDTLLIIFKNQASRPYNIYPHGITDVRPLYSRRLPKGVKHLKDFPILPGEIFKYKWTVTVEDGPTKSDPRCLTRYYSSFVNMERDLASGLIGPLLICYKESVDQRGNQIMSDKRNVILFSVFDENRSWYLTENIQRFLPNPAGVQLEDPEFQASNIMHSINGYVFDSLQLSVCLHEVAYWYILSIGAQTDFLSVFFSGYTFKHKMVYEDTLTLFPFSGETVFMSMENPGLWILGCHNSDFRNRGMTALLKVSSCDRNTGDYYEDSYEDISAYLLSKNNAIEPRSFSQNPPVLKRHQREITRTTLQSDQEEIDYDDTISTEQKKEDFDIYDEDENQSPRSFQKKTRHYFIAAVERLWDYGMSSSPHVLRNRAQSGSVPQFKKVVFQEFTDGSFTQPLYRGELNEHLGLLGPYIRAEVEDNIMVTFRNQASRPYSFYSSLISYEEDQRQGAEPRKNFVKPNETKTYFWKVQHHMAPTKDEFDCKAWAYFSDVDLEKDVHSGLIGPLLVCHTNTLNPAHGRQVTVQEFALFFTIFDETKSWYFTENMERNCRAPCNIQMEDPTFKENYRFHAINGYIMDTLPGLVMAQDQRIRWYLLSMGSNENIHSIHFSGHVFTVRKKEEYKMALYNLYPGVFETVEMLPSKAGIWRVECLIGEHLHAGMSTLFLVYSNKCQTPLGMASGHIRDFQITASGQYGQWAPKLARLHYSGSINAWSTKEPFSWIKVDLLAPMIIHGIKTQGARQKFSSLYISQFIIMYSLDGKKWQTYRGNSTGTLMVFFGNVDSSGIKHNIFNPPIIARYIRLHPTHYSIRSTLRMELMGCDLNSCSMPLGMESKAISDAQITASSYFTNMFATWSPSKARLHLQGRSNAWRPQVNNPKEWLQVDFQKTMKVTGVTTQGVKSLLTSMYVKEFLISSSQDGHQWTLFFQNGKVKVFQGNQDSFTPVVNSLDPPLLTRYLRIHPQSWVHQIALRMEVLGCEAQDLY

SEQ ID NO: 235 - DNA, 4371 bp, synthetic construct
  misc_feature 1..4371: note = Variant of human B-domain deleted Factor VIII
  source 1..4371: mol_type = other DNA
atgcagattgaactgtctacctgcttcttcctctgtttgctgaggttctgctttagcgccactagacggtactaccttggcgctgtggagctgtcctgggactatatgcagagtgatttgggagagcttcccgtcgacgcacgatttcctcctcgcgttccaaagtcatttcccttcaacacaagcgtggtgtacaagaagacgctcttcgtcgaattcaccgatcacctgttcaatatcgccaaacccagaccaccatggatgggtcttttggggcctaccatacaagcggaggtgtatgacacagttgttatcactctcaagaacatggcttctcatccggtaagtcttcacgcagtgggcgtgtcctactggaaagcttcagaaggagccgagtatgatgatcagacatcccagagggagaaagaagacgacaaggtatttccaggtgggtctcatacctatgtgtggcaagtgctcaaagagaatggccctatggcaagcgatccgctctgtttgacttacagctacctttcacacgttgacctcgtcaaggacctcaactccgggttgattggagccttgttggtatgcagggaaggatctcttgccaaagagaagacacagaccctccacaagtttatccttctctttgctgtgttcgatgagggcaaaagttggcatagcgaaacgaagaattccctcatgcaggatcgcgacgcagccagcgccagagcttggcccaagatgcacactgtgaacggatatgtcaataggtcacttcctggcttgattgggtgtcatcggaaaagtgtctactggcacgtgatcggaatggggacaacaccagaggtccactccatatttctcgaaggccataccttccttgttcgaaaccacagacaggcatccttggagatctctcccattacctttctcactgcccaaacgctccttatggacttgggtcagttccttctcttctgccatatcagctcacaccagcatgatggtatggaagcttatgtgaaagtcgacagttgtcctgaggagccacagttgcgcatgaagaataatgaagaagccgaggattacgacgacgatctcaccgattctgagatggacgtggtgaggtttgatgacgacaactctccctccttcattcaaatccggagcgtggcgaagaaacaccccaagacttgggtccactatatagcggcggaagaggaggattgggattacgctcctcttgtattggcaccagatgaccgctcatacaaaagccagtacctcaacaacggaccgcagagaattggccggaagtataagaaagtgcgatttatggcctatacagacgaaacctttaagacaagggaggccatccagcatgagagtgggattttgggacctcttctttacggcgaagttggtgataccctcctcatcatcttcaagaatcaagcttctcgcccctataacatttacccacacgggatcactgacgttaggcctttgtatagcagaagacttcccaaaggcgtgaagcatctcaaagacttccccattttgccaggcgagatctttaagtacaaatggaccgtcacagtggaagatggaccgactaaatcagaccctcgatgccttacgcggtactattcctccttcgtgaatatggagagagatttggcaagcggactcataggaccactcctcatctgttacaaggaatctgtagaccagaggggtaaccagattatgagtgataaacgcaatgtgatcctttttagcgtcttcgacgagaaccggtcctggtacttgaccgagaatatacaaaggttccttcccaaccccgcaggcgttcagttggaagaccctgagtttcaggccagcaatattatgcactcaatcaacggctatgtgtttgatagtctccagctttctgtttgcctccatgaagtagcctattggtacatcttgtcaattggtgctcaaacagacttcctctccgtcttcttctccggctacacctttaagcacaagatggtgtatgaggacactctcacactctttccattttctggagaaaccgtgttcatgagcatggagaatccaggcctttggatcttgggttgccacaacagtgattttcgcaatcggggaatgactgctctcctcgcggtcagcagctgtgataagaacacaggcgactattacgaagattcttacgaggacataagtgcctacttgttgtccaagaataacgccattgagcccagatcattctcccagaatcctcccgtgcttaaaaggcatcagcgcgaaatcaccagaactactcttcagtctgatcaagaggagattgactatgacgacaccataagcgtggaaatgaagaaggaggatttcgatatctatgacgaagatgagaaccagtctccgcggagctttcagaagaagacgcgacactacttcattgcagcagtcgaaaggctttgggactacggtatgtcatcatcccctcatgtgttgcgcaatagagctcagagtggaagtgttccacagttcaagaaagtcgtctttcaagagtttacagatggcagcttcacacagcctctctatcggggcgagcttaacgaacatttgggactccttggtccctatatccgagccgaagtggaggacaacattatggttacctttaggaatcaagcctctcgcccctacagcttctactcctccctcatcagttatgaggaggatcagagacaaggcgctgaaccacggaagaactttgtgaaaccgaatgagacgaagacctacttctggaaagtacagcaccacatggcccccacaaaagacgaattcgattgcaaagcatgggcgtatttttcagacgttgacttggagaaagatgtacattcaggacttattggtcctttgttggtgtgtcacactaacactctcaatccagcccatggcaggcaggtgacagtccaggaattcgctcttttctttaccatctttgatgagaccaagtcctggtacttcacggaaaacatggagcgcaattgcagagccccctgtaacatacagatggaggaccctacctttaaggaaaattatcggttccacgcaatcaacggatacattatggatacactccctggccttgtgatggctcaggaccaacgaatcaggtggtacctcctcagcatgggttctaatgagaacatacactccattcacttttcaggacatgtgttcactgtccggaagaaagaagagtataagatggccctctacaatttgtatccaggcgtgtttgagaccgttgaaatgcttccctctaaagctggcatctggagagtagagtgcttgatcggagaacatcttcacgcaggtatgagcaccttgttcctcgtgtacagcaacaaatgtcagaccccacttggcatggccagtggacacattcgcgactttcagatcacagcatctggccagtatggacaatgggccccaaagttggctcgcctccattactccggtagcataaatgcgtggtccactaaagaacctttcagctggattaaggtcgatcttcttgcccccatgatcatccacggcattaagacacagggagcgaggcagaaattctcctccctctacatctcacagttcattattatgtatagtttggacggcaagaagtggcaaacttatagaggtaacagtactggaacactcatggtgttcttcggcaacgttgatagctctggcatcaaacacaacatctttaatcctcccataatagctcggtacatcagattgcatccgacccactacagcattaggagtacactccgaatggagcttatgggttgcgacttgaattcctgttcaatgccactcggaatggagtctaaagccatctctgatgcacagataaccgccagtagctactttacgaacatgtttgctacgtggtcaccctctaaggcaaggcttcatttgcaaggccggtctaatgcctggagacctcaggtgaacaacccgaaagaatggctccaggtggactttcagaagaccatgaaagtaacaggtgtcactactcagggagttaagtccttgctcaccagcatgtatgtgaaggagttccttatttcctcatcacaagatggccaccagtggaccctcttctttcagaatggtaaggtcaaagtgtttcagggcaatcaagacagcttcacacccgtggtgaacagtcttgatcctccactcttgacacgataccttcgaatccatccacagtcttgggttcaccagattgcattgcgcatggaagtacttggatgcgaggctcaggacctctac

SEQ ID NO: 236 - protein, 1457 aa, synthetic construct
  REGION 1..1457: note = Variant of human B-domain deleted Factor VIII
MQIELSTCFFLCLLRFCFSATRRYYLGAVELSWDYMQSDLGELPVDARFPPRVPKSFPFNTSVVYKKTLFVEFTDHLFNIAKPRPPWMGLLGPTIQAEVYDTVVITLKNMASHPVSLHAVGVSYWKASEGAEYDDQTSQREKEDDKVFPGGSHTYVWQVLKENGPMASDPLCLTYSYLSHVDLVKDLNSGLIGALLVCREGSLAKEKTQTLHKFILLFAVFDEGKSWHSETKNSLMQDRDAASARAWPKMHTVNGYVNRSLPGLIGCHRKSVYWHVIGMGTTPEVHSIFLEGHTFLVRNHRQASLEISPITFLTAQTLLMDLGQFLLFCHISSHQHDGMEAYVKVDSCPEEPQLRMKNNEEAEDYDDDLTDSEMDVVRFDDDNSPSFIQIRSVAKKHPKTWVHYIAAEEEDWDYAPLVLAPDDRSYKSQYLNNGPQRIGRKYKKVRFMAYTDETFKTREAIQHESGILGPLLYGEVGDTLLIIFKNQASRPYNIYPHGITDVRPLYSRRLPKGVKHLKDFPILPGEIFKYKWTVTVEDGPTKSDPRCLTRYYSSFVNMERDLASGLIGPLLICYKESVDQRGNQIMSDKRNVILFSVFDENRSWYLTENIQRFLPNPAGVQLEDPEFQASNIMHSINGYVFDSLQLSVCLHEVAYWYILSIGAQTDFLSVFFSGYTFKHKMVYEDTLTLFPFSGETVFMSMENPGLWILGCHNSDFRNRGMTALLAVSSCDKNTGDYYEDSYEDISAYLLSKNNAIEPRSFSQNPPVLKRHQREITRTTLQSDQEEIDYDDTISVEMKKEDFDIYDEDENQSPRSFQKKTRHYFIAAVERLWDYGMSSSPHVLRNRAQSGSVPQFKKVVFQEFTDGSFTQPLYRGELNEHLGLLGPYIRAEVEDNIMVTFRNQASRPYSFYSSLISYEEDQRQGAEPRKNFVKPNETKTYFWKVQHHMAPTKDEFDCKAWAYFSDVDLEKDVHSGLIGPLLVCHTNTLNPAHGRQVTVQEFALFFTIFDETKSWYFTENMERNCRAPCNIQMEDPTFKENYRFHAINGYIMDTLPGLVMAQDQRIRWYLLSMGSNENIHSIHFSGHVFTVRKKEEYKMALYNLYPGVFETVEMLPSKAGIWRVECLIGEHLHAGMSTLFLVYSNKCQTPLGMASGHIRDFQITASGQYGQWAPKLARLHYSGSINAWSTKEPFSWIKVDLLAPMIIHGIKTQGARQKFSSLYISQFIIMYSLDGKKWQTYRGNSTGTLMVFFGNVDSSGIKHNIFNPPIIARYIRLHPTHYSIRSTLRMELMGCDLNSCSMPLGMESKAISDAQITASSYFTNMFATWSPSKARLHLQGRSNAWRPQVNNPKEWLQVDFQKTMKVTGVTTQGVKSLLTSMYVKEFLISSSQDGHQWTLFFQNGKVKVFQGNQDSFTPVVNSLDPPLLTRYLRIHPQSWVHQIALRMEVLGCEAQDLY

SEQ ID NO: 237 - DNA, 4371 bp, synthetic construct
  misc_feature 1..4371: note = Variant of human B-domain deleted Factor VIII
  source 1..4371: mol_type = other DNA
atgcagattgaactgtctacctgcttcttcctctgtttgctgaggttctgctttagcgccactagacggtactaccttggcgctgtggagctgtcctgggactatatgcagagtgatttgggagagcttcccgtcgacgcacgatttcctcctcgcgttccaaagtcatttcccatgaacacaagcgtggtgtacaagaagacgctcttcgtcgaattcaccgatcacctgttcaatatcgccaaacccagaccaccatggatgggtcttttggggcctaccatacaagcggaggtgtatgacacagttgttatcactctcaagaacatggcttctcatccggtaagtcttcacgcagtgggcgtgtcctactggaaagcttcagaaggagccgagtatgatgatcagacatcccagagggagaaagaagacgacaaggtatttccaggtgggtctcatacctatgtgtggcaagtgctcaaagagaatggccctatggcaagcgatccgctctgtttgacttacagctacctttcacacgttgacctcgtcaaggacctcaactccgggttgattggagccttgttggtatgcagggaaggatctcttgccaaagagaagacacagaccctccacaagtttatccttctctttgctgtgttcgatgagggcaaaagttggcatagcgaaacgaagaattccctcatgcaggatcgcgacgcagccagcgccagagcttggcccaagatgcacactgtgaacggatatgtcaataggtcacttcctggcttgattgggtgtcatcggaaaagtgtctactggcacgtgatcggaatggggacaacaccagaggtccactccatatttctcgaaggccataccttccttgttcgaaaccacagacaggcatccttggagatctctcccattacctttctcactgcccaaacgctccttatggacttgggtcagttccttctcttctgccatatcagctcacaccagcatgatggtatggaagcttatgtgaaagtcgacagttgtcctgaggagccacagttgcgcatgaagaataatgaagaagccgaggattacgacgacgatctcaccgattctgagatggacgtggtgaggtttgatgacgacaactctccctccttcattcaaatccggagcgtggcgaagaaacaccccaagacttgggtccactatatagcggcggaagaggaggattgggattacgctcctcttgtattggcaccagatgaccgctcatacaaaagccagtacctcaacaacggaccgcagagaattggccggaagtataagaaagtgcgatttatggcctatacagacgaaacctttaagacaagggaggccatccagcatgagagtgggattttgggacctcttctttacggcgaagttggtgataccctcctcatcatcttcaagaatcaagcttctcgcccctataacatttacccacacgggatcactgacgttaggcctttgtatagcagaagacttcccaaaggcgtgaagcatctcaaagacttccccattttgccaggcgagatctttaagtacaaatggaccgtcacagtggaagatggaccgactaaatcagaccctcgatgccttacgcggtactattcctccttcgtgaatatggagagagatttggcaagcggactcataggaccactcctcatctgttacaaggaatctgtagaccagaggggtaaccagattatgagtgataaacgcaatgtgatcctttttagcgtcttcgacgagaaccggtcctggtacttgaccgagaatatacaaaggttccttcccaaccccgcaggcgttcagttggaagaccctgagtttcaggccagcaatattatgcactcaatcaacggctatgtgtttgatagtctccagctttctgtttgcctccatgaagtagcctattggtacatcttgtcaattggtgctcaaacagacttcctctccgtcttcttctccggctacacctttaagcacaagatggtgtatgaggacactctcacactctttccattttctggagaaaccgtgttcatgagcatggagaatccaggcctttggatcttgggttgccacaacagtgattttcgcaatcggggaatgactgctctcctcaaagtcagcagctgtgataagaacacaggcgactattacgaagattcttacgaggacataagtgcctacttgttgtccaagaataacgccattgagcccagatcattctcccagaatcctcccgtgcttaaaaggcatcagcgcgaaatcaccagaactactcttcagtctgatcaagaggagattgactatgacgacaccataagcgtggaaatgaagaaggaggatttcgatatctatgacgaagatgagaaccagtctccgcggagctttcagaagaagacgcgacactacttcattgcagcagtcgaaaggctttgggactacggtatgtcatcatcccctcatgtgttgcgcaatagagctcagagtggaagtgttccacagttcaagaaagtcgtctttcaagagtttacagatggcagcttcacacagcctctctatcggggcgagcttaacgaacatttgggactccttggtccctatatccgagccgaagtggaggacaacattatggttacctttaggaatcaagcctctcgcccctacagcttctactcctccctcatcagttatgaggaggatcagagacaaggcgctgaaccacggaagaactttgtgaaaccgaatgagacgaagacctacttctggaaagtacagcaccacatggcccccacaaaagacgaattcgattgcaaagcatgggcgtatttttcagacgttgacttggagaaagatgtacattcaggacttattggtcctttgttggtgtgtcacactaacactctcaatccagcccatggcaggcaggtgacagtccaggaattcgctcttttctttaccatctttgatgagaccaagtcctggtacttcacggaaaacatggagcgcaattgcagagccccctgtaacatacagatggaggaccctacctttaaggaaaattatcggttccacgcaatcaacggatacattatggatacactccctggccttgtgatggctcaggaccaacgaatcaggtggtacctcctcagcatgggttctaatgagaacatacactccattcacttttcaggacatgtgttcactgtccggaagaaagaagagtataagatggccctctacaatttgtatccaggcgtgtttgagaccgttgaaatgcttccctctaaagctggcatctggagagtagagtgcttgatcggagaacatcttcacgcaggtatgagcaccttgttcctcgtgtacagcaacaaatgtcagaccccacttggcatggccagtggacacattcgcgactttcagatcacagcatctggccagtatggacaatgggccccaaagttggctcgcctccattactccggtagcataaatgcgtggtccactaaagaacctttcagctggattaaggtcgatcttcttgcccccatgatcatccacggcattaagacacagggagcgaggcagaaattctcctccctctacatctcacagttcattattatgtatagtttggacggcaagaagtggcaaacttatagaggtaacagtactggaacactcatggtgttcttcggcaacgttgatagctctggcatcaaacacaacatctttaatcctcccataatagctcggtacatcagattgcatccgacccactacagcattaggagtacactccgaatggagcttatgggttgcgacttgaattcctgttcaatgccactcggaatggagtctaaagccatctctgatgcacagataaccgccagtagctactttacgaacatgtttgctacgtggtcaccctctaaggcaaggcttcatttgcaaggccggtctaatgcctggagacctcaggtgaacaacccgaaagaatggctccaggtggactttcagaagaccatgaaagtaacaggtgtcactactcagggagttaagtccttgctcaccagcatgtatgtgaaggagttccttatttcctcatcacaagatggccaccagtggaccctcttctttcagaatggtaaggtcaaagtgtttcagggcaatcaagacagcttcacacccgtggtgaacagtcttgatcctccactcttgacacgataccttcgaatccatccacagtcttgggttcaccagattgcattgcgcatggaagtacttggatgcgaggctcaggacctctac

SEQ ID NO: 238 - protein, 1457 aa, synthetic construct
  REGION 1..1457: note = Variant of human B-domain deleted Factor VIII
MQIELSTCFFLCLLRFCFSATRRYYLGAVELSWDYMQSDLGELPVDARFPPRVPKSFPMNTSVVYKKTLFVEFTDHLFNIAKPRPPWMGLLGPTIQAEVYDTVVITLKNMASHPVSLHAVGVSYWKASEGAEYDDQTSQREKEDDKVFPGGSHTYVWQVLKENGPMASDPLCLTYSYLSHVDLVKDLNSGLIGALLVCREGSLAKEKTQTLHKFILLFAVFDEGKSWHSETKNSLMQDRDAASARAWPKMHTVNGYVNRSLPGLIGCHRKSVYWHVIGMGTTPEVHSIFLEGHTFLVRNHRQASLEISPITFLTAQTLLMDLGQFLLFCHISSHQHDGMEAYVKVDSCPEEPQLRMKNNEEAEDYDDDLTDSEMDVVRFDDDNSPSFIQIRSVAKKHPKTWVHYIAAEEEDWDYAPLVLAPDDRSYKSQYLNNGPQRIGRKYKKVRFMAYTDETFKTREAIQHESGILGPLLYGEVGDTLLIIFKNQASRPYNIYPHGITDVRPLYSRRLPKGVKHLKDFPILPGEIFKYKWTVTVEDGPTKSDPRCLTRYYSSFVNMERDLASGLIGPLLICYKESVDQRGNQIMSDKRNVILFSVFDENRSWYLTENIQRFLPNPAGVQLEDPEFQASNIMHSINGYVFDSLQLSVCLHEVAYWYILSIGAQTDFLSVFFSGYTFKHKMVYEDTLTLFPFSGETVFMSMENPGLWILGCHNSDFRNRGMTALLKVSSCDKNTGDYYEDSYEDISAYLLSKNNAIEPRSFSQNPPVLKRHQREITRTTLQSDQEEIDYDDTISVEMKKEDFDIYDEDENQSPRSFQKKTRHYFIAAVERLWDYGMSSSPHVLRNRAQSGSVPQFKKVVFQEFTDGSFTQPLYRGELNEHLGLLGPYIRAEVEDNIMVTFRNQASRPYSFYSSLISYEEDQRQGAEPRKNFVKPNETKTYFWKVQHHMAPTKDEFDCKAWAYFSDVDLEKDVHSGLIGPLLVCHTNTLNPAHGRQVTVQEFALFFTIFDETKSWYFTENMERNCRAPCNIQMEDPTFKENYRFHAINGYIMDTLPGLVMAQDQRIRWYLLSMGSNENIHSIHFSGHVFTVRKKEEYKMALYNLYPGVFETVEMLPSKAGIWRVECLIGEHLHAGMSTLFLVYSNKCQTPLGMASGHIRDFQITASGQYGQWAPKLARLHYSGSINAWSTKEPFSWIKVDLLAPMIIHGIKTQGARQKFSSLYISQFIIMYSLDGKKWQTYRGNSTGTLMVFFGNVDSSGIKHNIFNPPIIARYIRLHPTHYSIRSTLRMELMGCDLNSCSMPLGMESKAISDAQITASSYFTNMFATWSPSKARLHLQGRSNAWRPQVNNPKEWLQVDFQKTMKVTGVTTQGVKSLLTSMYVKEFLISSSQDGHQWTLFFQNGKVKVFQGNQDSFTPVVNSLDPPLLTRYLRIHPQSWVHQIALRMEVLGCEAQDLY

SEQ ID NO: 239 - DNA, 4371 bp, synthetic construct
  misc_feature 1..4371: note = Variant of human B-domain deleted Factor VIII
  source 1..4371: mol_type = other DNA
atgcagattgaactgtctacctgcttcttcctctgtttgctgaggttctgctttagcgccactagacggtactaccttggcgctgtggagctgtcctgggactatatgcagagtgatttgggagagcttcccgtcgacgcacgatttcctcctcgcgttccaaagtcatttcccttcaacacaagcgtggtgtacaagaagacgctcttcgtcgaattcaccgatcacctgttcaatatcgccaaacccagaccaccatggatgggtcttttggggcctaccatacaagcggaggtgtatgacacagttgttatcactctcaagaacatggcttctcatccggtaagtcttcacgcagtgggcgtgtcctactggaaagcttcagaaggagccgagtatgatgatcagacatcccagagggagaaagaagacgacaaggtatttccaggtgggtctcatacctatgtgtggcaagtgctcaaagagaatggccctatggcaagcgatccgctctgtttgacttacagctacctttcacacgttgacctcgtcaaggacctcaactccgggttgattggagccttgttggtatgcagggaaggatctcttgccaaagagaagacacagaccctccacaagtttatccttctctttgctgtgttcgatgagggcaaaagttggcatagcgaaacgaagaattccctcatgcaggatcgcgacgcagccagcgccagagcttggcccaagatgcacactgtgaacggatatgtcaataggtcacttcctggcttgattgggtgtcatcggaaaagtgtctactggcacgtgatcggaatggggacaacaccagaggtccactccatatttctcgaaggccataccttccttgttcgaaaccacagacaggcatccttggagatctctcccattacctttctcactgcccaaacgctccttatggacttgggtcagttccttctcttctgccatatcagctcacaccagcatgatggtatggaagcttatgtgaaagtcgacagttgtcctgaggagccacagttgcgcatgaagaataatgaagaagccgaggattacgacgacgatctcaccgattctgagatggacgtggtgaggtttgatgacgacaactctccctccttcattcaaatccggagcgtggcgaagaaacaccccaagacttgggtccactatatagcggcggaagaggaggattgggattacgctcctcttgtattggcaccagatgaccgctcatacaaaagccagtacctcaacaacggaccgcagagaattggccggaagtataagaaagtgcgatttatggcctatacagacgaaacctttaagacaagggaggccatccagcatgagagtgggattttgggacctcttctttacggcgaagttggtgataccctcctcatcatcttcaagaatcaagcttctcgcccctataacatttacccacacgggatcactgacgttaggcctttgtatagcagaagacttcccaaaggcgtgaagcatctcaaagacttccccattttgccaggcgagatctttaagtacaaatggaccgtcacagtggaagatggaccgactaaatcagaccctcgatgccttacgcggtactattcctccttcgtgaatatggagagagatttggcaagcggactcataggaccactcctcatctgttacaaggaatctgtagaccagaggggtaaccagattatgagtgataaacgcaatgtgatcctttttagcgtcttcgacgagaaccggtcctggtacttgaccgagaatatacaaaggttccttcccaaccccgcaggcgttcagttggaagaccctgagtttcaggccagcaatattatgcactcaatcaacggctatgtgtttgatagtctccagctttctgtttgcctccatgaagtagcctattggtacatcttgtcaattggtgctcaaacagacttcctctccgtcttcttctccggctacacctttaagcacaagatggtgtatgaggacactctcacactctttccattttctggagaaaccgtgttcatgagcatggagaatccaggcctttggatcttgggttgccacaacagtgattttcgcaatcggggaatgactgctctcctcaaagtcagcagctgtgataagaaccgtggcgactattacgaagattcttacgaggacataagtgcctacttgttgtccaagaataacgccattgagcccagatcattctcccagaatcctcccgtgcttaaaaggcatcagcgcgaaatcaccagaactactcttcagtctgatcaagaggagattgactatgacgacaccataagcgtggaaatgaagaaggaggatttcgatatctatgacgaagatgagaaccagtctccgcggagctttcagaagaagacgcgacactacttcattgcagcagtcgaaaggctttgggactacggtatgtcatcatcccctcatgtgttgcgcaatagagctcagagtggaagtgttccacagttcaagaaagtcgtctttcaagagtttacagatggcagcttcacacagcctctctatcggggcgagcttaacgaacatttgggactccttggtccctatatccgagccgaagtggaggacaacattatggttacctttaggaatcaagcctctcgcccctacagcttctactcctccctcatcagttatgaggaggatcagagacaaggcgctgaaccacggaagaactttgtgaaaccgaatgagacgaagacctacttctggaaagtacagcaccacatggcccccacaaaagacgaattcgattgcaaagcatgggcgtatttttcagacgttgacttggagaaagatgtacattcaggacttattggtcctttgttggtgtgtcacactaacactctcaatccagcccatggcaggcaggtgacagtccaggaattcgctcttttctttaccatctttgatgagaccaagtcctggtacttcacggaaaacatggagcgcaattgcagagccccctgtaacatacagatggaggaccctacctttaaggaaaattatcggttccacgcaatcaacggatacattatggatacactccctggccttgtgatggctcaggaccaacgaatcaggtggtacctcctcagcatgggttctaatgagaacatacactccattcacttttcaggacatgtgttcactgtccggaagaaagaagagtataagatggccctctacaatttgtatccaggcgtgtttgagaccgttgaaatgcttccctctaaagctggcatctggagagtagagtgcttgatcggagaacatcttcacgcaggtatgagcaccttgttcctcgtgtacagcaacaaatgtcagaccccacttggcatggccagtggacacattcgcgactttcagatcacagcatctggccagtatggacaatgggccccaaagttggctcgcctccattactccggtagcataaatgcgtggtccactaaagaacctttcagctggattaaggtcgatcttcttgcccccatgatcatccacggcattaagacacagggagcgaggcagaaattctcctccctctacatctcacagttcattattatgtatagtttggacggcaagaagtggcaaacttatagaggtaacagtactggaacactcatggtgttcttcggcaacgttgatagctctggcatcaaacacaacatctttaatcctcccataatagctcggtacatcagattgcatccgacccactacagcattaggagtacactccgaatggagcttatgggttgcgacttgaattcctgttcaatgccactcggaatggagtctaaagccatctctgatgcacagataaccgccagtagctactttacgaacatgtttgctacgtggtcaccctctaaggcaaggcttcatttgcaaggccggtctaatgcctggagacctcaggtgaacaacccgaaagaatggctccaggtggactttcagaagaccatgaaagtaacaggtgtcactactcagggagttaagtccttgctcaccagcatgtatgtgaaggagttccttatttcctcatcacaagatggccaccagtggaccctcttctttcagaatggtaaggtcaaagtgtttcagggcaatcaagacagcttcacacccgtggtgaacagtcttgatcctccactcttgacacgataccttcgaatccatccacagtcttgggttcaccagattgcattgcgcatggaagtacttggatgcgaggctcaggacctctac

SEQ ID NO: 240 - protein, 1457 aa, synthetic construct
  REGION 1..1457: note = Variant of human B-domain deleted Factor VIII
MQIELSTCFFLCLLRFCFSATRRYYLGAVELSWDYMQSDLGELPVDARFPPRVPKSFPFNTSVVYKKTLFVEFTDHLFNIAKPRPPWMGLLGPTIQAEVYDTVVITLKNMASHPVSLHAVGVSYWKASEGAEYDDQTSQREKEDDKVFPGGSHTYVWQVLKENGPMASDPLCLTYSYLSHVDLVKDLNSGLIGALLVCREGSLAKEKTQTLHKFILLFAVFDEGKSWHSETKNSLMQDRDAASARAWPKMHTVNGYVNRSLPGLIGCHRKSVYWHVIGMGTTPEVHSIFLEGHTFLVRNHRQASLEISPITFLTAQTLLMDLGQFLLFCHISSHQHDGMEAYVKVDSCPEEPQLRMKNNEEAEDYDDDLTDSEMDVVRFDDDNSPSFIQIRSVAKKHPKTWVHYIAAEEEDWDYAPLVLAPDDRSYKSQYLNNGPQRIGRKYKKVRFMAYTDETFKTREAIQHESGILGPLLYGEVGDTLLIIFKNQASRPYNIYPHGITDVRPLYSRRLPKGVKHLKDFPILPGEIFKYKWTVTVEDGPTKSDPRCLTRYYSSFVNMERDLASGLIGPLLICYKESVDQRGNQIMSDKRNVILFSVFDENRSWYLTENIQRFLPNPAGVQLEDPEFQASNIMHSINGYVFDSLQLSVCLHEVAYWYILSIGAQTDFLSVFFSGYTFKHKMVYEDTLTLFPFSGETVFMSMENPGLWILGCHNSDFRNRGMTALLKVSSCDKNRGDYYEDSYEDISAYLLSKNNAIEPRSFSQNPPVLKRHQREITRTTLQSDQEEIDYDDTISVEMKKEDFDIYDEDENQSPRSFQKKTRHYFIAAVERLWDYGMSSSPHVLRNRAQSGSVPQFKKVVFQEFTDGSFTQPLYRGELNEHLGLLGPYIRAEVEDNIMVTFRNQASRPYSFYSSLISYEEDQRQGAEPRKNFVKPNETKTYFWKVQHHMAPTKDEFDCKAWAYFSDVDLEKDVHSGLIGPLLVCHTNTLNPAHGRQVTVQEFALFFTIFDETKSWYFTENMERNCRAPCNIQMEDPTFKENYRFHAINGYIMDTLPGLVMAQDQRIRWYLLSMGSNENIHSIHFSGHVFTVRKKEEYKMALYNLYPGVFETVEMLPSKAGIWRVECLIGEHLHAGMSTLFLVYSNKCQTPLGMASGHIRDFQITASGQYGQWAPKLARLHYSGSINAWSTKEPFSWIKVDLLAPMIIHGIKTQGARQKFSSLYISQFIIMYSLDGKKWQTYRGNSTGTLMVFFGNVDSSGIKHNIFNPPIIARYIRLHPTHYSIRSTLRMELMGCDLNSCSMPLGMESKAISDAQITASSYFTNMFATWSPSKARLHLQGRSNAWRPQVNNPKEWLQVDFQKTMKVTGVTTQGVKSLLTSMYVKEFLISSSQDGHQWTLFFQNGKVKVFQGNQDSFTPVVNSLDPPLLTRYLRIHPQSWVHQIALRMEVLGCEAQDLY

SEQ ID NO: 241 - DNA, 4371 bp, synthetic construct
  misc_feature 1..4371: note = Variant of human B-domain deleted Factor VIII
  source 1..4371: mol_type = other DNA
atgcagattgaactgtctacctgcttcttcctctgtttgctgaggttctgctttagcgccactagacggtactaccttggcgctgtggagctgtcctgggactatatgcagagtgatttgggagagcttcccgtcgacgcacgatttcctcctcgcgttccaaagtcatttcccttcaacacaagcgtggtgtacaagaagacgctcttcgtcgaattcaccgatcacctgttcaatatcgccaaacccagaccaccatggatgggtcttttggggcctaccatacaagcggaggtgtatgacacagttgttatcactctcaagaacatggcttctcatccggtaagtcttcacgcagtgggcgtgtcctactggaaagcttcagaaggagccgagtatgatgatcagacatcccagagggagaaagaagacgacaaggtatttccaggtgggtctcatacctatgtgtggcaagtgctcaaagagaatggccctatggcaagcgatccgctctgtttgacttacagctacctttcacacgttgacctcgtcaaggacctcaactccgggttgattggagccttgttggtatgcagggaaggatctcttgccaaagagaagacacagaccctccacaagtttatccttctctttgctgtgttcgatgagggcaaaagttggcatagcgaaacgaagaattccctcatgcaggatcgcgacgcagccagcgccagagcttggcccaagatgcacactgtgaacggatatgtcaataggtcacttcctggcttgattgggtgtcatcggaaaagtgtctactggcacgtgatcggaatggggacaacaccagaggtccactccatatttctcgaaggccataccttccttgttcgaaaccacagacaggcatccttggagatctctcccattacctttctcactgcccaaacgctccttatggacttgggtcagttccttctcttctgccatatcagctcacaccagcatgatggtatggaagcttatgtgaaagtcgacagttgtcctgaggagccacagttgcgcatgaagaataatgaagaaaatgaggattacgacgacgatctcaccgattctgagatggacgtggtgaggtttgatgacgacaactctccctccttcattcaaatccggagcgtggcgaagaaacaccccaagacttgggtccactatatagcggcggaagaggaggattgggattacgctcctcttgtattggcaccagatgaccgctcatacaaaagccagtacctcaacaacggaccgcagagaattggccggaagtataagaaagtgcgatttatggcctatacagacgaaacctttaagacaagggaggccatccagcatgagagtgggattttgggacctcttctttacggcgaagttggtgataccctcctcatcatcttcaagaatcaagcttctcgcccctataacatttacccacacgggatcactgacgttaggcctttgtatagcagaagacttcccaaaggcgtgaagcatctcaaagacttccccattttgccaggcgagatctttaagtacaaatggaccgtcacagtggaagatggaccgactaaatcagaccctcgatgccttacgcggtactattcctccttcgtgaatatggagagagatttggcaagcggactcataggaccactcctcatctgttacaaggaatctgtagaccagaggggtaaccagattatgagtgataaacgcaatgtgatcctttttagcgtcttcgacgagaaccggtcctggtacttgaccgagaatatacaaaggttccttcccaaccccgcaggcgttcagttggaagaccctgagtttcaggccagcaatattatgcactcaatcaacggctatgtgtttgatagtctccagctttctgtttgcctccatgaagtagcctattggtacatcttgtcaattggtgctcaaacagacttcctctccgtcttcttctccggctacacctttaagcacaagatggtgtatgaggacactctcacactctttccattttctggagaaaccgtgttcatgagcatggagaatccaggcctttggatcttgggttgccacaacagtgattttcgcaatcggggaatgactgctctcctcaaagtcagcagctgtgataagaacacaggcgactattacgaagattcttacgaggacataagtgcctacttgttgtccaagaataacgccattgagcccagatcattctcccagaatcctcccgtgcttaaaaggcatcagcgcgaaatcaccagaactactcttcagtctgatcaagaggagattgactatgacgacaccataagcgtggaaatgaagaaggaggatttcgatatctatgacgaagatgagaaccagtctccgcggagctttcagaagaagacgcgacactacttcattgcagcagtcgaaaggctttgggactacggtatgtcatcatcccctcatgtgttgcgcaatagagctcagagtggaagtgttccacagttcaagaaagtcgtctttcaagagtttacagatggcagcttcacacagcctctctatcggggcgagcttaacgaacatttgggactccttggtccctatatccgagccgaagtggaggacaacattatggttacctttaggaatcaagcctctcgcccctacagcttctactcctccctcatcagttatgaggaggatcagagacaaggcgctgaaccacggaagaactttgtgaaaccgaatgagacgaagacctacttctggaaagtacagcaccacatggcccccacaaaagacgaattcgattgcaaagcatgggcgtatttttcagacgttgacttggagaaagatgtacattcaggacttattggtcctttgttggtgtgtcacactaacactctcaatccagcccatggcaggcaggtgacagtccaggaattcgctcttttctttaccatctttgatgagaccaagtcctggtacttcacggaaaacatggagcgcaattgcagagccccctgtaacatacagatggaggaccctacctttaaggaaaattatcggttccacgcaatcaacggatacattatggatacactccctggccttgtgatggctcaggaccaacgaatcaggtggtacctcctcagcatgggttctaatgagaacatacactccattcacttttcaggacatgtgttcactgtccggaagaaagaagagtataagatggccctctacaatttgtatccaggcgtgtttgagaccgttgaaatgcttccctctaaagctggcatctggagagtagagtgcttgatcggagaacatcttcacgcaggtatgagcaccttgttcctcgtgtacagcaacaaatgtcagaccccacttggcatggccagtggacacattcgcgactttcagatcacagcatctggccagtatggacaatgggccccaaagttggctcgcctccattactccggtagcataaatgcgtggtccactaaagaacctttcagctggattaaggtcgatcttcttgcccccatgatcatccacggcattaagacacagggagcgaggcagaaattctcctccctctacatctcacagttcattattatgtatagtttggacggcaagaagtggcaaacttatagaggtaacagtactggaacactcatggtgttcttcggcaacgttgatagctctggcatcaaacacaacatctttaatcctcccataatagctcggtacatcagattgcatccgacccactacagcattaggagtacactccgaatggagcttatgggttgcgacttgaattcctgttcaatgccactcggaatggagtctaaagccatctctgatgcacagataaccgccagtagctactttacgaacatgtttgctacgtggtcaccctctaaggcaaggcttcatttgcaaggccggtctaatgcctggagacctcaggtgaacaacccgaaagaatggctccaggtggactttcagaagaccatgaaagtaacaggtgtcactactcagggagttaagtccttgctcaccagcatgtatgtgaaggagttccttatttcctcatcacaagatggccaccagtggaccctcttctttcagaatggtaaggtcaaagtgtttcagggcaatcaagacagcttcacacccgtggtgaacagtcttgatcctccactcttgacacgataccttcgaatccatccacagtcttgggttcaccagattgcattgcgcatggaagtacttggatgcgaggctcaggacctctac

SEQ ID NO: 242 - protein, 1457 aa, synthetic construct
  REGION 1..1457: note = Variant of human B-domain deleted Factor VIII
MQIELSTCFFLCLLRFCFSATRRYYLGAVELSWDYMQSDLGELPVDARFPPRVPKSFPFNTSVVYKKTLFVEFTDHLFNIAKPRPPWMGLLGPTIQAEVYDTVVITLKNMASHPVSLHAVGVSYWKASEGAEYDDQTSQREKEDDKVFPGGSHTYVWQVLKENGPMASDPLCLTYSYLSHVDLVKDLNSGLIGALLVCREGSLAKEKTQTLHKFILLFAVFDEGKSWHSETKNSLMQDRDAASARAWPKMHTVNGYVNRSLPGLIGCHRKSVYWHVIGMGTTPEVHSIFLEGHTFLVRNHRQASLEISPITFLTAQTLLMDLGQFLLFCHISSHQHDGMEAYVKVDSCPEEPQLRMKNNEENEDYDDDLTDSEMDVVRFDDDNSPSFIQIRSVAKKHPKTWVHYIAAEEEDWDYAPLVLAPDDRSYKSQYLNNGPQRIGRKYKKVRFMAYTDETFKTREAIQHESGILGPLLYGEVGDTLLIIFKNQASRPYNIYPHGITDVRPLYSRRLPKGVKHLKDFPILPGEIFKYKWTVTVEDGPTKSDPRCLTRYYSSFVNMERDLASGLIGPLLICYKESVDQRGNQIMSDKRNVILFSVFDENRSWYLTENIQRFLPNPAGVQLEDPEFQASNIMHSINGYVFDSLQLSVCLHEVAYWYILSIGAQTDFLSVFFSGYTFKHKMVYEDTLTLFPFSGETVFMSMENPGLWILGCHNSDFRNRGMTALLKVSSCDKNTGDYYEDSYEDISAYLLSKNNAIEPRSFSQNPPVLKRHQREITRTTLQSDQEEIDYDDTISVEMKKEDFDIYDEDENQSPRSFQKKTRHYFIAAVERLWDYGMSSSPHVLRNRAQSGSVPQFKKVVFQEFTDGSFTQPLYRGELNEHLGLLGPYIRAEVEDNIMVTFRNQASRPYSFYSSLISYEEDQRQGAEPRKNFVKPNETKTYFWKVQHHMAPTKDEFDCKAWAYFSDVDLEKDVHSGLIGPLLVCHTNTLNPAHGRQVTVQEFALFFTIFDETKSWYFTENMERNCRAPCNIQMEDPTFKENYRFHAINGYIMDTLPGLVMAQDQRIRWYLLSMGSNENIHSIHFSGHVFTVRKKEEYKMALYNLYPGVFETVEMLPSKAGIWRVECLIGEHLHAGMSTLFLVYSNKCQTPLGMASGHIRDFQITASGQYGQWAPKLARLHYSGSINAWSTKEPFSWIKVDLLAPMIIHGIKTQGARQKFSSLYISQFIIMYSLDGKKWQTYRGNSTGTLMVFFGNVDSSGIKHNIFNPPIIARYIRLHPTHYSIRSTLRMELMGCDLNSCSMPLGMESKAISDAQITASSYFTNMFATWSPSKARLHLQGRSNAWRPQVNNPKEWLQVDFQKTMKVTGVTTQGVKSLLTSMYVKEFLISSSQDGHQWTLFFQNGKVKVFQGNQDSFTPVVNSLDPPLLTRYLRIHPQSWVHQIALRMEVLGCEAQDLY

SEQ ID NO: 243 - DNA, 4371 bp, synthetic construct
  misc_feature 1..4371: note = Variant of human B-domain deleted Factor VIII
  source 1..4371: mol_type = other DNA
atgcagattgaactgtctacctgcttcttcctctgtttgctgaggttctgctttagcgccactagacggtactaccttggcgctgtggagctgtcctgggactatatgcagagtgatttgggagagcttcccgtcgacgcacgatttcctcctcgcgttccaaagtcatttcccttcaacacaagcgtggtgtacaagaagacgctcttcgtcgaattcaccgatcacctgttcaatatcgccaaacccagaccaccatggatgggtcttttggggcctaccatacaagcggaggtgtatgacacagttgttatcactctcaagaacatggcttctcatccggtaagtcttcacgcagtgggcgtgtcctactggaaagcttcagaaggagccgagtatgatgatcagacatcccagagggagaaagaagacgacaaggtatttccaggtgggtctcatacctatgtgtggcaagtgctcaaagagaatggccctatggcaagcgatccgctctgtttgacttacagctacctttcacacgttgacctcgtcaaggacctcaactccgggttgattggagccttgttggtatgcagggaaggatctcttgccaaagagaagacacagaccctccacaagtttatccttctctttgctgtgttcgatgagggcaaaagttggcatagcgaaacgaagaattccctcatgcaggatcgcgacgcagccagcgccagagcttggcccaagatgcacactgtgaacggatatgtcaataggtcacttcctggcttgattgggtgtcatcggaaaagtgtctactggcacgtgatcggaatggggacaacaccagaggtccactccatatttctcgaaggccataccttccttgttcgaaaccacagacaggcatccttggagatctctcccattacctttctcactgcccaaacgctccttatggacttgggtcagttccttctcttctgccatatcagctcagggcagcatgatggtatggaagcttatgtgaaagtcgacagttgtcctgaggagccacagttgcgcatgaagaataatgaagaagccgaggattacgacgacgatctcaccgattctgagatggacgtggtgaggtttgatgacgacaactctccctccttcattcaaatccggagcgtggcgaagaaacaccccaagacttgggtccactatatagcggcggaagaggaggattgggattacgctcctcttgtattggcaccagatgaccgctcatacaaaagccagtacctcaacaacggaccgcagagaattggccggaagtataagaaagtgcgatttatggcctatacagacgaaacctttaagacaagggaggccatccagcatgagagtgggattttgggacctcttctttacggcgaagttggtgataccctcctcatcatcttcaagaatcaagcttctcgcccctataacatttacccacacgggatcactgacgttaggcctttgtatagcagaagacttcccaaaggcgtgaagcatctcaaagacttccccattttgccaggcgagatctttaagtacaaatggaccgtcacagtggaagatggaccgactaaatcagaccctcgatgccttacgcggtactattcctccttcgtgaatatggagagagatttggcaagcggactcataggaccactcctcatctgttacaaggaatctgtagaccagaggggtaaccagattatgagtgataaacgcaatgtgatcctttttagcgtcttcgacgagaaccggtcctggtacttgaccgagaatatacaaaggttccttcccaaccccgcaggcgttcagttggaagaccctgagtttcaggccagcaatattatgcactcaatcaacggctatgtgtttgatagtctccagctttctgtttgcctccatgaagtagcctattggtacatcttgtcaattggtgctcaaacagacttcctctccgtcttcttctccggctacacctttaagcacaagatggtgtatgaggacactctcacactctttccattttctggagaaaccgtgttcatgagcatggagaatccaggcctttggatcttgggttgccacaacagtgattttcgcaatcggggaatgactgctctcctcaaagtcagcagctgtgataagaacacaggcgactattacgaagattcttacgaggacataagtgcctacttgttgtccaagaataacgccattgagcccagatcattctcccagaatcctcccgtgcttaaaaggcatcagcgcgaaatcaccagaactactcttcagtctgatcaagaggagattgactatgacgacaccataagcgtggaaatgaagaaggaggatttcgatatctatgacgaagatgagaaccagtctccgcggagctttcagaagaagacgcgacactacttcattgcagcagtcgaaaggctttgggactacggtatgtcatcatcccctcatgtgttgcgcaatagagctcagagtggaagtgttccacagttcaagaaagtcgtctttcaagagtttacagatggcagcttcacacagcctctctatcggggcgagcttaacgaacatttgggactccttggtccctatatccgagccgaagtggaggacaacattatggttacctttaggaatcaagcctctcgcccctacagcttctactcctccctcatcagttatgaggaggatcagagacaaggcgctgaaccacggaagaactttgtgaaaccgaatgagacgaagacctacttctggaaagtacagcaccacatggcccccacaaaagacgaattcgattgcaaagcatgggcgtatttttcagacgttgacttggagaaagatgtacattcaggacttattggtcctttgttggtgtgtcacactaacactctcaatccagcccatggcaggcaggtgacagtccaggaattcgctcttttctttaccatctttgatgagaccaagtcctggtacttcacggaaaacatggagcgcaattgcagagccccctgtaacatacagatggaggaccctacctttaaggaaaattatcggttccacgcaatcaacggatacattatggatacactccctggccttgtgatggctcaggaccaacgaatcaggtggtacctcctcagcatgggttctaatgagaacatacactccattcacttttcaggacatgtgttcactgtccggaagaaagaagagtataagatggccctctacaatttgtatccaggcgtgtttgagaccgttgaaatgcttccctctaaagctggcatctggagagtagagtgcttgatcggagaacatcttcacgcaggtatgagcaccttgttcctcgtgtacagcaacaaatgtcagaccccacttggcatggccagtggacacattcgcgactttcagatcacagcatctggccagtatggacaatgggccccaaagttggctcgcctccattactccggtagcataaatgcgtggtccactaaagaacctttcagctggattaaggtcgatcttcttgcccccatgatcatccacggcattaagacacagggagcgaggcagaaattctcctccctctacatctcacagttcattattatgtatagtttggacggcaagaagtggcaaacttatagaggtaacagtactggaacactcatggtgttcttcggcaacgttgatagctctggcatcaaacacaacatctttaatcctcccataatagctcggtacatcagattgcatccgacccactacagcattaggagtacactccgaatggagcttatgggttgcgacttgaattcctgttcaatgccactcggaatggagtctaaagccatctctgatgcacagataaccgccagtagctactttacgaacatgtttgctacgtggtcaccctctaaggcaaggcttcatttgcaaggccggtctaatgcctggagacctcaggtgaacaacccgaaagaatggctccaggtggactttcagaagaccatgaaagtaacaggtgtcactactcagggagttaagtccttgctcaccagcatgtatgtgaaggagttccttatttcctcatcacaagatggccaccagtggaccctcttctttcagaatggtaaggtcaaagtgtttcagggcaatcaagacagcttcacacccgtggtgaacagtcttgatcctccactcttgacacgataccttcgaatccatccacagtcttgggttcaccagattgcattgcgcatggaagtacttggatgcgaggctcaggacctctac

SEQ ID NO: 244 - protein, 1457 aa, synthetic construct
  REGION 1..1457: note = Variant of human B-domain deleted Factor VIII
MQIELSTCFFLCLLRFCFSATRRYYLGAVELSWDYMQSDLGELPVDARFPPRVPKSFPFNTSVVYKKTLFVEFTDHLFNIAKPRPPWMGLLGPTIQAEVYDTVVITLKNMASHPVSLHAVGVSYWKASEGAEYDDQTSQREKEDDKVFPGGSHTYVWQVLKENGPMASDPLCLTYSYLSHVDLVKDLNSGLIGALLVCREGSLAKEKTQTLHKFILLFAVFDEGKSWHSETKNSLMQDRDAASARAWPKMHTVNGYVNRSLPGLIGCHRKSVYWHVIGMGTTPEVHSIFLEGHTFLVRNHRQASLEISPITFLTAQTLLMDLGQFLLFCHISSGQHDGMEAYVKVDSCPEEPQLRMKNNEEAEDYDDDLTDSEMDVVRFDDDNSPSFIQIRSVAKKHPKTWVHYIAAEEEDWDYAPLVLAPDDRSYKSQYLNNGPQRIGRKYKKVRFMAYTDETFKTREAIQHESGILGPLLYGEVGDTLLIIFKNQASRPYNIYPHGITDVRPLYSRRLPKGVKHLKDFPILPGEIFKYKWTVTVEDGPTKSDPRCLTRYYSSFVNMERDLASGLIGPLLICYKESVDQRGNQIMSDKRNVILFSVFDENRSWYLTENIQRFLPNPAGVQLEDPEFQASNIMHSINGYVFDSLQLSVCLHEVAYWYILSIGAQTDFLSVFFSGYTFKHKMVYEDTLTLFPFSGETVFMSMENPGLWILGCHNSDFRNRGMTALLKVSSCDKNTGDYYEDSYEDISAYLLSKNNAIEPRSFSQNPPVLKRHQREITRTTLQSDQEEIDYDDTISVEMKKEDFDIYDEDENQSPRSFQKKTRHYFIAAVERLWDYGMSSSPHVLRNRAQSGSVPQFKKVVFQEFTDGSFTQPLYRGELNEHLGLLGPYIRAEVEDNIMVTFRNQASRPYSFYSSLISYEEDQRQGAEPRKNFVKPNETKTYFWKVQHHMAPTKDEFDCKAWAYFSDVDLEKDVHSGLIGPLLVCHTNTLNPAHGRQVTVQEFALFFTIFDETKSWYFTENMERNCRAPCNIQMEDPTFKENYRFHAINGYIMDTLPGLVMAQDQRIRWYLLSMGSNENIHSIHFSGHVFTVRKKEEYKMALYNLYPGVFETVEMLPSKAGIWRVECLIGEHLHAGMSTLFLVYSNKCQTPLGMASGHIRDFQITASGQYGQWAPKLARLHYSGSINAWSTKEPFSWIKVDLLAPMIIHGIKTQGARQKFSSLYISQFIIMYSLDGKKWQTYRGNSTGTLMVFFGNVDSSGIKHNIFNPPIIARYIRLHPTHYSIRSTLRMELMGCDLNSCSMPLGMESKAISDAQITASSYFTNMFATWSPSKARLHLQGRSNAWRPQVNNPKEWLQVDFQKTMKVTGVTTQGVKSLLTSMYVKEFLISSSQDGHQWTLFFQNGKVKVFQGNQDSFTPVVNSLDPPLLTRYLRIHPQSWVHQIALRMEVLGCEAQDLY

SEQ ID NO: 245 - DNA, 4371 bp, synthetic construct
  misc_feature 1..4371: note = Variant of human B-domain deleted Factor VIII
  source 1..4371: mol_type = other DNA
atgcagattgaactgtctacctgcttcttcctctgtttgctgaggttctgctttagcgccactagacggtactaccttggcgctgtggagctgtcctgggactatatgcagagtgatttgggagagcttcccgtcgacgcacgatttcctcctcgcgttccaaagtcatttcccttcaacacaagcgtggtgtacaagaagacgctcttcgtcgaattcaccgatcacctgttcaatatcgccaaacccagaccaccatggatgggtcttttggggcctaccatacaagcggaggtgtatgacacagttgttatcactctcaagaacatggcttctcatccggtaagtcttcacgcagtgggcgtgtcctactggaaagcttcagaaggagccgagtatgatgatcagacatcccagagggagaaagaagacgacaaggtatttccaggtgggtctcatacctatgtgtggcaagtgctcaaagagaatggccctatggcaagcgatccgctctgtttgacttacagctacctttcacacgttgacctcgtcaaggacctcaactccgggttgattggagccttgttggtatgcagggaaggatctcttgccaaagagaagacacagaccctccacaagtttatccttctctttgctgtgttcgatgagggcaaaagttggcatagcgaaacgaagaattccctcatgcaggatcgcgacgcagccagcgccagagcttggcccaagatgcacactgtgaacggatatgtcaataggtcacttcctggcttgattgggtgtcatcggaaaagtgtctactggcacgtgatcggaatggggacaacaccagaggtccactccatatttctcgaaggccataccttccttgttcgaaaccacagacaggcatccttggagatctctcccattacctttctcactgcccaaacgctccttatggacttgggtcagttccttctcttctgccatatcagctcacaccagcatgatggtatggaagcttatgtgaaagtcgacagttgtcctgaggagccacagttgcgcatgaagaataatgaagaagccgaggattacgacgacgatctcaccgattctgagatggacgtggtgaggtttgatgacgacaactctccctccttcattcaaatccggagcgtggcgaagaaacaccccaagacttgggtccactatatagcggcggaagaggaggattgggattacgctcctcttgtattggcaccagatgaccgctcatacaaaagccagtacctcaacaacggaccgcagagaattggccggaagtataagaaagtgcgatttatggcctatacagacgaaacctttaagacaagggaggccatccagcatgagagtgggattttgggacctcttctttacggcgaagttggtgataccctcctcatcatcttcaagaatcaagcttctcgcccctataacatttacccacacgggatcactgacgttaggcctttgtatagcagaagacttcccaaaggcgtgaagcatctcaaagacttccccattttgccaggcgagatctttaagtacaaatggaccgtcacagtggaagatggaccgactaaatcagaccctcgatgccttacgcggtactattcctccttcgtgaatatggagagagatttggcaagcggactcataggaccactcctcatctgttacaaggaatctgtagaccagaggggtaaccagattatgagtgataaacgcaatgtgatcctttttagcgtcttcgacgagaaccggtcctggtacttgaccgagaatatacaaaggttccttcccaaccccgcaggcgttcagttggaagaccctgagtttcaggccagcaatattatgcactcaatcaacggctatgtgtttgatagtctccagctttctgtttgcctccatgaagtagcctattggtacatcttgtcaattggtgctcaaacagacttcctctccgtcttcttctccggctacacctttaagcacaagatggtgtatgaggacactctcacactctttccattttctggagaaaccgtgttcatgagcatggagaatccaggcctttggatcttgggttgccacaacagtgattttcgcaatcggggaatgactgctctcctcaaagtcagcagctgtgatgggaacacaggcgactattacgaagattcttacgaggacataagtgcctacttgttgtccaagaataacgccattgagcccagatcattctcccagaatcctcccgtgcttaaaaggcatcagcgcgaaatcaccagaactactcttcagtctgatcaagaggagattgactatgacgacaccataagcgtggaaatgaagaaggaggatttcgatatctatgacgaagatgagaaccagtctccgcggagctttcagaagaagacgcgacactacttcattgcagcagtcgaaaggctttgggactacggtatgtcatcatcccctcatgtgttgcgcaatagagctcagagtggaagtgttccacagttcaagaaagtcgtctttcaagagtttacagatggcagcttcacacagcctctctatcggggcgagcttaacgaacatttgggactccttggtccctatatccgagccgaagtggaggacaacattatggttacctttaggaatcaagcctctcgcccctacagcttctactcctccctcatcagttatgaggaggatcagagacaaggcgctgaaccacggaagaactttgtgaaaccgaatgagacgaagacctacttctggaaagtacagcaccacatggcccccacaaaagacgaattcgattgcaaagcatgggcgtatttttcagacgttgacttggagaaagatgtacattcaggacttattggtcctttgttggtgtgtcacactaacactctcaatccagcccatggcaggcaggtgacagtccaggaattcgctcttttctttaccatctttgatgagaccaagtcctggtacttcacggaaaacatggagcgcaattgcagagccccctgtaacatacagatggaggaccctacctttaaggaaaattatcggttccacgcaatcaacggatacattatggatacactccctggccttgtgatggctcaggaccaacgaatcaggtggtacctcctcagcatgggttctaatgagaacatacactccattcacttttcaggacatgtgttcactgtccggaagaaagaagagtataagatggccctctacaatttgtatccaggcgtgtttgagaccgttgaaatgcttccctctaaagctggcatctggagagtagagtgcttgatcggagaacatcttcacgcaggtatgagcaccttgttcctcgtgtacagcaacaaatgtcagaccccacttggcatggccagtggacacattcgcgactttcagatcacagcatctggccagtatggacaatgggccccaaagttggctcgcctccattactccggtagcataaatgcgtggtccactaaagaacctttcagctggattaaggtcgatcttcttgcccccatgatcatccacggcattaagacacagggagcgaggcagaaattctcctccctctacatctcacagttcattattatgtatagtttggacggcaagaagtggcaaacttatagaggtaacagtactggaacactcatggtgttcttcggcaacgttgatagctctggcatcaaacacaacatctttaatcctcccataatagctcggtacatcagattgcatccgacccactacagcattaggagtacactccgaatggagcttatgggttgcgacttgaattcctgttcaatgccactcggaatggagtctaaagccatctctgatgcacagataaccgccagtagctactttacgaacatgtttgctacgtggtcaccctctaaggcaaggcttcatttgcaaggccggtctaatgcctggagacctcaggtgaacaacccgaaagaatggctccaggtggactttcagaagaccatgaaagtaacaggtgtcactactcagggagttaagtccttgctcaccagcatgtatgtgaaggagttccttatttcctcatcacaagatggccaccagtggaccctcttctttcagaatggtaaggtcaaagtgtttcagggcaatcaagacagcttcacacccgtggtgaacagtcttgatcctccactcttgacacgataccttcgaatccatccacagtcttgggttcaccagattgcattgcgcatggaagtacttggatgcgaggctcaggacctctac

SEQ ID NO: 246 - protein, 1457 aa, synthetic construct
  REGION 1..1457: note = Variant of human B-domain deleted Factor VIII
MQIELSTCFFLCLLRFCFSATRRYYLGAVELSWDYMQSDLGELPVDARFPPRVPKSFPFNTSVVYKKTLFVEFTDHLFNIAKPRPPWMGLLGPTIQAEVYDTVVITLKNMASHPVSLHAVGVSYWKASEGAEYDDQTSQREKEDDKVFPGGSHTYVWQVLKENGPMASDPLCLTYSYLSHVDLVKDLNSGLIGALLVCREGSLAKEKTQTLHKFILLFAVFDEGKSWHSETKNSLMQDRDAASARAWPKMHTVNGYVNRSLPGLIGCHRKSVYWHVIGMGTTPEVHSIFLEGHTFLVRNHRQASLEISPITFLTAQTLLMDLGQFLLFCHISSHQHDGMEAYVKVDSCPEEPQLRMKNNEEAEDYDDDLTDSEMDVVRFDDDNSPSFIQIRSVAKKHPKTWVHYIAAEEEDWDYAPLVLAPDDRSYKSQYLNNGPQRIGRKYKKVRFMAYTDETFKTREAIQHESGILGPLLYGEVGDTLLIIFKNQASRPYNIYPHGITDVRPLYSRRLPKGVKHLKDFPILPGEIFKYKWTVTVEDGPTKSDPRCLTRYYSSFVNMERDLASGLIGPLLICYKESVDQRGNQIMSDKRNVILFSVFDENRSWYLTENIQRFLPNPAGVQLEDPEFQASNIMHSINGYVFDSLQLSVCLHEVAYWYILSIGAQTDFLSVFFSGYTFKHKMVYEDTLTLFPFSGETVFMSMENPGLWILGCHNSDFRNRGMTALLKVSSCDGNTGDYYEDSYEDISAYLLSKNNAIEPRSFSQNPPVLKRHQREITRTTLQSDQEEIDYDDTISVEMKKEDFDIYDEDENQSPRSFQKKTRHYFIAAVERLWDYGMSSSPHVLRNRAQSGSVPQFKKVVFQEFTDGSFTQPLYRGELNEHLGLLGPYIRAEVEDNIMVTFRNQASRPYSFYSSLISYEEDQRQGAEPRKNFVKPNETKTYFWKVQHHMAPTKDEFDCKAWAYFSDVDLEKDVHSGLIGPLLVCHTNTLNPAHGRQVTVQEFALFFTIFDETKSWYFTENMERNCRAPCNIQMEDPTFKENYRFHAINGYIMDTLPGLVMAQDQRIRWYLLSMGSNENIHSIHFSGHVFTVRKKEEYKMALYNLYPGVFETVEMLPSKAGIWRVECLIGEHLHAGMSTLFLVYSNKCQTPLGMASGHIRDFQITASGQYGQWAPKLARLHYSGSINAWSTKEPFSWIKVDLLAPMIIHGIKTQGARQKFSSLYISQFIIMYSLDGKKWQTYRGNSTGTLMVFFGNVDSSGIKHNIFNPPIIARYIRLHPTHYSIRSTLRMELMGCDLNSCSMPLGMESKAISDAQITASSYFTNMFATWSPSKARLHLQGRSNAWRPQVNNPKEWLQVDFQKTMKVTGVTTQGVKSLLTSMYVKEFLISSSQDGHQWTLFFQNGKVKVFQGNQDSFTPVVNSLDPPLLTRYLRIHPQSWVHQIALRMEVLGCEAQDLY

SEQ ID NO: 247 - DNA, 4371 bp, synthetic construct
  misc_feature 1..4371: note = Variant of human B-domain deleted Factor VIII
  source 1..4371: mol_type = other DNA
atgcagattgaactgtctacctgcttcttcctctgtttgctgaggttctgctttagcgccactagacggtactaccttggcgctgtggagctgtcctgggactatatgcagagtgatttgggagagcttcccgtcgacgcacgatttcctcctcgcgttccaaagtcatttcccttcaacacaagccaggtgtacaagaagacgctcttcgtcgaattcaccgatcacctgttcaatatcgccaaacccagaccaccatggatgggtcttttggggcctaccatacaagcggaggtgtatgacacagttgttatcactctcaagaacatggcttctcatccggtaagtcttcacgcagtgggcgtgtcctactggaaagcttcagaaggagccgagtatgatgatcagacatcccagagggagaaagaagacgacaaggtatttccaggtgggtctcatacctatgtgtggcaagtgctcaaagagaatggccctatggcaagcgatccgctctgtttgacttacagctacctttcacacgttgacctcgtcaaggacctcaactccgggttgattggagccttgttggtatgcagggaaggatctcttgccaaagagaagacacagaccctccacaagtttatccttctctttgctgtgttcgatgagggcaaaagttggcatagcgaaacgaagaattccctcatgcaggatcgcgacgcagccagcgccagagcttggcccaagatgcacactgtgaacggatatgtcaataggtcacttcctggcttgattgggtgtcatcggaaaagtgtctactggcacgtgatcggaatggggacaacaccagaggtccactccatatttctcgaaggccataccttccttgttcgaaaccacagacaggcatccttggagatctctcccattacctttctcactgcccaaacgctccttatggacttgggtcagttccttctcttctgccatatcagctcacaccagcatgatggtatggaagcttatgtgaaagtcgacagttgtcctgaggagccacagttgcgcatgaagaataatgaagaagccgaggattacgacgacgatctcaccgattctgagatggacgtggtgaggtttgatgacgacaactctccctccttcattcaaatccggagcgtggcgaagaaacaccccaagacttgggtccactatatagcggcggaagaggaggattgggattacgctcctcttgtattggcaccagatgaccgctcatacaaaagccagtacctcaacaacggaccgcagagaattggccggaagtataagaaagtgcgatttatggcctatacagacgaaacctttaagacaagggaggccatccagcatgagagtgggattttgggacctcttctttacggcgaagttggtgataccctcctcatcatcttcaagaatcaagcttctcgcccctataacatttacccacacgggatcactgacgttaggcctttgtatagcagaagacttcccaaaggcgtgaagcatctcaaagacttccccattttgccaggcgagatctttaagtacaaatggaccgtcacagtggaagatggaccgactaaatcagaccctcgatgccttacgcggtactattcctccttcgtgaatatggagagagatttggcaagcggactcataggaccactcctcatctgttacaaggaatctgtagaccagaggggtaaccagattatgagtgataaacgcaatgtgatcctttttagcgtcttcgacgagaaccggtcctggtacttgaccgagaatatacaaaggttccttcccaaccccgcaggcgttcagttggaagaccctgagtttcaggccagcaatattatgcactcaatcaacggctatgtgtttgatagtctccagctttctgtttgcctccatgaagtagcctattggtacatcttgtcaattggtgctcaaacagacttcctctccgtcttcttctccggctacacctttaagcacaagatggtgtatgaggacactctcacactctttccattttctggagaaaccgtgttcatgagcatggagaatccaggcctttggatcttgggttgccacaacagtgattttcgcaatcggggaatgactgctctcctcaaagtcagcagctgtgataagaacacaggcgactattacgaagattcttacgaggacataagtgcctacttgttgtccaagaataacgccattgagcccagatcattctcccagaatcctcccgtgcttaaaaggcatcagcgcgaaatcaccagaactactcttcagtctgatcaagaggagattgactatgacgacaccataagcgtggaaatgaagaaggaggatttcgatatctatgacgaagatgagaaccagtctccgcggagctttcagaagaagacgcgacactacttcattgcagcagtcgaaaggctttgggactacggtatgtcatcatcccctcatgtgttgcgcaatagagctcagagtggaagtgttccacagttcaagaaagtcgtctttcaagagtttacagatggcagcttcacacagcctctctatcggggcgagcttaacgaacatttgggactccttggtccctatatccgagccgaagtggaggacaacattatggttacctttaggaatcaagcctctcgcccctacagcttctactcctccctcatcagttatgaggaggatcagagacaaggcgctgaaccacggaagaactttgtgaaaccgaatgagacgaagacctacttctggaaagtacagcaccacatggcccccacaaaagacgaattcgattgcaaagcatgggcgtatttttcagacgttgacttggagaaagatgtacattcaggacttattggtcctttgttggtgtgtcacactaacactctcaatccagcccatggcaggcaggtgacagtccaggaattcgctcttttctttaccatctttgatgagaccaagtcctggtacttcacggaaaacatggagcgcaattgcagagccccctgtaacatacagatggaggaccctacctttaaggaaaattatcggttccacgcaatcaacggatacattatggatacactccctggccttgtgatggctcaggaccaacgaatcaggtggtacctcctcagcatgggttctaatgagaacatacactccattcacttttcaggacatgtgttcactgtccggaagaaagaagagtataagatggccctctacaatttgtatccaggcgtgtttgagaccgttgaaatgcttccctctaaagctggcatctggagagtagagtgcttgatcggagaacatcttcacgcaggtatgagcaccttgttcctcgtgtacagcaacaaatgtcagaccccacttggcatggccagtggacacattcgcgactttcagatcacagcatctggccagtatggacaatgggccccaaagttggctcgcctccattactccggtagcataaatgcgtggtccactaaagaacctttcagctggattaaggtcgatcttcttgcccccatgatcatccacggcattaagacacagggagcgaggcagaaattctcctccctctacatctcacagttcattattatgtatagtttggacggcaagaagtggcaaacttatagaggtaacagtactggaacactcatggtgttcttcggcaacgttgatagctctggcatcaaacacaacatctttaatcctcccataatagctcggtacatcagattgcatccgacccactacagcattaggagtacactccgaatggagcttatgggttgcgacttgaattcctgttcaatgccactcggaatggagtctaaagccatctctgatgcacagataaccgccagtagctactttacgaacatgtttgctacgtggtcaccctctaaggcaaggcttcatttgcaaggccggtctaatgcctggagacctcaggtgaacaacccgaaagaatggctccaggtggactttcagaagaccatgaaagtaacaggtgtcactactcagggagttaagtccttgctcaccagcatgtatgtgaaggagttccttatttcctcatcacaagatggccaccagtggaccctcttctttcagaatggtaaggtcaaagtgtttcagggcaatcaagacagcttcacacccgtggtgaacagtcttgatcctccactcttgacacgataccttcgaatccatccacagtcttgggttcaccagattgcattgcgcatggaagtacttggatgcgaggctcaggacctctac

SEQ ID NO: 248 - protein, 1457 aa, synthetic construct
  REGION 1..1457: note = Variant of human B-domain deleted Factor VIII
MQIELSTCFFLCLLRFCFSATRRYYLGAVELSWDYMQSDLGELPVDARFPPRVPKSFPFNTSQVYKKTLFVEFTDHLFNIAKPRPPWMGLLGPTIQAEVYDTVVITLKNMASHPVSLHAVGVSYWKASEGAEYDDQTSQREKEDDKVFPGGSHTYVWQVLKENGPMASDPLCLTYSYLSHVDLVKDLNSGLIGALLVCREGSLAKEKTQTLHKFILLFAVFDEGKSWHSETKNSLMQDRDAASARAWPKMHTVNGYVNRSLPGLIGCHRKSVYWHVIGMGTTPEVHSIFLEGHTFLVRNHRQASLEISPITFLTAQTLLMDLGQFLLFCHISSHQHDGMEAYVKVDSCPEEPQLRMKNNEEAEDYDDDLTDSEMDVVRFDDDNSPSFIQIRSVAKKHPKTWVHYIAAEEEDWDYAPLVLAPDDRSYKSQYLNNGPQRIGRKYKKVRFMAYTDETFKTREAIQHESGILGPLLYGEVGDTLLIIFKNQASRPYNIYPHGITDVRPLYSRRLPKGVKHLKDFPILPGEIFKYKWTVTVEDGPTKSDPRCLTRYYSSFVNMERDLASGLIGPLLICYKESVDQRGNQIMSDKRNVILFSVFDENRSWYLTENIQRFLPNPAGVQLEDPEFQASNIMHSINGYVFDSLQLSVCLHEVAYWYILSIGAQTDFLSVFFSGYTFKHKMVYEDTLTLFPFSGETVFMSMENPGLWILGCHNSDFRNRGMTALLKVSSCDKNTGDYYEDSYEDISAYLLSKNNAIEPRSFSQNPPVLKRHQREITRTTLQSDQEEIDYDDTISVEMKKEDFDIYDEDENQSPRSFQKKTRHYFIAAVERLWDYGMSSSPHVLRNRAQSGSVPQFKKVVFQEFTDGSFTQPLYRGELNEHLGLLGPYIRAEVEDNIMVTFRNQASRPYSFYSSLISYEEDQRQGAEPRKNFVKPNETKTYFWKVQHHMAPTKDEFDCKAWAYFSDVDLEKDVHSGLIGPLLVCHTNTLNPAHGRQVTVQEFALFFTIFDETKSWYFTENMERNCRAPCNIQMEDPTFKENYRFHAINGYIMDTLPGLVMAQDQRIRWYLLSMGSNENIHSIHFSGHVFTVRKKEEYKMALYNLYPGVFETVEMLPSKAGIWRVECLIGEHLHAGMSTLFLVYSNKCQTPLGMASGHIRDFQITASGQYGQWAPKLARLHYSGSINAWSTKEPFSWIKVDLLAPMIIHGIKTQGARQKFSSLYISQFIIMYSLDGKKWQTYRGNSTGTLMVFFGNVDSSGIKHNIFNPPIIARYIRLHPTHYSIRSTLRMELMGCDLNSCSMPLGMESKAISDAQITASSYFTNMFATWSPSKARLHLQGRSNAWRPQVNNPKEWLQVDFQKTMKVTGVTTQGVKSLLTSMYVKEFLISSSQDGHQWTLFFQNGKVKVFQGNQDSFTPVVNSLDPPLLTRYLRIHPQSWVHQIALRMEVLGCEAQDLY

SEQ ID NO: 249 - DNA, 4371 bp, synthetic construct
  misc_feature 1..4371: note = Variant of human B-domain deleted Factor VIII
  source 1..4371: mol_type = other DNA
atgcagattgaactgtctacctgcttcttcctctgtttgctgaggttctgctttagcgccactagacggtactaccttggcgctgtggagctgtcctgggactatatgcagagtgatttgggagagcttcccgtcgacgcacgatttcctcctcgcgttccaaagtcatttcccttcaacacaagcgtggtgtacaagaagacgctcttcgtcgaattcaccgatcacctgttcaatatcgccaaacccagaccaccatggatgggtcttttggggcctaccatacaagcggaggtgtatgacacagttgttatcactctcaagaacatggcttctcatccggtaagtcttcacgcagtgggcgtgtcctactggaaagcttcagaaggagccgagtatgatgatcagacatcccagagggagaaagaagacgacaaggtatttccaggtgggtctcatacctatgtgtggcaagtgctcaaagagaatggccctatggcaagcgatccgctctgtttgacttacagctacctttcacacgttgacctcgtcaaggacctcaactccgggttgattggagccttgttggtatgcagggaaggatctcttgccaaagagaagacacagaccctccacaagtttatccttctctttgctgtgttcgatgagggcaaaagttggcatagcgaaacgaagaattccctcatgcaggatcgcgacgcagccagcgccagagcttggcccaagatgcacactgtgaacggatatgtcaataggtcacttcctggcttgattgggtgtcatcggaaaagtgtctactggcacgtgatcggaatggggacaacaccagaggtccactccatatttctcgaaggccataccttccttgttcgaaaccacagacaggcatccttggagatctctcccattacctttctcactgcccaaacgctccttatggacttgggtcagttccttctcttctgccatatcagctcacaccagcatgatggtatggaagcttatgtgaaagtcgacagttgtcctgagtcgccacagttgcgcatgaagaataatgaagaagccgaggattacgacgacgatctcaccgattctgagatggacgtggtgaggtttgatgacgacaactctccctccttcattcaaatccggagcgtggcgaagaaacaccccaagacttgggtccactatatagcggcggaagaggaggattgggattacgctcctcttgtattggcaccagatgaccgctcatacaaaagccagtacctcaacaacggaccgcagagaattggccggaagtataagaaagtgcgatttatggcctatacagacgaaacctttaagacaagggaggccatccagcatgagagtgggattttgggacctcttctttacggcgaagttggtgataccctcctcatcatcttcaagaatcaagcttctcgcccctataacatttacccacacgggatcactgacgttaggcctttgtatagcagaagacttcccaaaggcgtgaagcatctcaaagacttccccattttgccaggcgagatctttaagtacaaatggaccgtcacagtggaagatggaccgactaaatcagaccctcgatgccttacgcggtactattcctccttcgtgaatatggagagagatttggcaagcggactcataggaccactcctcatctgttacaaggaatctgtagaccagaggggtaaccagattatgagtgataaacgcaatgtgatcctttttagcgtcttcgacgagaaccggtcctggtacttgaccgagaatatacaaaggttccttcccaaccccgcaggcgttcagttggaagaccctgagtttcaggccagcaatattatgcactcaatcaacggctatgtgtttgatagtctccagctttctgtttgcctccatgaagtagcctattggtacatcttgtcaattggtgctcaaacagacttcctctccgtcttcttctccggctacacctttaagcacaagatggtgtatgaggacactctcacactctttccattttctggagaaaccgtgttcatgagcatggagaatccaggcctttggatcttgggttgccacaacagtgattttcgcaatcggggaatgactgctctcctcaaagtcagcagctgtgataagaacacaggcgactattacgaagattcttacgaggacataagtgcctacttgttgtccaagaataacgccattgagcccagatcattctcccagaatcctcccgtgcttaaaaggcatcagcgcgaaatcaccagaactactcttcagtctgatcaagaggagattgactatgacgacaccataagcgtggaaatgaagaaggaggatttcgatatctatgacgaagatgagaaccagtctccgcggagctttcagaagaagacgcgacactacttcattgcagcagtcgaaaggctttgggactacggtatgtcatcatcccctcatgtgttgcgcaatagagctcagagtggaagtgttccacagttcaagaaagtcgtctttcaagagtttacagatggcagcttcacacagcctctctatcggggcgagcttaacgaacatttgggactccttggtccctatatccgagccgaagtggaggacaacattatggttacctttaggaatcaagcctctcgcccctacagcttctactcctccctcatcagttatgaggaggatcagagacaaggcgctgaaccacggaagaactttgtgaaaccgaatgagacgaagacctacttctggaaagtacagcaccacatggcccccacaaaagacgaattcgattgcaaagcatgggcgtatttttcagacgttgacttggagaaagatgtacattcaggacttattggtcctttgttggtgtgtcacactaacactctcaatccagcccatggcaggcaggtgacagtccaggaattcgctcttttctttaccatctttgatgagaccaagtcctggtacttcacggaaaacatggagcgcaattgcagagccccctgtaacatacagatggaggaccctacctttaaggaaaattatcggttccacgcaatcaacggatacattatggatacactccctggccttgtgatggctcaggaccaacgaatcaggtggtacctcctcagcatgggttctaatgagaacatacactccattcacttttcaggacatgtgttcactgtccggaagaaagaagagtataagatggccctctacaatttgtatccaggcgtgtttgagaccgttgaaatgcttccctctaaagctggcatctggagagtagagtgcttgatcggagaacatcttcacgcaggtatgagcaccttgttcctcgtgtacagcaacaaatgtcagaccccacttggcatggccagtggacacattcgcgactttcagatcacagcatctggccagtatggacaatgggccccaaagttggctcgcctccattactccggtagcataaatgcgtggtccactaaagaacctttcagctggattaaggtcgatcttcttgcccccatgatcatccacggcattaagacacagggagcgaggcagaaattctcctccctctacatctcacagttcattattatgtatagtttggacggcaagaagtggcaaacttatagaggtaacagtactggaacactcatggtgttcttcggcaacgttgatagctctggcatcaaacacaacatctttaatcctcccataatagctcggtacatcagattgcatccgacccactacagcattaggagtacactccgaatggagcttatgggttgcgacttgaattcctgttcaatgccactcggaatggagtctaaagccatctctgatgcacagataaccgccagtagctactttacgaacatgtttgctacgtggtcaccctctaaggcaaggcttcatttgcaaggccggtctaatgcctggagacctcaggtgaacaacccgaaagaatggctccaggtggactttcagaagaccatgaaagtaacaggtgtcactactcagggagttaagtccttgctcaccagcatgtatgtgaaggagttccttatttcctcatcacaagatggccaccagtggaccctcttctttcagaatggtaaggtcaaagtgtttcagggcaatcaagacagcttcacacccgtggtgaacagtcttgatcctccactcttgacacgataccttcgaatccatccacagtcttgggttcaccagattgcattgcgcatggaagtacttggatgcgaggctcaggacctctac

SEQ ID NO: 250 - protein, 1457 aa, synthetic construct
  REGION 1..1457: note = Variant of human B-domain deleted Factor VIII
MQIELSTCFFLCLLRFCFSATRRYYLGAVELSWDYMQSDLGELPVDARFPPRVPKSFPFNTSVVYKKTLFVEFTDHLFNIAKPRPPWMGLLGPTIQAEVYDTVVITLKNMASHPVSLHAVGVSYWKASEGAEYDDQTSQREKEDDKVFPGGSHTYVWQVLKENGPMASDPLCLTYSYLSHVDLVKDLNSGLIGALLVCREGSLAKEKTQTLHKFILLFAVFDEGKSWHSETKNSLMQDRDAASARAWPKMHTVNGYVNRSLPGLIGCHRKSVYWHVIGMGTTPEVHSIFLEGHTFLVRNHRQASLEISPITFLTAQTLLMDLGQFLLFCHISSHQHDGMEAYVKVDSCPESPQLRMKNNEEAEDYDDDLTDSEMDVVRFDDDNSPSFIQIRSVAKKHPKTWVHYIAAEEEDWDYAPLVLAPDDRSYKSQYLNNGPQRIGRKYKKVRFMAYTDETFKTREAIQHESGILGPLLYGEVGDTLLIIFKNQASRPYNIYPHGITDVRPLYSRRLPKGVKHLKDFPILPGEIFKYKWTVTVEDGPTKSDPRCLTRYYSSFVNMERDLASGLIGPLLICYKESVDQRGNQIMSDKRNVILFSVFDENRSWYLTENIQRFLPNPAGVQLEDPEFQASNIMHSINGYVFDSLQLSVCLHEVAYWYILSIGAQTDFLSVFFSGYTFKHKMVYEDTLTLFPFSGETVFMSMENPGLWILGCHNSDFRNRGMTALLKVSSCDKNTGDYYEDSYEDISAYLLSKNNAIEPRSFSQNPPVLKRHQREITRTTLQSDQEEIDYDDTISVEMKKEDFDIYDEDENQSPRSFQKKTRHYFIAAVERLWDYGMSSSPHVLRNRAQSGSVPQFKKVVFQEFTDGSFTQPLYRGELNEHLGLLGPYIRAEVEDNIMVTFRNQASRPYSFYSSLISYEEDQRQGAEPRKNFVKPNETKTYFWKVQHHMAPTKDEFDCKAWAYFSDVDLEKDVHSGLIGPLLVCHTNTLNPAHGRQVTVQEFALFFTIFDETKSWYFTENMERNCRAPCNIQMEDPTFKENYRFHAINGYIMDTLPGLVMAQDQRIRWYLLSMGSNENIHSIHFSGHVFTVRKKEEYKMALYNLYPGVFETVEMLPSKAGIWRVECLIGEHLHAGMSTLFLVYSNKCQTPLGMASGHIRDFQITASGQYGQWAPKLARLHYSGSINAWSTKEPFSWIKVDLLAPMIIHGIKTQGARQKFSSLYISQFIIMYSLDGKKWQTYRGNSTGTLMVFFGNVDSSGIKHNIFNPPIIARYIRLHPTHYSIRSTLRMELMGCDLNSCSMPLGMESKAISDAQITASSYFTNMFATWSPSKARLHLQGRSNAWRPQVNNPKEWLQVDFQKTMKVTGVTTQGVKSLLTSMYVKEFLISSSQDGHQWTLFFQNGKVKVFQGNQDSFTPVVNSLDPPLLTRYLRIHPQSWVHQIALRMEVLGCEAQDLY

SEQ ID NO: 251 - DNA, 4371 bp, synthetic construct
  misc_feature 1..4371: note = Variant of human B-domain deleted Factor VIII
  source 1..4371: mol_type = other DNA
atgcagattgaactgtctacctgcttcttcctctgtttgctgaggttctgctttagcgccactagacggtactaccttggcgctgtggagctgtcctgggactatatgcagagtgatttgggagagcttcccgtcgacgcacgatttcctcctcgcgttccaaagtcatttcccttcaacacaagcgtggtgtacaagaagacgctcttcgtcgaattcaccgatcacctgttcaatatcgccaaacccagaccaccatggatgggtcttttggggcctaccatacaagcggaggtgtatgacacagttgttatcactctcaagaacatggcttctcatccggtaagtcttcacgcagtgggcgtgtcctactggaaagcttcagaaggagccgagtatgatgatcagacatcccagagggagaaagaagacgacaaggtatttccaggtgggtctcatacctatgtgtggcaagtgctcaaagagaatggccctatggcaagcgatccgctctgtttgacttacagctacctttcacacgttgacctcgtcaaggacctcaactccgggttgattggagccttgttggtatgcagggaaggatctcttgccaaagagaagacacagaccctccacaagtttatccttctctttgctgtgttcgatgagggcaaaagttggcatagcgaaacgaagaattccctcatgcaggatcgcgacgcagccagcgccagagcttggcccaagatgcacactgtgaacggatatgtcaataggtcacttcctggcttgattgggtgtcatcggaaaagtgtctactggcacgtgatcggaatggggacaacaccagaggtccactccatatttctcgaaggccataccttccttgttcgaaaccacagacaggcatccttggagatctctcccattacctttctcactgcccaaacgctccttatggacttgggtcagttccttctcttctgccatatcagctcacaccagcatgatggtatggaagcttatgtgaaagtcgacagttgtcctgaggagccacagttgcgcatgaagaataatgaagaagccgaggattacgacgacgatctcaccgattctgagatggacgtggtgaggtttgatgacgacaactctccctccttcattcaaatccggagcgtggcgaagaaacaccccaagacttgggtccactatatagcggcggaagaggaggattgggattacgctcctcttgtattggcaccagatgaccgctcatacaaaagccagtacctcaacaacggaccgcagagaattggccggaagtataagaaagtgcgatttatggcctatacagacgaaacctttaagacaagggaggccatccagcatgagagtgggattttgggacctcttctttacggcgaagttggtgataccctcctcatcatcttcaagaatcaagcttctcgcccctataacatttacccacacgggatcactgacgttaggcctttgtatagcagaagacttcccaaaggcgtgaagcatctcaaagacttccccattttgccaggcgagatctttaagtacaaatggaccgtcacagtggaagatggaccgactaaatcagaccctcgatgccttacgcggtactattcctccttcgtgaatatggagagagatttggcaagcggactcataggaccactcctcatctgttacaaggaatctgtagaccagaggggtaaccagattatgagtgataaacgcaatgtgatcctttttagcgtcttcgacgagaaccggtcctggtacttgaccgagaatatacaaaggttccttcccaaccccgcaggcgttcagttggaagaccctgagtttcaggccagcaatattatgcactcaatcaacggctatgtgtttgatagtctccagctttctgtttgcctccatgaagtagcctattggtacatcttgtcaattggtgctcaaacagacttcctctccgtcttcttctccggctacacctttaagcacaagatggtgtatgaggacactctcacactctttccattttctggagaaaccgtgttcatgagcatggagaatccaggcctttggatcttgggttgccacaacagtgattttcgcaatcggggaatgactgctctcctcaaagtcagcagctgtgataagaacacaggcgactattacgaagattcttacgaggacataagtgcctacttgttgtccaagaataacgccattgagcccagatcattctcccagaatcctcccgtgcttaaaaggcatcagcgcgaaatcaccagaactactcttcagtctgatcaagaggagattgactatgacgacaccataagcgtggaaatgaagaaggaggatttcgatatctatgacgaagatgagaaccagtctccgcggagctttcagaagaagacgcgacactacttcattgcagcagtcgaaaggctttgggactacggtatgtcatcatcccctcatgtgttgcgcaatagagctcagagtggaagtgttccacagttcaagaaagtcgtctttcaagagtttacagatggcagcttcacacagcctctctatcggggcgagcttaacgaacatttgggactccttggtccctatatccgagccgaagtggaggacaacattatggttacctttaggaatcaagcctctcgcccctacagcttctactcctccctcatcagttatgaggaggatcagagacaaggcgctgaaccacggaagaactttgtgaaaccgaatgagacgaagacctacttctggaaagtacagcaccacatggcccccacaaaagacgaattcgattgcaaagcatgggcgtatttttcagacgttgacttggagaaagatgtacattcaggacttattggtcctttgttggtgtgtcacactaacactctcaatccagcccatggcaggcaggtgacagtccaggaattcgctcttttctttaccatctttgatgagaccaagtcctggtacttcacggaaaacatggagcgcaattgcagagccccctgtaacatacagatggaggaccctacctttaaggaaaattatcggttccacgcaatcaacggatacattatggatacactccctggccttgtgatggctcaggaccaacgaatcaggtggtacctcctcagcatgggttctaatgagaacatacactccattcacttttcaggacatgtgttcactgtccggaagaaagaagagtataagatggccctctacaatttgtatccaggcgtgtttgagaccgttgaaatgcttccctctaaagctggcatctggagagtagagtgcttgatcggagaacatcttcacgcaggtatgagcaccttgttcctcgtgtacagcaacaaatgtcagaccccacttggcatggccagtggacacattcgcgactttcagatcacagcatctggccagtatggacaatgggccccaaagttggctcgcctccattactccggtagcataaatgcgtggtccactaaagaacctttcagctggattaaggtcgatcttcttgcccccatgatcatccacggcattaagacacagggagcgaggcagaaattctcctccctctacatctcacagttcattattatgtatagtttggacggcaagaagtggcaaacttatagaggtaacagtactggaacactcatggtgttcttcggcaacgttgatagctctggcatcaaacacaacatctttaatcctcccataatagctcggtacatcagattgcatccgacccactacagcattaggagtacactccgaatggagcttatgggttgcgacttgaattcctgttcaatgccactcggaatggagtctaaagccatctctgatgcacagataaccgccagtagctactttacgaacatgtttgctacgtggtcaccctctaaggcaaggcttcatttgcaaggccggtctaatgcctggagacctcaggtgaacaacccgaaagaatggctccaggtggactttcagaagaccatgaaagtaacaggtgtcactactcagggagttaagtccttggataccagcatgtatgtgaaggagttccttatttcctcatcacaagatggccaccagtggaccctcttctttcagaatggtaaggtcaaagtgtttcagggcaatcaagacagcttcacacccgtggtgaacagtcttgatcctccactcttgacacgataccttcgaatccatccacagtcttgggttcaccagattgcattgcgcatggaagtacttggatgcgaggctcaggacctctac

SEQ ID NO: 252 - protein, 1457 aa, synthetic construct
  REGION 1..1457: note = Variant of human B-domain deleted Factor VIII
MQIELSTCFFLCLLRFCFSATRRYYLGAVELSWDYMQSDLGELPVDARFPPRVPKSFPFNTSVVYKKTLFVEFTDHLFNIAKPRPPWMGLLGPTIQAEVYDTVVITLKNMASHPVSLHAVGVSYWKASEGAEYDDQTSQREKEDDKVFPGGSHTYVWQVLKENGPMASDPLCLTYSYLSHVDLVKDLNSGLIGALLVCREGSLAKEKTQTLHKFILLFAVFDEGKSWHSETKNSLMQDRDAASARAWPKMHTVNGYVNRSLPGLIGCHRKSVYWHVIGMGTTPEVHSIFLEGHTFLVRNHRQASLEISPITFLTAQTLLMDLGQFLLFCHISSHQHDGMEAYVKVDSCPEEPQLRMKNNEEAEDYDDDLTDSEMDVVRFDDDNSPSFIQIRSVAKKHPKTWVHYIAAEEEDWDYAPLVLAPDDRSYKSQYLNNGPQRIGRKYKKVRFMAYTDETFKTREAIQHESGILGPLLYGEVGDTLLIIFKNQASRPYNIYPHGITDVRPLYSRRLPKGVKHLKDFPILPGEIFKYKWTVTVEDGPTKSDPRCLTRYYSSFVNMERDLASGLIGPLLICYKESVDQRGNQIMSDKRNVILFSVFDENRSWYLTENIQRFLPNPAGVQLEDPEFQASNIMHSINGYVFDSLQLSVCLHEVAYWYILSIGAQTDFLSVFFSGYTFKHKMVYEDTLTLFPFSGETVFMSMENPGLWILGCHNSDFRNRGMTALLKVSSCDKNTGDYYEDSYEDISAYLLSKNNAIEPRSFSQNPPVLKRHQREITRTTLQSDQEEIDYDDTISVEMKKEDFDIYDEDENQSPRSFQKKTRHYFIAAVERLWDYGMSSSPHVLRNRAQSGSVPQFKKVVFQEFTDGSFTQPLYRGELNEHLGLLGPYIRAEVEDNIMVTFRNQASRPYSFYSSLISYEEDQRQGAEPRKNFVKPNETKTYFWKVQHHMAPTKDEFDCKAWAYFSDVDLEKDVHSGLIGPLLVCHTNTLNPAHGRQVTVQEFALFFTIFDETKSWYFTENMERNCRAPCNIQMEDPTFKENYRFHAINGYIMDTLPGLVMAQDQRIRWYLLSMGSNENIHSIHFSGHVFTVRKKEEYKMALYNLYPGVFETVEMLPSKAGIWRVECLIGEHLHAGMSTLFLVYSNKCQTPLGMASGHIRDFQITASGQYGQWAPKLARLHYSGSINAWSTKEPFSWIKVDLLAPMIIHGIKTQGARQKFSSLYISQFIIMYSLDGKKWQTYRGNSTGTLMVFFGNVDSSGIKHNIFNPPIIARYIRLHPTHYSIRSTLRMELMGCDLNSCSMPLGMESKAISDAQITASSYFTNMFATWSPSKARLHLQGRSNAWRPQVNNPKEWLQVDFQKTMKVTGVTTQGVKSLDTSMYVKEFLISSSQDGHQWTLFFQNGKVKVFQGNQDSFTPVVNSLDPPLLTRYLRIHPQSWVHQIALRMEVLGCEAQDLY

SEQ ID NO: 253 - DNA, 4371 bp, synthetic construct
  misc_feature 1..4371: note = Variant of human B-domain deleted Factor VIII
  source 1..4371: mol_type = other DNA
atgcagattgaactgtctacctgcttcttcctctgtttgctgaggttctgctttagcgccactagacggtactaccttggcgctgtggagctgtcctgggactatatgcagagtgatttgggagagcttcccgtcgacgcacgatttcctcctcgcgttccaaagtcatttcccttcaacacaagcgtggtgtacaagaagacgctcttcgtcgaattcaccgatcacctgttcaatatcgccaaacccagaccaccatggatgggtcttttggggcctaccatacaagcggaggtgtatgacacagttgttatcactctcaagaacatggcttctcatccggtaagtcttcacgcagtgggcgtgtcctactggaaagcttcagaaggagccgagtatgatgatcagacatcccagagggagaaagaagacgacaaggtatttccaggtgggtctcatacctatgtgtggcaagtgctcaaagagaatggccctatggcaagcgatccgctctgtttgacttacagctacctttcacacgttgacctcgtcaaggacctcaactccgggttgattggagccttgttggtatgcagggaaggatctcttgccaaagagaagacacagaccctccacaagtttatccttctctttgctgtgttcgatgagggcaaaagttggcatagcgaaacgaagaattccctcatgcaggatcgcgacgcagccagcgccagagcttggcccaagatgcacactgtgaacggatatgtcaataggtcacttcctggcttgattgggtgtcatcggaaaagtgtctactggcacgtgatcggaatggggacaacaccagaggtccactccatatttctcgaaggccataccttccttgttcgaaaccacagacaggcatccttggagatctctcccattacctttctcactgcccaaacgctccttatggacttgggtcagttccttctcttctgccatatcagctcacaccagcatgatggtatggaagcttatgtgaaagtcgacagttgtcctgaggagccacagttgcgcatgaagaataatgaagaagccgaggattacgacgacgatctcaccgattctgagatggacgtggtgaggtttgatgacgacaactctccctccttcattcaaatccggagcgtggcgaagaaacaccccaagacttgggtccactatatagcggcggaagaggaggattgggattacgctcctcttgtattggcaccagatgaccgctcatacaaaagccagtacctcaacaacggaccgcagagaattggccggaagtataagaaagtgcgatttatggcctatacagacgaaacctttaagacaagggaggccatccagcatgagagtgggattttgggacctcttctttacggcgaagttggtgataccctcctcatcatcttcaagaatcaagcttctcgcccctataacatttacccacacgggatcactgacgttaggcctttgtatagcagaagacttcccaaaggcgtgaagcatctcaaagacttccccattttgccaggcgagatctttaagtacaaatggaccgtcacagtggaagatggaccgactaaatcagaccctcgatgccttacgcggtactattcctccttcgtgaatatggagagagatttggcaagcggactcataggaccactcctcatctgttacaaggaatctgtagaccagaggggtaaccagattatgagtgataaacgcaatgtgatcctttttagcgtcttcgacgagaaccggtcctggtacttgaccgagaatatacaaaggttccttcccaaccccgcaggcgttcagttggaagaccctgagtttcaggccagcaatattatgcactcaatcaacggctatgtgtttgatagtctccagctttctgtttgcctccatgaagtagcctattggtacatcttgtcaattggtgctcaaacagacttcctctccgtcttcttctccggctacacctttaagcacaagatggtgtatgaggacactctcacactctttccattttctggagaaaccgtgttcatgagcatggagaatccaggcctttggatcttgggttgccacaacagtgattttcgcaatcggggaatgactgctctcctcaaagtcagcagctgtgataagaacacaggcgactattacgaagattcttacgaggacataagtgcctacttgttgtccaagaataacgccattgagcccagatcattctcccagaatcctcccgtgcttaaaaggcatcagcgcgaaatcaccagaactactcttcagtctgatcaagaggagattgactatgacgacaccataagctcggaaatgaagaaggaggatttcgatatctatgacgaagatgagaaccagtctccgcggagctttcagaagaagacgcgacactacttcattgcagcagtcgaaaggctttgggactacggtatgtcatcatcccctcatgtgttgcgcaatagagctcagagtggaagtgttccacagttcaagaaagtcgtctttcaagagtttacagatggcagcttcacacagcctctctatcggggcgagcttaacgaacatttgggactccttggtccctatatccgagccgaagtggaggacaacattatggttacctttaggaatcaagcctctcgcccctacagcttctactcctccctcatcagttatgaggaggatcagagacaaggcgctgaaccacggaagaactttgtgaaaccgaatgagacgaagacctacttctggaaagtacagcaccacatggcccccacaaaagacgaattcgattgcaaagcatgggcgtatttttcagacgttgacttggagaaagatgtacattcaggacttattggtcctttgttggtgtgtcacactaacactctcaatccagcccatggcaggcaggtgacagtccaggaattcgctcttttctttaccatctttgatgagaccaagtcctggtacttcacggaaaacatggagcgcaattgcagagccccctgtaacatacagatggaggaccctacctttaaggaaaattatcggttccacgcaatcaacggatacattatggatacactccctggccttgtgatggctcaggaccaacgaatcaggtggtacctcctcagcatgggttctaatgagaacatacactccattcacttttcaggacatgtgttcactgtccggaagaaagaagagtataagatggccctctacaatttgtatccaggcgtgtttgagaccgttgaaatgcttccctctaaagctggcatctggagagtagagtgcttgatcggagaacatcttcacgcaggtatgagcaccttgttcctcgtgtacagcaacaaatgtcagaccccacttggcatggccagtggacacattcgcgactttcagatcacagcatctggccagtatggacaatgggccccaaagttggctcgcctccattactccggtagcataaatgcgtggtccactaaagaacctttcagctggattaaggtcgatcttcttgcccccatgatcatccacggcattaagacacagggagcgaggcagaaattctcctccctctacatctcacagttcattattatgtatagtttggacggcaagaagtggcaaacttatagaggtaacagtactggaacactcatggtgttcttcggcaacgttgatagctctggcatcaaacacaacatctttaatcctcccataatagctcggtacatcagattgcatccgacccactacagcattaggagtacactccgaatggagcttatgggttgcgacttgaattcctgttcaatgccactcggaatggagtctaaagccatctctgatgcacagataaccgccagtagctactttacgaacatgtttgctacgtggtcaccctctaaggcaaggcttcatttgcaaggccggtctaatgcctggagacctcaggtgaacaacccgaaagaatggctccaggtggactttcagaagaccatgaaagtaacaggtgtcactactcagggagttaagtccttgctcaccagcatgtatgtgaaggagttccttatttcctcatcacaagatggccaccagtggaccctcttctttcagaatggtaaggtcaaagtgtttcagggcaatcaagacagcttcacacccgtggtgaacagtcttgatcctccactcttgacacgataccttcgaatccatccacagtcttgggttcaccagattgcattgcgcatggaagtacttggatgcgaggctcaggacctctac

SEQ ID NO: 254 - protein, 1457 aa, synthetic construct
  REGION 1..1457: note = Variant of human B-domain deleted Factor VIII
MQIELSTCFFLCLLRFCFSATRRYYLGAVELSWDYMQSDLGELPVDARFPPRVPKSFPFNTSVVYKKTLFVEFTDHLFNIAKPRPPWMGLLGPTIQAEVYDTVVITLKNMASHPVSLHAVGVSYWKASEGAEYDDQTSQREKEDDKVFPGGSHTYVWQVLKENGPMASDPLCLTYSYLSHVDLVKDLNSGLIGALLVCREGSLAKEKTQTLHKFILLFAVFDEGKSWHSETKNSLMQDRDAASARAWPKMHTVNGYVNRSLPGLIGCHRKSVYWHVIGMGTTPEVHSIFLEGHTFLVRNHRQASLEISPITFLTAQTLLMDLGQFLLFCHISSHQHDGMEAYVKVDSCPEEPQLRMKNNEEAEDYDDDLTDSEMDVVRFDDDNSPSFIQIRSVAKKHPKTWVHYIAAEEEDWDYAPLVLAPDDRSYKSQYLNNGPQRIGRKYKKVRFMAYTDETFKTREAIQHESGILGPLLYGEVGDTLLIIFKNQASRPYNIYPHGITDVRPLYSRRLPKGVKHLKDFPILPGEIFKYKWTVTVEDGPTKSDPRCLTRYYSSFVNMERDLASGLIGPLLICYKESVDQRGNQIMSDKRNVILFSVFDENRSWYLTENIQRFLPNPAGVQLEDPEFQASNIMHSINGYVFDSLQLSVCLHEVAYWYILSIGAQTDFLSVFFSGYTFKHKMVYEDTLTLFPFSGETVFMSMENPGLWILGCHNSDFRNRGMTALLKVSSCDKNTGDYYEDSYEDISAYLLSKNNAIEPRSFSQNPPVLKRHQREITRTTLQSDQEEIDYDDTISSEMKKEDFDIYDEDENQSPRSFQKKTRHYFIAAVERLWDYGMSSSPHVLRNRAQSGSVPQFKKVVFQEFTDGSFTQPLYRGELNEHLGLLGPYIRAEVEDNIMVTFRNQASRPYSFYSSLISYEEDQRQGAEPRKNFVKPNETKTYFWKVQHHMAPTKDEFDCKAWAYFSDVDLEKDVHSGLIGPLLVCHTNTLNPAHGRQVTVQEFALFFTIFDETKSWYFTENMERNCRAPCNIQMEDPTFKENYRFHAINGYIMDTLPGLVMAQDQRIRWYLLSMGSNENIHSIHFSGHVFTVRKKEEYKMALYNLYPGVFETVEMLPSKAGIWRVECLIGEHLHAGMSTLFLVYSNKCQTPLGMASGHIRDFQITASGQYGQWAPKLARLHYSGSINAWSTKEPFSWIKVDLLAPMIIHGIKTQGARQKFSSLYISQFIIMYSLDGKKWQTYRGNSTGTLMVFFGNVDSSGIKHNIFNPPIIARYIRLHPTHYSIRSTLRMELMGCDLNSCSMPLGMESKAISDAQITASSYFTNMFATWSPSKARLHLQGRSNAWRPQVNNPKEWLQVDFQKTMKVTGVTTQGVKSLLTSMYVKEFLISSSQDGHQWTLFFQNGKVKVFQGNQDSFTPVVNSLDPPLLTRYLRIHPQSWVHQIALRMEVLGCEAQDLY

SEQ ID NO: 255 - DNA, 4371 bp, synthetic construct
  misc_feature 1..4371: note = Variant of human B-domain deleted Factor VIII
  source 1..4371: mol_type = other DNA
atgcagattgaactgtctacctgcttcttcctctgtttgctgaggttctgctttagcgccactagacggtactaccttggcgctgtggagctgtcctgggactatatgcagagtgatttgggagagcttcccgtcgacgcacgatttcctcctcgcgttccaaagtcatttcccttcaacacaagcgtggtgtacaagaagacgctcttcgtcgaattcaccgatcacctgttcaatatcgccaaacccagaccaccatggatgggtcttttggggcctaccatacaagcggaggtgtatgacacagttgttatcactctcaagaacatggcttctcatccggtaagtcttcacgcagtgggcgtgtcctactggaaagcttcagaaggagccgagtatgatgatcagacatcccagagggagaaagaagacgacaaggtatttccaggtgggtctcatacctatgtgtggcaagtgctcaaagagaatggccctatggcaagcgatccgctctgtttgacttacagctacctttcacacgttgacctcgtcaaggacctcaactccgggttgattggagccttgttggtatgcagggaaggatctcttgccaaagagaagacacagaccctccacaagtttatccttctctttgctgtgttcgatgagggcaaaagttggcatagcgaaacgaagaattccctcatgcaggatcgcgacgcagccagcgccagagcttggcccaagatgcacactgtgaacggatatgtcaataggtcacttcctggcttgattgggtgtcatcggaaaagtgtctactggcacgtgatcggaatggggacaacaccagaggtccactccatatttctcgaaggccataccttccttgttcgaaaccacagacaggcatccttggagatctctcccattacctttctcactgcccaaacgctccttatggacttgggtcagttccttctcttctgccatatcagctcacaccagcatgatggtatggaagcttatgtgaaagtcgacagttgtcctgaggagccacagttgcgcatgaagaagaatgaagaagccgaggattacgacgacgatctcaccgattctgagatggacgtggtgaggtttgatgacgacaactctccctccttcattcaaatccggagcgtggcgaagaaacaccccaagacttgggtccactatatagcggcggaagaggaggattgggattacgctcctcttgtattggcaccagatgaccgctcatacaaaagccagtacctcaacaacggaccgcagagaattggccggaagtataagaaagtgcgatttatggcctatacagacgaaacctttaagacaagggaggccatccagcatgagagtgggattttgggacctcttctttacggcgaagttggtgataccctcctcatcatcttcaagaatcaagcttctcgcccctataacatttacccacacgggatcactgacgttaggcctttgtatagcagaagacttcccaaaggcgtgaagcatctcaaagacttccccattttgccaggcgagatctttaagtacaaatggaccgtcacagtggaagatggaccgactaaatcagaccctcgatgccttacgcggtactattcctccttcgtgaatatggagagagatttggcaagcggactcataggaccactcctcatctgttacaaggaatctgtagaccagaggggtaaccagattatgagtgataaacgcaatgtgatcctttttagcgtcttcgacgagaaccggtcctggtacttgaccgagaatatacaaaggttccttcccaaccccgcaggcgttcagttggaagaccctgagtttcaggccagcaatattatgcactcaatcaacggctatgtgtttgatagtctccagctttctgtttgcctccatgaagtagcctattggtacatcttgtcaattggtgctcaaacagacttcctctccgtcttcttctccggctacacctttaagcacaagatggtgtatgaggacactctcacactctttccattttctggagaaaccgtgttcatgagcatggagaatccaggcctttggatcttgggttgccacaacagtgattttcgcaatcggggaatgactgctctcctcaaagtcagcagctgtgataagaacacaggcgactattacgaagattcttacgaggacataagtgcctacttgttgtccaagaataacgccattgagcccagatcattctcccagaatcctcccgtgcttaaaaggcatcagcgcgaaatcaccagaactactcttcagtctgatcaagaggagattgactatgacgacaccataagcgtggaaatgaagaaggaggatttcgatatctatgacgaagatgagaaccagtctccgcggagctttcagaagaagacgcgacactacttcattgcagcagtcgaaaggctttgggactacggtatgtcatcatcccctcatgtgttgcgcaatagagctcagagtggaagtgttccacagttcaagaaagtcgtctttcaagagtttacagatggcagcttcacacagcctctctatcggggcgagcttaacgaacatttgggactccttggtccctatatccgagccgaagtggaggacaacattatggttacctttaggaatcaagcctctcgcccctacagcttctactcctccctcatcagttatgaggaggatcagagacaaggcgctgaaccacggaagaactttgtgaaaccgaatgagacgaagacctacttctggaaagtacagcaccacatggcccccacaaaagacgaattcgattgcaaagcatgggcgtatttttcagacgttgacttggagaaagatgtacattcaggacttattggtcctttgttggtgtgtcacactaacactctcaatccagcccatggcaggcaggtgacagtccaggaattcgctcttttctttaccatctttgatgagaccaagtcctggtacttcacggaaaacatggagcgcaattgcagagccccctgtaacatacagatggaggaccctacctttaaggaaaattatcggttccacgcaatcaacggatacattatggatacactccctggccttgtgatggctcaggaccaacgaatcaggtggtacctcctcagcatgggttctaatgagaacatacactccattcacttttcaggacatgtgttcactgtccggaagaaagaagagtataagatggccctctacaatttgtatccaggcgtgtttgagaccgttgaaatgcttccctctaaagctggcatctggagagtagagtgcttgatcggagaacatcttcacgcaggtatgagcaccttgttcctcgtgtacagcaacaaatgtcagaccccacttggcatggccagtggacacattcgcgactttcagatcacagcatctggccagtatggacaatgggccccaaagttggctcgcctccattactccggtagcataaatgcgtggtccactaaagaacctttcagctggattaaggtcgatcttcttgcccccatgatcatccacggcattaagacacagggagcgaggcagaaattctcctccctctacatctcacagttcattattatgtatagtttggacggcaagaagtggcaaacttatagaggtaacagtactggaacactcatggtgttcttcggcaacgttgatagctctggcatcaaacacaacatctttaatcctcccataatagctcggtacatcagattgcatccgacccactacagcattaggagtacactccgaatggagcttatgggttgcgacttgaattcctgttcaatgccactcggaatggagtctaaagccatctctgatgcacagataaccgccagtagctactttacgaacatgtttgctacgtggtcaccctctaaggcaaggcttcatttgcaaggccggtctaatgcctggagacctcaggtgaacaacccgaaagaatggctccaggtggactttcagaagaccatgaaagtaacaggtgtcactactcagggagttaagtccttgctcaccagcatgtatgtgaaggagttccttatttcctcatcacaagatggccaccagtggaccctcttctttcagaatggtaaggtcaaagtgtttcagggcaatcaagacagcttcacacccgtggtgaacagtcttgatcctccactcttgacacgataccttcgaatccatccacagtcttgggttcaccagattgcattgcgcatggaagtacttggatgcgaggctcaggacctctac

SEQ ID NO: 256 - protein, 1457 aa, synthetic construct
  REGION 1..1457: note = Variant of human B-domain deleted Factor VIII
MQIELSTCFFLCLLRFCFSATRRYYLGAVELSWDYMQSDLGELPVDARFPPRVPKSFPFNTSVVYKKTLFVEFTDHLFNIAKPRPPWMGLLGPTIQAEVYDTVVITLKNMASHPVSLHAVGVSYWKASEGAEYDDQTSQREKEDDKVFPGGSHTYVWQVLKENGPMASDPLCLTYSYLSHVDLVKDLNSGLIGALLVCREGSLAKEKTQTLHKFILLFAVFDEGKSWHSETKNSLMQDRDAASARAWPKMHTVNGYVNRSLPGLIGCHRKSVYWHVIGMGTTPEVHSIFLEGHTFLVRNHRQASLEISPITFLTAQTLLMDLGQFLLFCHISSHQHDGMEAYVKVDSCPEEPQLRMKKNEEAEDYDDDLTDSEMDVVRFDDDNSPSFIQIRSVAKKHPKTWVHYIAAEEEDWDYAPLVLAPDDRSYKSQYLNNGPQRIGRKYKKVRFMAYTDETFKTREAIQHESGILGPLLYGEVGDTLLIIFKNQASRPYNIYPHGITDVRPLYSRRLPKGVKHLKDFPILPGEIFKYKWTVTVEDGPTKSDPRCLTRYYSSFVNMERDLASGLIGPLLICYKESVDQRGNQIMSDKRNVILFSVFDENRSWYLTENIQRFLPNPAGVQLEDPEFQASNIMHSINGYVFDSLQLSVCLHEVAYWYILSIGAQTDFLSVFFSGYTFKHKMVYEDTLTLFPFSGETVFMSMENPGLWILGCHNSDFRNRGMTALLKVSSCDKNTGDYYEDSYEDISAYLLSKNNAIEPRSFSQNPPVLKRHQREITRTTLQSDQEEIDYDDTISVEMKKEDFDIYDEDENQSPRSFQKKTRHYFIAAVERLWDYGMSSSPHVLRNRAQSGSVPQFKKVVFQEFTDGSFTQPLYRGELNEHLGLLGPYIRAEVEDNIMVTFRNQASRPYSFYSSLISYEEDQRQGAEPRKNFVKPNETKTYFWKVQHHMAPTKDEFDCKAWAYFSDVDLEKDVHSGLIGPLLVCHTNTLNPAHGRQVTVQEFALFFTIFDETKSWYFTENMERNCRAPCNIQMEDPTFKENYRFHAINGYIMDTLPGLVMAQDQRIRWYLLSMGSNENIHSIHFSGHVFTVRKKEEYKMALYNLYPGVFETVEMLPSKAGIWRVECLIGEHLHAGMSTLFLVYSNKCQTPLGMASGHIRDFQITASGQYGQWAPKLARLHYSGSINAWSTKEPFSWIKVDLLAPMIIHGIKTQGARQKFSSLYISQFIIMYSLDGKKWQTYRGNSTGTLMVFFGNVDSSGIKHNIFNPPIIARYIRLHPTHYSIRSTLRMELMGCDLNSCSMPLGMESKAISDAQITASSYFTNMFATWSPSKARLHLQGRSNAWRPQVNNPKEWLQVDFQKTMKVTGVTTQGVKSLLTSMYVKEFLISSSQDGHQWTLFFQNGKVKVFQGNQDSFTPVVNSLDPPLLTRYLRIHPQSWVHQIALRMEVLGCEAQDLY

SEQ ID NO: 257 - DNA, 4371 bp, synthetic construct
  misc_feature 1..4371: note = Variant of human B-domain deleted Factor VIII
  source 1..4371: mol_type = other DNA
atgcagattgaactgtctacctgcttcttcctctgtttgctgaggttctgctttagcgccactagacggtactaccttggcgctgtggagctgtcctgggactatatgcagagtgatttgggagagcttcccgtcgacgcacgatttcctcctcgcgttccaaagtcatttcccttcaacacaagcgtggtgtacaagaagacgctcttcgtcgaattcaccgatcacctgttcaatatcgccaaacccagaccaccatggatgggtcttttggggcctaccatacaagcggaggtgtatgacacagttgttatcactctcaagaacatggcttctcatccggtaagtcttcacgcagtgggcgtgtcctactggaaagcttcagaaggagccgagtatgatgatcagacatcccagagggagaaagaagacgacaaggtatttccaggtgggtctcatacctatgtgtggcaagtgctcaaagagaatggccctatggcaagcgatccgctctgtttgacttacagctacctttcacacgttgacctcgtcaaggacctcaactccgggttgattggagccttgttggtatgcagggaaggatctcttgccaaagagaagacacagaccctccacaagtttatccttctctttgctgtgttcgatgagggcaaaagttggcatagcgaaacgaagaattccctcatgcaggatcgcgacgcagccagcgccagagcttggcccaagatgcacactgtgaacggatatgtcaataggtcacttcctggcttgattgggtgtcatcggaaaagtgtctactggcacgtgatcggaatggggacaacaccagaggtccactccatatttctcgaaggccataccttccttgttcgaaaccacagacaggcatccttggagatctctcccattacctttctcactgcccaaacgctccttatggacttgggtcagttccttctcttctgccatatcagctcacaccagcatgatggtatggaagcttatgtgaaagtcgacagttgtcctgaggagccacagttgcgcatgaagaataatgaagaagccgaggattacgacgacgatctcaccgattctgagatggacgtggtgaggtttgatgacgacaactctccctccttcattcaaatccggagcgtggcgaagaaacaccccaagacttgggtccactatatagcggcggaagaggaggattgggattacgctcctcttgtattggcaccagatgaccgctcatacaaaagccagtacctcaacaacggaccgcagagaattggccggaagtataagaaagtgcgatttatggcctatacagacgaaacctttaagacaagggaggccatccagcatgagagtgggattttgggacctcttctttacggcgaagttggtgataccctcctcatcatcttcaagaatcaagcttctcgcccctataacatttacccacacgggatcactgacgttaggcctttgtatagcagaagacttcccaaaggcgtgaagcatctcaaagacttccccattttgccaggcgagatctttaagtacaaatggaccgtcacagtggaagatggaccgactaaatcagaccctcgatgccttacgcggtactattcctccttcgtgaatatggagagagatttggcaagcggactcataggaccactcctcatctgttacaaggaatctgtagaccagaggggtaaccagattatgagtgataaacgcaatgtgatcctttttagcgtcttcgacgagaaccggtcctggtacttgaccgagaatatacaaaggttccttcccaaccccgcaggcgttcagttggaagaccctgagtttcaggccagcaatattatgcactcaatcaacggctatgtgtttgatagtctccagctttctgtttgcctccatgaagtagcctattggtacatcttgtcaattggtgctcaaacagacttcctctccgtcttcttctccggctacacctttaagcacaagatggtgtatgaggacactctcacactctttccattttctggagaaaccgtgttcatgagcatggagaatccaggcctttggatcttgggttgccacaacagtgattttcgcaatcggggaatgactgctctcctcaaagtcagcagctgtgataagaacacaggcgactattacgaagattcttacgaggacataagtgcctacttgttgtccaagaataacgccattgagcccagatcattctcccagaatcctcccgtgcttaaaaggcatcagcgcgaaatcaccagaactactcttcagtctgatcaagaggagattgactatgacgacaccataagcgtggaaatgaagaaggaggatttcgatatctatgacgaagatgagaaccagtctccgcggagctttcagaagaagacgcgacactacttcattgcagcagtcgaaaggctttgggactacggtatgtcatcatcccctcatgtgttgcgcaatagagctcagagtggaagtgttccacagttcaagaaagtcgtctttcaagagtttacagatggcagcttcacacagcctctctatcggggcgagcttaacgaacatttgggactccttggtccctatatccgagccgaagtggaggacaacattatggttacctttaggaatcaagcctctcgcccctacagcttctactcctccctcatcagttatgaggaggatcagagacaaggcgctgaaccacggaagaactttgtgaaaccgaatgagacgaagacctacttctggaaagtacagcaccacatggcccccacaaaagacgaattcgattgcaaagcatgggcgtatttttcagacgttgacttggagaaagatgtacattcaggacttattggtcctttgttggtgtgtcacactaacactctcaatccagcccatggcaggcaggtgacagtcagggaattcgctcttttctttaccatctttgatgagaccaagtcctggtacttcacggaaaacatggagcgcaattgcagagccccctgtaacatacagatggaggaccctacctttaaggaaaattatcggttccacgcaatcaacggatacattatggatacactccctggccttgtgatggctcaggaccaacgaatcaggtggtacctcctcagcatgggttctaatgagaacatacactccattcacttttcaggacatgtgttcactgtccggaagaaagaagagtataagatggccctctacaatttgtatccaggcgtgtttgagaccgttgaaatgcttccctctaaagctggcatctggagagtagagtgcttgatcggagaacatcttcacgcaggtatgagcaccttgttcctcgtgtacagcaacaaatgtcagaccccacttggcatggccagtggacacattcgcgactttcagatcacagcatctggccagtatggacaatgggccccaaagttggctcgcctccattactccggtagcataaatgcgtggtccactaaagaacctttcagctggattaaggtcgatcttcttgcccccatgatcatccacggcattaagacacagggagcgaggcagaaattctcctccctctacatctcacagttcattattatgtatagtttggacggcaagaagtggcaaacttatagaggtaacagtactggaacactcatggtgttcttcggcaacgttgatagctctggcatcaaacacaacatctttaatcctcccataatagctcggtacatcagattgcatccgacccactacagcattaggagtacactccgaatggagcttatgggttgcgacttgaattcctgttcaatgccactcggaatggagtctaaagccatctctgatgcacagataaccgccagtagctactttacgaacatgtttgctacgtggtcaccctctaaggcaaggcttcatttgcaaggccggtctaatgcctggagacctcaggtgaacaacccgaaagaatggctccaggtggactttcagaagaccatgaaagtaacaggtgtcactactcagggagttaagtccttgctcaccagcatgtatgtgaaggagttccttatttcctcatcacaagatggccaccagtggaccctcttctttcagaatggtaaggtcaaagtgtttcagggcaatcaagacagcttcacacccgtggtgaacagtcttgatcctccactcttgacacgataccttcgaatccatccacagtcttgggttcaccagattgcattgcgcatggaagtacttggatgcgaggctcaggacctctac

SEQ ID NO: 258 - protein, 1457 aa, synthetic construct
  REGION 1..1457: note = Variant of human B-domain deleted Factor VIII
MQIELSTCFFLCLLRFCFSATRRYYLGAVELSWDYMQSDLGELPVDARFPPRVPKSFPFNTSVVYKKTLFVEFTDHLFNIAKPRPPWMGLLGPTIQAEVYDTVVITLKNMASHPVSLHAVGVSYWKASEGAEYDDQTSQREKEDDKVFPGGSHTYVWQVLKENGPMASDPLCLTYSYLSHVDLVKDLNSGLIGALLVCREGSLAKEKTQTLHKFILLFAVFDEGKSWHSETKNSLMQDRDAASARAWPKMHTVNGYVNRSLPGLIGCHRKSVYWHVIGMGTTPEVHSIFLEGHTFLVRNHRQASLEISPITFLTAQTLLMDLGQFLLFCHISSHQHDGMEAYVKVDSCPEEPQLRMKNNEEAEDYDDDLTDSEMDVVRFDDDNSPSFIQIRSVAKKHPKTWVHYIAAEEEDWDYAPLVLAPDDRSYKSQYLNNGPQRIGRKYKKVRFMAYTDETFKTREAIQHESGILGPLLYGEVGDTLLIIFKNQASRPYNIYPHGITDVRPLYSRRLPKGVKHLKDFPILPGEIFKYKWTVTVEDGPTKSDPRCLTRYYSSFVNMERDLASGLIGPLLICYKESVDQRGNQIMSDKRNVILFSVFDENRSWYLTENIQRFLPNPAGVQLEDPEFQASNIMHSINGYVFDSLQLSVCLHEVAYWYILSIGAQTDFLSVFFSGYTFKHKMVYEDTLTLFPFSGETVFMSMENPGLWILGCHNSDFRNRGMTALLKVSSCDKNTGDYYEDSYEDISAYLLSKNNAIEPRSFSQNPPVLKRHQREITRTTLQSDQEEIDYDDTISVEMKKEDFDIYDEDENQSPRSFQKKTRHYFIAAVERLWDYGMSSSPHVLRNRAQSGSVPQFKKVVFQEFTDGSFTQPLYRGELNEHLGLLGPYIRAEVEDNIMVTFRNQASRPYSFYSSLISYEEDQRQGAEPRKNFVKPNETKTYFWKVQHHMAPTKDEFDCKAWAYFSDVDLEKDVHSGLIGPLLVCHTNTLNPAHGRQVTVREFALFFTIFDETKSWYFTENMERNCRAPCNIQMEDPTFKENYRFHAINGYIMDTLPGLVMAQDQRIRWYLLSMGSNENIHSIHFSGHVFTVRKKEEYKMALYNLYPGVFETVEMLPSKAGIWRVECLIGEHLHAGMSTLFLVYSNKCQTPLGMASGHIRDFQITASGQYGQWAPKLARLHYSGSINAWSTKEPFSWIKVDLLAPMIIHGIKTQGARQKFSSLYISQFIIMYSLDGKKWQTYRGNSTGTLMVFFGNVDSSGIKHNIFNPPIIARYIRLHPTHYSIRSTLRMELMGCDLNSCSMPLGMESKAISDAQITASSYFTNMFATWSPSKARLHLQGRSNAWRPQVNNPKEWLQVDFQKTMKVTGVTTQGVKSLLTSMYVKEFLISSSQDGHQWTLFFQNGKVKVFQGNQDSFTPVVNSLDPPLLTRYLRIHPQSWVHQIALRMEVLGCEAQDLY

SEQ ID NO: 259 - DNA, 4371 bp, synthetic construct
  misc_feature 1..4371: note = Variant of human B-domain deleted Factor VIII
  source 1..4371: mol_type = other DNA
atgcagattgaactgtctacctgcttcttcctctgtttgctgaggttctgctttagcgccactagacggtactaccttggcgctgtggagctgtcctgggactatatgcagagtgatttgggagagcttcccgtcgacgcacgatttcctcctcgcgttccaaagtcatttcccttcaacacaagcgtggtgtacaagaagacgctcttcgtcgaattcaccgatcacctgttcaatatcgccaaacccagaccaccatggatgggtcttttggggcctaccatacaagcggaggtgtatgacacagttgttatcactctcaagaacatggcttctcatccggtaagtcttcacgcagtgggcgtgtcctactggaaagcttcagaaggagccgagtatgatgatcagacatcccagagggagaaagaagacgacaaggtatttccaggtgggtctcatacctatgtgtggcaagtgctcaaagagaatggccctatggcaagcgatccgctctgtttgacttacagctacctttcacacgttgacctcgtcaaggacctcaactccgggttgattggagccttgttggtatgcagggaaggatctcttgccaaagagaagacacagaccctccacaagtttatccttctctttgctgtgttcgatgagggcaaaagttggcatagcgaaacgaagaattccctcatgcaggatcgcgacgcagccagcgccagagcttggcccaagatgcacactgtgaacggatatgtcaataggtcacttcctggcttgattgggtgtcatcggaaaagtgtctactggcacgtgatcggaatggggacaacaccagaggtccactccatatttctcgaaggccataccttccttgttcgaaaccacagacaggcatccttggagatctctcccattacctttctcactgcccaaacgctccttatggacttgggtcagttccttctcttctgccatatcagctcacaccagcatgatggtatggaagcttatgtgaaagtcgacagttgtcctgaggagccacagttgcgcatgaagaataatgaagaagccgaggattacgacgacgatctcaccgattctgagatggacgtggtgaggtttgatgacgacaactctccctccttcattcaaatccggagcgtggcgaagaaacaccccaagacttgggtccactatatagcggcggaagaggaggattgggattacgctcctcttgtattggcaccagatgaccgctcatacaaaagccagtacctcaacaacggaccgcagagaattggccggaagtataagaaagtgcgatttatggcctatacagacgaaacctttaagacaagggaggccatccagcatgagagtgggattttgggacctcttctttacggcgaagttggtgataccctcctcatcatcttcaagaatcaagcttctcgcccctataacatttacccacacgggatcactgacgttaggcctttgtatagcagaagacttcccaaaggcgtgaagcatctcaaagacttccccattttgccaggcgagatctttaagtacaaatggaccgtcacagtggaagatggaccgactaaatcagaccctcgatgccttacgcggtactattcctccttcgtgaatatggagagagatttggcaagcggactcataggaccactcctcatctgttacaaggaatctgtagaccagaggggtaaccagattatgagtgataaacgcaatgtgatcctttttagcgtcttcgacgagaaccggtcctggtacttgaccgagaatatacaaaggttccttcccaaccccgcaggcgttcagttggaagaccctgagtttcaggccagcaatattatgcactcaatcaacggctatgtgtttgatagtctccagctttctgtttgcctccatgaagtagcctattggtacatcttgtcaattggtgctcaaacagacttcctctccgtcttcttctccggctacacctttaagcacaagatggtgtatgaggacactctcacactctttccattttctggagaaaccgtgttcatgagcatggagaatccaggcctttggatcttgggttgccacaacagtgattttcgcaatcggggaatgactgctctcctcaaagtcagcagctgtgataagaacacaggcgactattacgaagattcttacgaggacataagtgcctacttgttgtccaagaataacgccattgagcccagatcattctcccagaatcctcccgtgcttaaaaggcatcagcgcgaaatcaccagaactactcttcagtctgatcaagaggagattgactatgacgacaccataagcgtggaaatgaagaaggaggatttcgatatctatgacgaagatgagaaccagtctccgcggagctttcagaagaagacgcgacactacttcattgcagcagtcgaaaggctttgggactacggtatgtcatcatcccctcatgtgttgcgcaatagagctcagagtggaagtgttccacagttcaagaaagtcgtctttcaagagtttacagatggcagcttcacacagcctctctatcggggcgagcttaacgaacatttgggactccttggtccctatatccgagccgaagtggaggacaacattatggttacctttaggaatcaagcctctcgcccctacagcttctactcctccctcatcagttatgaggaggatcagagacaaggcgctgaaccacggaagaactttgtgaaaccgaatgagacgaagacctacttctggaaagtacagcaccacatggcccccacaaaagacgaattcgattgcaaagcatgggcgtatttttcagacgttgacttggagaaagatgtacattcaggacttattggtcctttgttggtgtgtcacactaacactctcaatccagcccatggcaggcaggtgacagtccaggaattcgctcttttctttaccatctttgatgagaccaagtcctggtacttcacggaaaacatggagcgcaattgcagagccccctgtaacatacagatggaggaccctacctttaaggaaaattatcggttccacgcaatcaacggatacattatggatacactccctggccttgtgatggctcaggaccaacgaatcaggtggtacctcctcagcatgggttctaatgagaacatacactccattcacttttcaggacatgtgttcactgtccggaagaaagaagagtataagatggccctctacaatttgtatccaggcgtgtttgagaccgttgaaatgcttccctctaaagctggcatctggagagtagagtgcttgatcggagaacatcttcacgcaggtatgagcaccttgttcctcgtgtacagcaacaaatgtcagaccccacttggcatggccagtggacacattcgcgactttcagatcacagcatctggccagtatggacaatgggccccaaagttggctcgcctccattactccggtagcataaatgcgtggtccactaaagaacctttcagctggattaaggtcgatcttcttgcccccatgatcatccacggcattaagacacagggagcgaggcagaaattctcctccctctacatctcacagttcattattatgtatagtttggacggcaagaagtggcaaacttatagaggtaacagtactggaacactcatgacgttcttcggcaacgttgatagctctggcatcaaacacaacatctttaatcctcccataatagctcggtacatcagattgcatccgacccactacagcattaggagtacactccgaatggagcttatgggttgcgacttgaattcctgttcaatgccactcggaatggagtctaaagccatctctgatgcacagataaccgccagtagctactttacgaacatgtttgctacgtggtcaccctctaaggcaaggcttcatttgcaaggccggtctaatgcctggagacctcaggtgaacaacccgaaagaatggctccaggtggactttcagaagaccatgaaagtaacaggtgtcactactcagggagttaagtccttgctcaccagcatgtatgtgaaggagttccttatttcctcatcacaagatggccaccagtggaccctcttctttcagaatggtaaggtcaaagtgtttcagggcaatcaagacagcttcacacccgtggtgaacagtcttgatcctccactcttgacacgataccttcgaatccatccacagtcttgggttcaccagattgcattgcgcatggaagtacttggatgcgaggctcaggacctctac

SEQ ID NO: 260 - protein, 1457 aa, synthetic construct
  REGION 1..1457: note = Variant of human B-domain deleted Factor VIII
MQIELSTCFFLCLLRFCFSATRRYYLGAVELSWDYMQSDLGELPVDARFPPRVPKSFPFNTSVVYKKTLFVEFTDHLFNIAKPRPPWMGLLGPTIQAEVYDTVVITLKNMASHPVSLHAVGVSYWKASEGAEYDDQTSQREKEDDKVFPGGSHTYVWQVLKENGPMASDPLCLTYSYLSHVDLVKDLNSGLIGALLVCREGSLAKEKTQTLHKFILLFAVFDEGKSWHSETKNSLMQDRDAASARAWPKMHTVNGYVNRSLPGLIGCHRKSVYWHVIGMGTTPEVHSIFLEGHTFLVRNHRQASLEISPITFLTAQTLLMDLGQFLLFCHISSHQHDGMEAYVKVDSCPEEPQLRMKNNEEAEDYDDDLTDSEMDVVRFDDDNSPSFIQIRSVAKKHPKTWVHYIAAEEEDWDYAPLVLAPDDRSYKSQYLNNGPQRIGRKYKKVRFMAYTDETFKTREAIQHESGILGPLLYGEVGDTLLIIFKNQASRPYNIYPHGITDVRPLYSRRLPKGVKHLKDFPILPGEIFKYKWTVTVEDGPTKSDPRCLTRYYSSFVNMERDLASGLIGPLLICYKESVDQRGNQIMSDKRNVILFSVFDENRSWYLTENIQRFLPNPAGVQLEDPEFQASNIMHSINGYVFDSLQLSVCLHEVAYWYILSIGAQTDFLSVFFSGYTFKHKMVYEDTLTLFPFSGETVFMSMENPGLWILGCHNSDFRNRGMTALLKVSSCDKNTGDYYEDSYEDISAYLLSKNNAIEPRSFSQNPPVLKRHQREITRTTLQSDQEEIDYDDTISVEMKKEDFDIYDEDENQSPRSFQKKTRHYFIAAVERLWDYGMSSSPHVLRNRAQSGSVPQFKKVVFQEFTDGSFTQPLYRGELNEHLGLLGPYIRAEVEDNIMVTFRNQASRPYSFYSSLISYEEDQRQGAEPRKNFVKPNETKTYFWKVQHHMAPTKDEFDCKAWAYFSDVDLEKDVHSGLIGPLLVCHTNTLNPAHGRQVTVQEFALFFTIFDETKSWYFTENMERNCRAPCNIQMEDPTFKENYRFHAINGYIMDTLPGLVMAQDQRIRWYLLSMGSNENIHSIHFSGHVFTVRKKEEYKMALYNLYPGVFETVEMLPSKAGIWRVECLIGEHLHAGMSTLFLVYSNKCQTPLGMASGHIRDFQITASGQYGQWAPKLARLHYSGSINAWSTKEPFSWIKVDLLAPMIIHGIKTQGARQKFSSLYISQFIIMYSLDGKKWQTYRGNSTGTLMTFFGNVDSSGIKHNIFNPPIIARYIRLHPTHYSIRSTLRMELMGCDLNSCSMPLGMESKAISDAQITASSYFTNMFATWSPSKARLHLQGRSNAWRPQVNNPKEWLQVDFQKTMKVTGVTTQGVKSLLTSMYVKEFLISSSQDGHQWTLFFQNGKVKVFQGNQDSFTPVVNSLDPPLLTRYLRIHPQSWVHQIALRMEVLGCEAQDLY

SEQ ID NO: 261 - DNA, 4371 bp, synthetic construct
  misc_feature 1..4371: note = Variant of human B-domain deleted Factor VIII
  source 1..4371: mol_type = other DNA
atgcagattgaactgtctacctgcttcttcctctgtttgctgaggttctgctttagcgccactagacggtactaccttggcgctgtggagctgtcctgggactatatgcagagtgatttgggagagcttcccgtcgacgcacgatttcctcctcgcgttccaaagtcatttcccttcaacacaagcgtggtgtacaagaagacgctcttcgtcgaattcaccgatcacctgttcaatatcgccaaacccagaccaccatggatgggtcttttggggcctaccatacaagcggaggtgtatgacacagttgttatcactctcaagaacatggcttctcatccggtaagtcttcacgcagtgggcgtgtcctactggaaagcttcagaaggagccgagtatgatgatcagacatcccagagggagaaagaagacgacaaggtatttccaggtgggtctcatacctatgtgtggcaagtgctcaaagagaatggccctatggcaagcgatccgctctgtttgacttacagctacctttcacacgttgacctcgtcaaggacctcaactccgggttgattggagccttgttggtatgcagggaaggatctcttgccaaagagaagacacagaccctccacaagtttatccttctctttgctgtgttcgatgagggcaaaagttggcatagcgaaacgaagaattccctcatgcaggatcgcgacgcagccagcgccagagcttggcccaagatgcacactgtgaacggatatgtcaataggtcacttcctggcttgattgggtgtcatcggaaaagtgtctactggcacgtgatcggaatggggacaacaccagaggtccactccatatttctcgaaggccataccttccttgttcgaaaccacagacaggcatccttggggatctctcccattacctttctcactgcccaaacgctccttatggacttgggtcagttccttctcttctgccatatcagctcacaccagcatgatggtatggaagcttatgtgaaagtcgacagttgtcctgaggagccacagttgcgcatgaagaataatgaagaagccgaggattacgacgacgatctcaccgattctgagatggacgtggtgaggtttgatgacgacaactctccctccttcattcaaatccggagcgtggcgaagaaacaccccaagacttgggtccactatatagcggcggaagaggaggattgggattacgctcctcttgtattggcaccagatgaccgctcatacaaaagccagtacctcaacaacggaccgcagagaattggccggaagtataagaaagtgcgatttatggcctatacagacgaaacctttaagacaagggaggccatccagcatgagagtgggattttgggacctcttctttacggcgaagttggtgataccctcctcatcatcttcaagaatcaagcttctcgcccctataacatttacccacacgggatcactgacgttaggcctttgtatagcagaagacttcccaaaggcgtgaagcatctcaaagacttccccattttgccaggcgagatctttaagtacaaatggaccgtcacagtggaagatggaccgactaaatcagaccctcgatgccttacgcggtactattcctccttcgtgaatatggagagagatttggcaagcggactcataggaccactcctcatctgttacaaggaatctgtagaccagaggggtaaccagattatgagtgataaacgcaatgtgatcctttttagcgtcttcgacgagaaccggtcctggtacttgaccgagaatatacaaaggttccttcccaaccccgcaggcgttcagttggaagaccctgagtttcaggccagcaatattatgcactcaatcaacggctatgtgtttgatagtctccagctttctgtttgcctccatgaagtagcctattggtacatcttgtcaattggtgctcaaacagacttcctctccgtcttcttctccggctacacctttaagcacaagatggtgtatgaggacactctcacactctttccattttctggagaaaccgtgttcatgagcatggagaatccaggcctttggatcttgggttgccacaacagtgattttcgcaatcggggaatgactgctctcctcaaagtcagcagctgtgataagaacacaggcgactattacgaagattcttacgaggacataagtgcctacttgttgtccaagaataacgccattgagcccagatcattctcccagaatcctcccgtgcttaaaaggcatcagcgcgaaatcaccagaactactcttcagtctgatcaagaggagattgactatgacgacaccataagcgtggaaatgaagaaggaggatttcgatatctatgacgaagatgagaaccagtctccgcggagctttcagaagaagacgcgacactacttcattgcagcagtcgaaaggctttgggactacggtatgtcatcatcccctcatgtgttgcgcaatagagctcagagtggaagtgttccacagttcaagaaagtcgtctttcaagagtttacagatggcagcttcacacagcctctctatcggggcgagcttaacgaacatttgggactccttggtccctatatccgagccgaagtggaggacaacattatggttacctttaggaatcaagcctctcgcccctacagcttctactcctccctcatcagttatgaggaggatcagagacaaggcgctgaaccacggaagaactttgtgaaaccgaatgagacgaagacctacttctggaaagtacagcaccacatggcccccacaaaagacgaattcgattgcaaagcatgggcgtatttttcagacgttgacttggagaaagatgtacattcaggacttattggtcctttgttggtgtgtcacactaacactctcaatccagcccatggcaggcaggtgacagtccaggaattcgctcttttctttaccatctttgatgagaccaagtcctggtacttcacggaaaacatggagcgcaattgcagagccccctgtaacatacagatggaggaccctacctttaaggaaaattatcggttccacgcaatcaacggatacattatggatacactccctggccttgtgatggctcaggaccaacgaatcaggtggtacctcctcagcatgggttctaatgagaacatacactccattcacttttcaggacatgtgttcactgtccggaagaaagaagagtataagatggccctctacaatttgtatccaggcgtgtttgagaccgttgaaatgcttccctctaaagctggcatctggagagtagagtgcttgatcggagaacatcttcacgcaggtatgagcaccttgttcctcgtgtacagcaacaaatgtcagaccccacttggcatggccagtggacacattcgcgactttcagatcacagcatctggccagtatggacaatgggccccaaagttggctcgcctccattactccggtagcataaatgcgtggtccactaaagaacctttcagctggattaaggtcgatcttcttgcccccatgatcatccacggcattaagacacagggagcgaggcagaaattctcctccctctacatctcacagttcattattatgtatagtttggacggcaagaagtggcaaacttatagaggtaacagtactggaacactcatggtgttcttcggcaacgttgatagctctggcatcaaacacaacatctttaatcctcccataatagctcggtacatcagattgcatccgacccactacagcattaggagtacactccgaatggagcttatgggttgcgacttgaattcctgttcaatgccactcggaatggagtctaaagccatctctgatgcacagataaccgccagtagctactttacgaacatgtttgctacgtggtcaccctctaaggcaaggcttcatttgcaaggccggtctaatgcctggagacctcaggtgaacaacccgaaagaatggctccaggtggactttcagaagaccatgaaagtaacaggtgtcactactcagggagttaagtccttgctcaccagcatgtatgtgaaggagttccttatttcctcatcacaagatggccaccagtggaccctcttctttcagaatggtaaggtcaaagtgtttcagggcaatcaagacagcttcacacccgtggtgaacagtcttgatcctccactcttgacacgataccttcgaatccatccacagtcttgggttcaccagattgcattgcgcatggaagtacttggatgcgaggctcaggacctctac

SEQ ID NO: 262 - protein, 1457 aa, synthetic construct
  REGION 1..1457: note = Variant of human B-domain deleted Factor VIII
MQIELSTCFFLCLLRFCFSATRRYYLGAVELSWDYMQSDLGELPVDARFPPRVPKSFPFNTSVVYKKTLFVEFTDHLFNIAKPRPPWMGLLGPTIQAEVYDTVVITLKNMASHPVSLHAVGVSYWKASEGAEYDDQTSQREKEDDKVFPGGSHTYVWQVLKENGPMASDPLCLTYSYLSHVDLVKDLNSGLIGALLVCREGSLAKEKTQTLHKFILLFAVFDEGKSWHSETKNSLMQDRDAASARAWPKMHTVNGYVNRSLPGLIGCHRKSVYWHVIGMGTTPEVHSIFLEGHTFLVRNHRQASLGISPITFLTAQTLLMDLGQFLLFCHISSHQHDGMEAYVKVDSCPEEPQLRMKNNEEAEDYDDDLTDSEMDVVRFDDDNSPSFIQIRSVAKKHPKTWVHYIAAEEEDWDYAPLVLAPDDRSYKSQYLNNGPQRIGRKYKKVRFMAYTDETFKTREAIQHESGILGPLLYGEVGDTLLIIFKNQASRPYNIYPHGITDVRPLYSRRLPKGVKHLKDFPILPGEIFKYKWTVTVEDGPTKSDPRCLTRYYSSFVNMERDLASGLIGPLLICYKESVDQRGNQIMSDKRNVILFSVFDENRSWYLTENIQRFLPNPAGVQLEDPEFQASNIMHSINGYVFDSLQLSVCLHEVAYWYILSIGAQTDFLSVFFSGYTFKHKMVYEDTLTLFPFSGETVFMSMENPGLWILGCHNSDFRNRGMTALLKVSSCDKNTGDYYEDSYEDISAYLLSKNNAIEPRSFSQNPPVLKRHQREITRTTLQSDQEEIDYDDTISVEMKKEDFDIYDEDENQSPRSFQKKTRHYFIAAVERLWDYGMSSSPHVLRNRAQSGSVPQFKKVVFQEFTDGSFTQPLYRGELNEHLGLLGPYIRAEVEDNIMVTFRNQASRPYSFYSSLISYEEDQRQGAEPRKNFVKPNETKTYFWKVQHHMAPTKDEFDCKAWAYFSDVDLEKDVHSGLIGPLLVCHTNTLNPAHGRQVTVQEFALFFTIFDETKSWYFTENMERNCRAPCNIQMEDPTFKENYRFHAINGYIMDTLPGLVMAQDQRIRWYLLSMGSNENIHSIHFSGHVFTVRKKEEYKMALYNLYPGVFETVEMLPSKAGIWRVECLIGEHLHAGMSTLFLVYSNKCQTPLGMASGHIRDFQITASGQYGQWAPKLARLHYSGSINAWSTKEPFSWIKVDLLAPMIIHGIKTQGARQKFSSLYISQFIIMYSLDGKKWQTYRGNSTGTLMVFFGNVDSSGIKHNIFNPPIIARYIRLHPTHYSIRSTLRMELMGCDLNSCSMPLGMESKAISDAQITASSYFTNMFATWSPSKARLHLQGRSNAWRPQVNNPKEWLQVDFQKTMKVTGVTTQGVKSLLTSMYVKEFLISSSQDGHQWTLFFQNGKVKVFQGNQDSFTPVVNSLDPPLLTRYLRIHPQSWVHQIALRMEVLGCEAQDLY

SEQ ID NO: 263 - DNA, 4371 bp, synthetic construct
  misc_feature 1..4371: note = Variant of human B-domain deleted Factor VIII
  source 1..4371: mol_type = other DNA
atgcagattgaactgtctacctgcttcttcctctgtttgctgaggttctgctttagcgccactagacggtactaccttggcgctgtggagctgtcctgggactatatgcagagtgatttgggagagcttcccgtcgacgcacgatttcctcctcgcgttccaaagtcatttcccttcaacacaagcgtggtgtacaagaagacgctcttcgtcgaattcaccgatcacctgttcaatatcgccaaacccagaccaccatggatgggtcttttggggcctaccatacaagcggaggtgtatgacacagttgttatcactctcaagaacatggcttctcatccggtaagtcttcacgcagtgggcgtgtcctactggaaagcttcagaaggagccgagtatgatgatcagacatcccagagggagaaagaagacgacaaggtatttccaggtgggtctcatacctatgtgtggcaagtgctcaaagagaatggccctatggcaagcgatccgctctgtttgacttacagctacctttcacacgttgacctcgtcaaggacctcaactccgggttgattggagccttgttggtatgcagggaaggatctcttgccaaagagaagacacagaccctccacaagtttatccttctctttgctgtgttcgatgagggcaaaagttggcatagcgaaacgaagaattccctcatgcaggatcgcgacgcagccagcgccagagcttggcccaagatgcacactgtgaacggatatgtcaataggtcacttcctggcttgattgggtgtcatcggaaaagtgtctactggcacgtgatcggaatggggacaacaccagaggtccactccatatttctcgaaggccataccttccttgttcgaaaccacagacaggcatccttggagatctctcccattacctttctcactgcccaaacgctccttatggacttgggtcagttccttctcttctgccatatcagctcacaccagcatgatggtatggaagcttatgtgaaagtcgacagttgtggtgaggagccacagttgcgcatgaagaataatgaagaagccgaggattacgacgacgatctcaccgattctgagatggacgtggtgaggtttgatgacgacaactctccctccttcattcaaatccggagcgtggcgaagaaacaccccaagacttgggtccactatatagcggcggaagaggaggattgggattacgctcctcttgtattggcaccagatgaccgctcatacaaaagccagtacctcaacaacggaccgcagagaattggccggaagtataagaaagtgcgatttatggcctatacagacgaaacctttaagacaagggaggccatccagcatgagagtgggattttgggacctcttctttacggcgaagttggtgataccctcctcatcatcttcaagaatcaagcttctcgcccctataacatttacccacacgggatcactgacgttaggcctttgtatagcagaagacttcccaaaggcgtgaagcatctcaaagacttccccattttgccaggcgagatctttaagtacaaatggaccgtcacagtggaagatggaccgactaaatcagaccctcgatgccttacgcggtactattcctccttcgtgaatatggagagagatttggcaagcggactcataggaccactcctcatctgttacaaggaatctgtagaccagaggggtaaccagattatgagtgataaacgcaatgtgatcctttttagcgtcttcgacgagaaccggtcctggtacttgaccgagaatatacaaaggttccttcccaaccccgcaggcgttcagttggaagaccctgagtttcaggccagcaatattatgcactcaatcaacggctatgtgtttgatagtctccagctttctgtttgcctccatgaagtagcctattggtacatcttgtcaattggtgctcaaacagacttcctctccgtcttcttctccggctacacctttaagcacaagatggtgtatgaggacactctcacactctttccattttctggagaaaccgtgttcatgagcatggagaatccaggcctttggatcttgggttgccacaacagtgattttcgcaatcggggaatgactgctctcctcaaagtcagcagctgtgataagaacacaggcgactattacgaagattcttacgaggacataagtgcctacttgttgtccaagaataacgccattgagcccagatcattctcccagaatcctcccgtgcttaaaaggcatcagcgcgaaatcaccagaactactcttcagtctgatcaagaggagattgactatgacgacaccataagcgtggaaatgaagaaggaggatttcgatatctatgacgaagatgagaaccagtctccgcggagctttcagaagaagacgcgacactacttcattgcagcagtcgaaaggctttgggactacggtatgtcatcatcccctcatgtgttgcgcaatagagctcagagtggaagtgttccacagttcaagaaagtcgtctttcaagagtttacagatggcagcttcacacagcctctctatcggggcgagcttaacgaacatttgggactccttggtccctatatccgagccgaagtggaggacaacattatggttacctttaggaatcaagcctctcgcccctacagcttctactcctccctcatcagttatgaggaggatcagagacaaggcgctgaaccacggaagaactttgtgaaaccgaatgagacgaagacctacttctggaaagtacagcaccacatggcccccacaaaagacgaattcgattgcaaagcatgggcgtatttttcagacgttgacttggagaaagatgtacattcaggacttattggtcctttgttggtgtgtcacactaacactctcaatccagcccatggcaggcaggtgacagtccaggaattcgctcttttctttaccatctttgatgagaccaagtcctggtacttcacggaaaacatggagcgcaattgcagagccccctgtaacatacagatggaggaccctacctttaaggaaaattatcggttccacgcaatcaacggatacattatggatacactccctggccttgtgatggctcaggaccaacgaatcaggtggtacctcctcagcatgggttctaatgagaacatacactccattcacttttcaggacatgtgttcactgtccggaagaaagaagagtataagatggccctctacaatttgtatccaggcgtgtttgagaccgttgaaatgcttccctctaaagctggcatctggagagtagagtgcttgatcggagaacatcttcacgcaggtatgagcaccttgttcctcgtgtacagcaacaaatgtcagaccccacttggcatggccagtggacacattcgcgactttcagatcacagcatctggccagtatggacaatgggccccaaagttggctcgcctccattactccggtagcataaatgcgtggtccactaaagaacctttcagctggattaaggtcgatcttcttgcccccatgatcatccacggcattaagacacagggagcgaggcagaaattctcctccctctacatctcacagttcattattatgtatagtttggacggcaagaagtggcaaacttatagaggtaacagtactggaacactcatggtgttcttcggcaacgttgatagctctggcatcaaacacaacatctttaatcctcccataatagctcggtacatcagattgcatccgacccactacagcattaggagtacactccgaatggagcttatgggttgcgacttgaattcctgttcaatgccactcggaatggagtctaaagccatctctgatgcacagataaccgccagtagctactttacgaacatgtttgctacgtggtcaccctctaaggcaaggcttcatttgcaaggccggtctaatgcctggagacctcaggtgaacaacccgaaagaatggctccaggtggactttcagaagaccatgaaagtaacaggtgtcactactcagggagttaagtccttgctcaccagcatgtatgtgaaggagttccttatttcctcatcacaagatggccaccagtggaccctcttctttcagaatggtaaggtcaaagtgtttcagggcaatcaagacagcttcacacccgtggtgaacagtcttgatcctccactcttgacacgataccttcgaatccatccacagtcttgggttcaccagattgcattgcgcatggaagtacttggatgcgaggctcaggacctctac

SEQ ID NO: 264 - protein, 1457 aa, synthetic construct
  REGION 1..1457: note = Variant of human B-domain deleted Factor VIII
MQIELSTCFFLCLLRFCFSATRRYYLGAVELSWDYMQSDLGELPVDARFPPRVPKSFPFNTSVVYKKTLFVEFTDHLFNIAKPRPPWMGLLGPTIQAEVYDTVVITLKNMASHPVSLHAVGVSYWKASEGAEYDDQTSQREKEDDKVFPGGSHTYVWQVLKENGPMASDPLCLTYSYLSHVDLVKDLNSGLIGALLVCREGSLAKEKTQTLHKFILLFAVFDEGKSWHSETKNSLMQDRDAASARAWPKMHTVNGYVNRSLPGLIGCHRKSVYWHVIGMGTTPEVHSIFLEGHTFLVRNHRQASLEISPITFLTAQTLLMDLGQFLLFCHISSHQHDGMEAYVKVDSCGEEPQLRMKNNEEAEDYDDDLTDSEMDVVRFDDDNSPSFIQIRSVAKKHPKTWVHYIAAEEEDWDYAPLVLAPDDRSYKSQYLNNGPQRIGRKYKKVRFMAYTDETFKTREAIQHESGILGPLLYGEVGDTLLIIFKNQASRPYNIYPHGITDVRPLYSRRLPKGVKHLKDFPILPGEIFKYKWTVTVEDGPTKSDPRCLTRYYSSFVNMERDLASGLIGPLLICYKESVDQRGNQIMSDKRNVILFSVFDENRSWYLTENIQRFLPNPAGVQLEDPEFQASNIMHSINGYVFDSLQLSVCLHEVAYWYILSIGAQTDFLSVFFSGYTFKHKMVYEDTLTLFPFSGETVFMSMENPGLWILGCHNSDFRNRGMTALLKVSSCDKNTGDYYEDSYEDISAYLLSKNNAIEPRSFSQNPPVLKRHQREITRTTLQSDQEEIDYDDTISVEMKKEDFDIYDEDENQSPRSFQKKTRHYFIAAVERLWDYGMSSSPHVLRNRAQSGSVPQFKKVVFQEFTDGSFTQPLYRGELNEHLGLLGPYIRAEVEDNIMVTFRNQASRPYSFYSSLISYEEDQRQGAEPRKNFVKPNETKTYFWKVQHHMAPTKDEFDCKAWAYFSDVDLEKDVHSGLIGPLLVCHTNTLNPAHGRQVTVQEFALFFTIFDETKSWYFTENMERNCRAPCNIQMEDPTFKENYRFHAINGYIMDTLPGLVMAQDQRIRWYLLSMGSNENIHSIHFSGHVFTVRKKEEYKMALYNLYPGVFETVEMLPSKAGIWRVECLIGEHLHAGMSTLFLVYSNKCQTPLGMASGHIRDFQITASGQYGQWAPKLARLHYSGSINAWSTKEPFSWIKVDLLAPMIIHGIKTQGARQKFSSLYISQFIIMYSLDGKKWQTYRGNSTGTLMVFFGNVDSSGIKHNIFNPPIIARYIRLHPTHYSIRSTLRMELMGCDLNSCSMPLGMESKAISDAQITASSYFTNMFATWSPSKARLHLQGRSNAWRPQVNNPKEWLQVDFQKTMKVTGVTTQGVKSLLTSMYVKEFLISSSQDGHQWTLFFQNGKVKVFQGNQDSFTPVVNSLDPPLLTRYLRIHPQSWVHQIALRMEVLGCEAQDLY

SEQ ID NO: 265 - DNA, 4371 bp, synthetic construct
  misc_feature 1..4371: note = Variant of human B-domain deleted Factor VIII
  source 1..4371: mol_type = other DNA
atgcagattgaactgtctacctgcttcttcctctgtttgctgaggttctgctttagcgccactagacggtactaccttggcgctgtggagctgtcctgggactatatgcagagtgatttgggagagcttcccgtcgacgcacgatttcctcctcgcgttccaaagtcatttcccttcaacacaagcgtggtgtacaagaagacgctcttcgtcgaattcaccgatcacctgttcaatatcgccaaacccagaccaccatggatgggtcttttggggcctaccatacaagcggaggtgtatgacacagttgttatcactctcaagaacatggcttctcatccggtaagtcttcacgcagtgggcgtgtcctactggaaagcttcagaaggagccgagtatgatgatcagacatcccagagggagaaagaagacgacaaggtatttccaggtgggtctcatacctatgtgtggcaagtgctcaaagagaatggccctatggcaagcgatccgctctgtttgacttacagctacctttcacacgttgacctcgtcaaggacctcaactccgggttgattggagccttgttggtatgcagggaaggatctcttgccaaagagaagacacagaccctccacaagtttatccttctctttgctgtgttcgatgagggcaaaagttggcatagcgaaacgaagaattccctcatgcaggatcgcgacgcagccagcgccagagcttggcccaagatgcacactgtgaacggatatgtcaataggtcacttcctggcttgattgggtgtcatcggaaaagtgtctactggcacgtgatcggaatggggacaacaccagaggtccactccatatttctcgaaggccataccttccttgttcgaaaccacagacaggcatccttggagatctctcccattacctttctcactgcccaaacgctccttatggacttgggtcagttccttctcttctgccatatcagctcacaccagcatgatggtatggaagcttatgtgaaagtcgacagttgtcctgaggagccacagttgcgcatgaagaataatgaagaagccgaggattacgacgacgatctcaccgattctgagatggacgtggtgaggtttgatgacgacaactctccctccttcattcaaatccggagcgtggcgaagaaacaccccaagacttgggtccactatatagcggcggaagaggaggattgggattacgctcctcttgtattggcaccagatgaccgctcatacaaaagccagtacctcaacaacggaccgcagagaattggccggaagtataagaaagtgcgatttatggcctatacagacgaaacctttaagacaagggaggccatccagcatgagagtgggattttgggacctcttctttacggcgaagttggtgataccctcctcatcatcttcaagaatcaagcttctcgcccctataacatttacccacacgggatcactgacgttaggcctttgtatagcagaagacttcccaaaggcgtgaagcatctcaaagacttccccattttgccaggcgagatctttaagtacaaatggaccgtcacagtggaagatggaccgactaaatcagaccctcgatgccttacgcggtactattcctccttcgtgaatatggagagagatttggcaagcggactcataggaccactcctcatctgttacaaggaatctgtagaccagaggggtaaccagattatgagtgataaacgcaatgtgatcctttttagcgtcttcgacgagaaccggtcctggtacttgaccgagaatatacaaaggttccttcccaaccccgcaggcgttcagttggaagaccctgagtttcaggccagcaatattatgcactcaatcaacggctatgtgtttgatagtctccagctttctgtttgcctccatgaagtagcctattggtacatcttgtcaattggtgctcaaacagacttcctctccgtcttcttctccggctacacctttaagcacaagatggtgtatgaggacactctcacactctttccattttctggagaaaccgtgttcatgagcatggagaatccaggcctttggatcttgggttgccacaacagtgattttcgcaatcggggaatgactgctctcctcaaagtcagcagctgtgataagaacacaggcgactattacgaagattcttacgaggacataagtgcctacttgttgtccaagaataacgccattgagcccagatcattctcccagaatcctcccgtgcttaaaaggcatcagcgcgaaatcaccagaactactcttcagtctgatcaagaggagattgactatgacgacaccataagcgtggaaatgaagaaggaggatttcgatatctatgacgaagatgagaaccagtctccgcggagctttcagaagaagacgcgacactacttcattgcagcagtcgaaaggctttgggactacggtatgtcatcatcccctcatgtgttgcgcaatagagctcagagtggaagtgttccacagttcaagaaagtcgtctttcaagagtttacagatggcagcttcacacagcctctctatcggggcgagcttaacgaacatttgggactccttggtccctatatccgagccgaagtggaggacaacattatggttacctttaggaatcaagcctctcgcccctacagcttctactcctccctcatcagttatgaggaggatcagagacaaggcgctgaaccacggaagaactttgtgaaaccgaatgagacgaagacctacttctggaaagtacagcaccacatggcccccacaaaagacgaattcgattgcaaagcatgggcgtatttttcagacgttgacttggagaaagatgtacattcaggacttattggtcctttgttggtgtgtcacactaacactctcaatccagcccatggcaggcaggtgacagtccaggaattcgctcttttctttaccatctttgatgagaccaagtcctggtacttcacggaaaacatggagcgcaattgcagagccccctgtaacatacagatggaggaccctacctttaaggaaaattatcggttccacgcaatcaacggatacattatggatacactccctggccttgtgatggctcaggaccaacgaatcaggtggtacctcctcagcatgggttctaatgagaacatacactccattcacttttcaggacatgtgttcactgtccggaagaaagaagagtataagatggccctctacaatttgtatccaggcgtgtttgagaccgttgaaatgcttccctctaaagctggcatctggagagtagagtgcttgatcggagaacatcttcacgcaggtatgagcaccttgttcctcgtgtacagcaacaaatgtcagaccccacttggcatggccagtggacacattcgcgactttcagatcacagcatctggccagtatggacaatgggccccaaagttggctcgcctccattactccggtagcataaatgcgtggtccactaaagaacctttcagctggattaaggtcgatcttcttgcccccatgatcatccacggcattaagacacagggagcgaggcagaaattctcctccctctacatctcacagttcattattatgtatagtttggacggcaagaagtggcaaacttatagaggtaacagtactggaacactcatggtgttcttcggcaacgttgatagctctggcatcaaacacaacatctttaatcctcccataatagctcggtacatcagattgcatccgacccactacagcattaggagtacactccgaatggagcttatgggttgcgacttgaattcctgttcaatgccactcggaatggagtctaaagccatctctgatgcacagataaccgccagtagctactttacgaacatgtttgctacgtggtcaccctctaaggcaaggcttcatttgcaaggccggtctaatgcctggagacctcaggtgaacaacccgaaagaatggctccaggtggactttcagaagaccatgaaagtaacaggtgtcactactcagggagttaagtccttggggaccagcatgtatgtgaaggagttccttatttcctcatcacaagatggccaccagtggaccctcttctttcagaatggtaaggtcaaagtgtttcagggcaatcaagacagcttcacacccgtggtgaacagtcttgatcctccactcttgacacgataccttcgaatccatccacagtcttgggttcaccagattgcattgcgcatggaagtacttggatgcgaggctcaggacctctac

SEQ ID NO: 266 - protein, 1457 aa, synthetic construct
  REGION 1..1457: note = Variant of human B-domain deleted Factor VIII
MQIELSTCFFLCLLRFCFSATRRYYLGAVELSWDYMQSDLGELPVDARFPPRVPKSFPFNTSVVYKKTLFVEFTDHLFNIAKPRPPWMGLLGPTIQAEVYDTVVITLKNMASHPVSLHAVGVSYWKASEGAEYDDQTSQREKEDDKVFPGGSHTYVWQVLKENGPMASDPLCLTYSYLSHVDLVKDLNSGLIGALLVCREGSLAKEKTQTLHKFILLFAVFDEGKSWHSETKNSLMQDRDAASARAWPKMHTVNGYVNRSLPGLIGCHRKSVYWHVIGMGTTPEVHSIFLEGHTFLVRNHRQASLEISPITFLTAQTLLMDLGQFLLFCHISSHQHDGMEAYVKVDSCPEEPQLRMKNNEEAEDYDDDLTDSEMDVVRFDDDNSPSFIQIRSVAKKHPKTWVHYIAAEEEDWDYAPLVLAPDDRSYKSQYLNNGPQRIGRKYKKVRFMAYTDETFKTREAIQHESGILGPLLYGEVGDTLLIIFKNQASRPYNIYPHGITDVRPLYSRRLPKGVKHLKDFPILPGEIFKYKWTVTVEDGPTKSDPRCLTRYYSSFVNMERDLASGLIGPLLICYKESVDQRGNQIMSDKRNVILFSVFDENRSWYLTENIQRFLPNPAGVQLEDPEFQASNIMHSINGYVFDSLQLSVCLHEVAYWYILSIGAQTDFLSVFFSGYTFKHKMVYEDTLTLFPFSGETVFMSMENPGLWILGCHNSDFRNRGMTALLKVSSCDKNTGDYYEDSYEDISAYLLSKNNAIEPRSFSQNPPVLKRHQREITRTTLQSDQEEIDYDDTISVEMKKEDFDIYDEDENQSPRSFQKKTRHYFIAAVERLWDYGMSSSPHVLRNRAQSGSVPQFKKVVFQEFTDGSFTQPLYRGELNEHLGLLGPYIRAEVEDNIMVTFRNQASRPYSFYSSLISYEEDQRQGAEPRKNFVKPNETKTYFWKVQHHMAPTKDEFDCKAWAYFSDVDLEKDVHSGLIGPLLVCHTNTLNPAHGRQVTVQEFALFFTIFDETKSWYFTENMERNCRAPCNIQMEDPTFKENYRFHAINGYIMDTLPGLVMAQDQRIRWYLLSMGSNENIHSIHFSGHVFTVRKKEEYKMALYNLYPGVFETVEMLPSKAGIWRVECLIGEHLHAGMSTLFLVYSNKCQTPLGMASGHIRDFQITASGQYGQWAPKLARLHYSGSINAWSTKEPFSWIKVDLLAPMIIHGIKTQGARQKFSSLYISQFIIMYSLDGKKWQTYRGNSTGTLMVFFGNVDSSGIKHNIFNPPIIARYIRLHPTHYSIRSTLRMELMGCDLNSCSMPLGMESKAISDAQITASSYFTNMFATWSPSKARLHLQGRSNAWRPQVNNPKEWLQVDFQKTMKVTGVTTQGVKSLGTSMYVKEFLISSSQDGHQWTLFFQNGKVKVFQGNQDSFTPVVNSLDPPLLTRYLRIHPQSWVHQIALRMEVLGCEAQDLY

SEQ ID NO: 267 - DNA, 4371 bp, synthetic construct
  misc_feature 1..4371: note = Variant of human B-domain deleted Factor VIII
  source 1..4371: mol_type = other DNA
atgcagattgaactgtctacctgcttcttcctctgtttgctgaggttctgctttagcgccactagacggtactaccttggcgctgtggagctgtcctgggactatatgcagagtgatttgggagagcttcccgtcgacgcacgatttcctcctcgcgttccaaagtcatttcccttcaacacaagcgtggtgtacaagaagacgctcttcgtcgaattcaccgatcacctgttcaatatcgccaaacccagaccaccatggatgggtcttttggggcctaccatacaagcggaggtgtatgacacagttgttatcactctcaagaacatggcttctcatccggtaagtcttcacgcagtgggcgtgtcctactggaaagcttcagaaggagccgagtatgatgatcagacatcccagagggagaaagaagacgacaaggtatttccaggtgggtctcatacctatgtgtggcaagtgctcaaagagaatggccctatggcaagcgatccgctctgtttgacttacagctacctttcacacgttgacctcgtcaaggacctcaactccgggttgattggagccttgttggtatgcagggaaggatctcttgccaaagagaagacacagaccctccacaagtttatccttctctttgctgtgttcgatgagggcaaaagttggcatagcgaaacgaagaattccctcatgcaggatcgcgacgcagccagcgccagagcttggcccaagatgcacactgtgaacggatatgtcaataggtcacttcctggcttgattgggtgtcatcggaaaagtgtctactggcacgtgatcggaatggggacaacaccagaggtccactccatatttctcgaaggccataccttccttgttcgaaaccacagacaggcatccttggagatctctcccattacctttctcactgcccaaacgctccttatggacttgggtcagttccttctcttctgccatatcttttcacaccagcatgatggtatggaagcttatgtgaaagtcgacagttgtcctgaggagccacagttgcgcatgaagaataatgaagaagccgaggattacgacgacgatctcaccgattctgagatggacgtggtgaggtttgatgacgacaactctccctccttcattcaaatccggagcgtggcgaagaaacaccccaagacttgggtccactatatagcggcggaagaggaggattgggattacgctcctcttgtattggcaccagatgaccgctcatacaaaagccagtacctcaacaacggaccgcagagaattggccggaagtataagaaagtgcgatttatggcctatacagacgaaacctttaagacaagggaggccatccagcatgagagtgggattttgggacctcttctttacggcgaagttggtgataccctcctcatcatcttcaagaatcaagcttctcgcccctataacatttacccacacgggatcactgacgttaggcctttgtatagcagaagacttcccaaaggcgtgaagcatctcaaagacttccccattttgccaggcgagatctttaagtacaaatggaccgtcacagtggaagatggaccgactaaatcagaccctcgatgccttacgcggtactattcctccttcgtgaatatggagagagatttggcaagcggactcataggaccactcctcatctgttacaaggaatctgtagaccagaggggtaaccagattatgagtgataaacgcaatgtgatcctttttagcgtcttcgacgagaaccggtcctggtacttgaccgagaatatacaaaggttccttcccaaccccgcaggcgttcagttggaagaccctgagtttcaggccagcaatattatgcactcaatcaacggctatgtgtttgatagtctccagctttctgtttgcctccatgaagtagcctattggtacatcttgtcaattggtgctcaaacagacttcctctccgtcttcttctccggctacacctttaagcacaagatggtgtatgaggacactctcacactctttccattttctggagaaaccgtgttcatgagcatggagaatccaggcctttggatcttgggttgccacaacagtgattttcgcaatcggggaatgactgctctcctcaaagtcagcagctgtgataagaacacaggcgactattacgaagattcttacgaggacataagtgcctacttgttgtccaagaataacgccattgagcccagatcattctcccagaatcctcccgtgcttaaaaggcatcagcgcgaaatcaccagaactactcttcagtctgatcaagaggagattgactatgacgacaccataagcgtggaaatgaagaaggaggatttcgatatctatgacgaagatgagaaccagtctccgcggagctttcagaagaagacgcgacactacttcattgcagcagtcgaaaggctttgggactacggtatgtcatcatcccctcatgtgttgcgcaatagagctcagagtggaagtgttccacagttcaagaaagtcgtctttcaagagtttacagatggcagcttcacacagcctctctatcggggcgagcttaacgaacatttgggactccttggtccctatatccgagccgaagtggaggacaacattatggttacctttaggaatcaagcctctcgcccctacagcttctactcctccctcatcagttatgaggaggatcagagacaaggcgctgaaccacggaagaactttgtgaaaccgaatgagacgaagacctacttctggaaagtacagcaccacatggcccccacaaaagacgaattcgattgcaaagcatgggcgtatttttcagacgttgacttggagaaagatgtacattcaggacttattggtcctttgttggtgtgtcacactaacactctcaatccagcccatggcaggcaggtgacagtccaggaattcgctcttttctttaccatctttgatgagaccaagtcctggtacttcacggaaaacatggagcgcaattgcagagccccctgtaacatacagatggaggaccctacctttaaggaaaattatcggttccacgcaatcaacggatacattatggatacactccctggccttgtgatggctcaggaccaacgaatcaggtggtacctcctcagcatgggttctaatgagaacatacactccattcacttttcaggacatgtgttcactgtccggaagaaagaagagtataagatggccctctacaatttgtatccaggcgtgtttgagaccgttgaaatgcttccctctaaagctggcatctggagagtagagtgcttgatcggagaacatcttcacgcaggtatgagcaccttgttcctcgtgtacagcaacaaatgtcagaccccacttggcatggccagtggacacattcgcgactttcagatcacagcatctggccagtatggacaatgggccccaaagttggctcgcctccattactccggtagcataaatgcgtggtccactaaagaacctttcagctggattaaggtcgatcttcttgcccccatgatcatccacggcattaagacacagggagcgaggcagaaattctcctccctctacatctcacagttcattattatgtatagtttggacggcaagaagtggcaaacttatagaggtaacagtactggaacactcatggtgttcttcggcaacgttgatagctctggcatcaaacacaacatctttaatcctcccataatagctcggtacatcagattgcatccgacccactacagcattaggagtacactccgaatggagcttatgggttgcgacttgaattcctgttcaatgccactcggaatggagtctaaagccatctctgatgcacagataaccgccagtagctactttacgaacatgtttgctacgtggtcaccctctaaggcaaggcttcatttgcaaggccggtctaatgcctggagacctcaggtgaacaacccgaaagaatggctccaggtggactttcagaagaccatgaaagtaacaggtgtcactactcagggagttaagtccttgctcaccagcatgtatgtgaaggagttccttatttcctcatcacaagatggccaccagtggaccctcttctttcagaatggtaaggtcaaagtgtttcagggcaatcaagacagcttcacacccgtggtgaacagtcttgatcctccactcttgacacgataccttcgaatccatccacagtcttgggttcaccagattgcattgcgcatggaagtacttggatgcgaggctcaggacctctac

SEQ ID NO: 268 - protein, 1457 aa, synthetic construct
  REGION 1..1457: note = Variant of human B-domain deleted Factor VIII
MQIELSTCFFLCLLRFCFSATRRYYLGAVELSWDYMQSDLGELPVDARFPPRVPKSFPFNTSVVYKKTLFVEFTDHLFNIAKPRPPWMGLLGPTIQAEVYDTVVITLKNMASHPVSLHAVGVSYWKASEGAEYDDQTSQREKEDDKVFPGGSHTYVWQVLKENGPMASDPLCLTYSYLSHVDLVKDLNSGLIGALLVCREGSLAKEKTQTLHKFILLFAVFDEGKSWHSETKNSLMQDRDAASARAWPKMHTVNGYVNRSLPGLIGCHRKSVYWHVIGMGTTPEVHSIFLEGHTFLVRNHRQASLEISPITFLTAQTLLMDLGQFLLFCHIFSHQHDGMEAYVKVDSCPEEPQLRMKNNEEAEDYDDDLTDSEMDVVRFDDDNSPSFIQIRSVAKKHPKTWVHYIAAEEEDWDYAPLVLAPDDRSYKSQYLNNGPQRIGRKYKKVRFMAYTDETFKTREAIQHESGILGPLLYGEVGDTLLIIFKNQASRPYNIYPHGITDVRPLYSRRLPKGVKHLKDFPILPGEIFKYKWTVTVEDGPTKSDPRCLTRYYSSFVNMERDLASGLIGPLLICYKESVDQRGNQIMSDKRNVILFSVFDENRSWYLTENIQRFLPNPAGVQLEDPEFQASNIMHSINGYVFDSLQLSVCLHEVAYWYILSIGAQTDFLSVFFSGYTFKHKMVYEDTLTLFPFSGETVFMSMENPGLWILGCHNSDFRNRGMTALLKVSSCDKNTGDYYEDSYEDISAYLLSKNNAIEPRSFSQNPPVLKRHQREITRTTLQSDQEEIDYDDTISVEMKKEDFDIYDEDENQSPRSFQKKTRHYFIAAVERLWDYGMSSSPHVLRNRAQSGSVPQFKKVVFQEFTDGSFTQPLYRGELNEHLGLLGPYIRAEVEDNIMVTFRNQASRPYSFYSSLISYEEDQRQGAEPRKNFVKPNETKTYFWKVQHHMAPTKDEFDCKAWAYFSDVDLEKDVHSGLIGPLLVCHTNTLNPAHGRQVTVQEFALFFTIFDETKSWYFTENMERNCRAPCNIQMEDPTFKENYRFHAINGYIMDTLPGLVMAQDQRIRWYLLSMGSNENIHSIHFSGHVFTVRKKEEYKMALYNLYPGVFETVEMLPSKAGIWRVECLIGEHLHAGMSTLFLVYSNKCQTPLGMASGHIRDFQITASGQYGQWAPKLARLHYSGSINAWSTKEPFSWIKVDLLAPMIIHGIKTQGARQKFSSLYISQFIIMYSLDGKKWQTYRGNSTGTLMVFFGNVDSSGIKHNIFNPPIIARYIRLHPTHYSIRSTLRMELMGCDLNSCSMPLGMESKAISDAQITASSYFTNMFATWSPSKARLHLQGRSNAWRPQVNNPKEWLQVDFQKTMKVTGVTTQGVKSLLTSMYVKEFLISSSQDGHQWTLFFQNGKVKVFQGNQDSFTPVVNSLDPPLLTRYLRIHPQSWVHQIALRMEVLGCEAQDLY

SEQ ID NO: 269 - DNA, 4371 bp, synthetic construct
  misc_feature 1..4371: note = Variant of human B-domain deleted Factor VIII
  source 1..4371: mol_type = other DNA
atgcagattgaactgtctacctgcttcttcctctgtttgctgaggttctgctttagcgccactagacggtactaccttggcgctgtggagctgtcctgggactatatgcagagtgatttgggagagcttcccgtcgacgcacgatttcctcctcgcgttccaaagtcatttcccttcaacacaagcgtggtgtacaagaagacgctcttcgtcgaattcaccgatcacctgttcaatatcgccaaacccagaccaccatggatgggtcttttggggcctaccatacaagcggaggtgtatgacacagttgttatcactctcaagaacatggcttctcatccggtaagtcttcacgcagtgggcgtgtcctactggaaagcttcagaaggagccgagtatgatgatcagacatcccagagggagaaagaagacgacaaggtatttccaggtgggtctcatacctatgtgtggcaagtgctcaaagagaatggccctatggcaagcgatccgctctgtttgacttacagctacctttcacacgttgacctcgtcaaggacctcaactccgggttgattggagccttgttggtatgcagggaaggatctcttgccaaagagaagacacagaccctccacaagtttatccttctctttgctgtgttcgatgagggcaaaagttggcatagcgaaacgaagaattccctcatgcaggatcgcgacgcagccagcgccagagcttggcccaagatgcacactgtgaacggatatgtcaataggtcacttcctggcttgattgggtgtcatcggaaaagtgtctactggcacgtgatcggaatggggacaacaccagaggtccactccatatttctcgaaggccataccttccttgttcgaaaccacagacaggcatccttggagatctctcccattacctttctcactgcccaaacgctccttatggacttgggtcagttccttctcttctgccatatcagctcacaccagcatgatggtatggaagcttatgtgaaagtcgacagttgtcctgaggagccacagttgcgcatgaagaataatgaagaagccgaggattacgacgacgatctcaccgattctgagatggacgtggtgaggtttgatgacgacaactctccctccttcattcaaatccggagcgtggcgaagaaacaccccaagacttgggtccactatatagcggcggaagaggaggattgggattacgctcctcttgtattggcaccagatgaccgctcatacaaaagccagtacctcaacaacggaccgcagagaattggccggaagtataagaaagtgcgatttatggcctatacagacgaaacctttaagacaagggaggccatccagcatgagagtgggattttgggacctcttctttacggcgaagttggtgataccctcctcatcatcttcaagaatcaagcttctcgcccctataacatttacccacacgggatcactgacgttaggcctttgtatagcagaagacttcccaaaggcgtgaagcatctcaaagacttccccattttgccaggcgagatctttaagtacaaatggaccgtcacagtggaagatggaccgactaaatcagaccctcgatgccttacgcggtactattcctccttcgtgaatatggagagagatttggcaagcggactcataggaccactcctcatctgttacaaggaatctgtagaccagaggggtaaccagattatgagtgataaacgcaatgtgatcctttttagcgtcttcgacgagaaccggtcctggtacttgaccgagaatatacaaaggttccttcccaaccccgcaggcgttcagttggaagaccctgagtttcaggccagcaatattatgcactcaatcaacggctatgtgtttgatagtctccagctttctgtttgcctccatgaagtagcctattggtacatcttgtcaattggtgctcaaacagacttcctctccgtcttcttctccggctacacctttaagcacaagatggtgtatgaggacactctcacactctttccattttctggagaaaccgtgttcatgagcatggagaatccaggcctttggatcttgggttgccacaacagtgattttcgcaatcggggaatgactgctctcctcaaagtcagcagctgtgataagaacacaggcgactattacgaagattcttacgaggacataagtgcctacttgttgtccaagaataacgccattgagcccagatcattctcccagaatcctcccgtgcttaaaaggcatcagcgcgaaatcaccagaactactcttcagtctgatcaagaggagattgactatgacgacaccataagcgtggaaatgaagaaggaggatttcgatatctatgacgaagatgagaaccagtctccgcggagctttcagaagaagacgcgacactacttcattgcagcagtcgaaaggctttgggactacggtatgtcatcatcccctcatgtgttgcgcaatagagctcagagtggaagtgttccacagttcaagaaagtcgtctttcaagagtttacagatggcagcttcacacagcctctctatcggggcgagcttaacgaacatttgggactccttggtccctatatccgagccgaagtggaggacaacattatggttacctttaggaatcaagcctctcgcccctacagcttctactcctccctcatcagttatgaggaggatcagagacaaggcgctgaaccacggaagaactttgtgaaaccgaatgagacgaagacctacttctggaaagtacagcaccacatggcccccacaaaagacgaattcgattgcaaagcatgggcgtatttttcagacgttgacttggagaaagatgtacattcaggacttattggtcctttgttggtgtgtcacactaacactctcaatccagcccatggcaggcaggtgacagtccaggaattcgctcttttctttaccatctttgatgagaccaagtcctggtacttcacggaaaacatggagcgcaattgcagagccccctgtaacatacagatggaggaccctacctttaaggaaaattatcggttccacgcaatcaacggatacattatggatacactccctggccttgtgatggctcaggaccaacgaatcaggtggtacctcctcagcatgggttctaatgagaacatacactccattcacttttcaggacatgtgttcactgtccggaagaaagaagagtataagatggccctctacaatttgtatccaggcgtgtttgagaccgttgaaatgcttccctctaaagctggcatctggagagtagagtgcttgatcggagaacatcttcacgcaggtatgagcaccttgttcctcgtgtacagcaacaaatgtcagaccccacttggcatggccagtggacacattcgcgactttcagatcacagcatctggccagtatggacaatgggccccaaagttggctcgcctccattactccggtagcataaatgcgtggtccactaaagaacctttcagctggattaaggtcgatcttcttgcccccatgatcatccacggcattaagacacagggagcgaggcagaaattctcctccctctacatctcacagttcattattatgtatagtttggacggcaagaagtggcaaacttatagaggtaacagtactggaacactcatggtgttcttcggcaacgttgatagctctggcatcaaacacaacatctttaatcctcccataatagctcggtacatcagattgcatccgacccactacagcattaggagtacactccgaatggagcttatgggttgcgacttgaattcctgttcaatgccactcggaatggagtctaaagccatctctgatgcacagataaccgccagtagctactttacgaacatgtttgctacgtggtcaccctctaaggcaaggcttcatttgcaaggccggtctaatgcctggagacctcaggtgaacaacccgaaagaatggctccaggtggactttcagaagaccatgaaagtaacaggtgtcactactcagggagttaagtccttggagaccagcatgtatgtgaaggagttccttatttcctcatcacaagatggccaccagtggaccctcttctttcagaatggtaaggtcaaagtgtttcagggcaatcaagacagcttcacacccgtggtgaacagtcttgatcctccactcttgacacgataccttcgaatccatccacagtcttgggttcaccagattgcattgcgcatggaagtacttggatgcgaggctcaggacctctac

SEQ ID NO: 270 - protein, 1457 aa, synthetic construct
  REGION 1..1457: note = Variant of human B-domain deleted Factor VIII
MQIELSTCFFLCLLRFCFSATRRYYLGAVELSWDYMQSDLGELPVDARFPPRVPKSFPFNTSVVYKKTLFVEFTDHLFNIAKPRPPWMGLLGPTIQAEVYDTVVITLKNMASHPVSLHAVGVSYWKASEGAEYDDQTSQREKEDDKVFPGGSHTYVWQVLKENGPMASDPLCLTYSYLSHVDLVKDLNSGLIGALLVCREGSLAKEKTQTLHKFILLFAVFDEGKSWHSETKNSLMQDRDAASARAWPKMHTVNGYVNRSLPGLIGCHRKSVYWHVIGMGTTPEVHSIFLEGHTFLVRNHRQASLEISPITFLTAQTLLMDLGQFLLFCHISSHQHDGMEAYVKVDSCPEEPQLRMKNNEEAEDYDDDLTDSEMDVVRFDDDNSPSFIQIRSVAKKHPKTWVHYIAAEEEDWDYAPLVLAPDDRSYKSQYLNNGPQRIGRKYKKVRFMAYTDETFKTREAIQHESGILGPLLYGEVGDTLLIIFKNQASRPYNIYPHGITDVRPLYSRRLPKGVKHLKDFPILPGEIFKYKWTVTVEDGPTKSDPRCLTRYYSSFVNMERDLASGLIGPLLICYKESVDQRGNQIMSDKRNVILFSVFDENRSWYLTENIQRFLPNPAGVQLEDPEFQASNIMHSINGYVFDSLQLSVCLHEVAYWYILSIGAQTDFLSVFFSGYTFKHKMVYEDTLTLFPFSGETVFMSMENPGLWILGCHNSDFRNRGMTALLKVSSCDKNTGDYYEDSYEDISAYLLSKNNAIEPRSFSQNPPVLKRHQREITRTTLQSDQEEIDYDDTISVEMKKEDFDIYDEDENQSPRSFQKKTRHYFIAAVERLWDYGMSSSPHVLRNRAQSGSVPQFKKVVFQEFTDGSFTQPLYRGELNEHLGLLGPYIRAEVEDNIMVTFRNQASRPYSFYSSLISYEEDQRQGAEPRKNFVKPNETKTYFWKVQHHMAPTKDEFDCKAWAYFSDVDLEKDVHSGLIGPLLVCHTNTLNPAHGRQVTVQEFALFFTIFDETKSWYFTENMERNCRAPCNIQMEDPTFKENYRFHAINGYIMDTLPGLVMAQDQRIRWYLLSMGSNENIHSIHFSGHVFTVRKKEEYKMALYNLYPGVFETVEMLPSKAGIWRVECLIGEHLHAGMSTLFLVYSNKCQTPLGMASGHIRDFQITASGQYGQWAPKLARLHYSGSINAWSTKEPFSWIKVDLLAPMIIHGIKTQGARQKFSSLYISQFIIMYSLDGKKWQTYRGNSTGTLMVFFGNVDSSGIKHNIFNPPIIARYIRLHPTHYSIRSTLRMELMGCDLNSCSMPLGMESKAISDAQITASSYFTNMFATWSPSKARLHLQGRSNAWRPQVNNPKEWLQVDFQKTMKVTGVTTQGVKSLETSMYVKEFLISSSQDGHQWTLFFQNGKVKVFQGNQDSFTPVVNSLDPPLLTRYLRIHPQSWVHQIALRMEVLGCEAQDLY

SEQ ID NO: 271 - DNA, 4371 bp, synthetic construct
  misc_feature 1..4371: note = Variant of human B-domain deleted Factor VIII
  source 1..4371: mol_type = other DNA
atgcagattgaactgtctacctgcttcttcctctgtttgctgaggttctgctttagcgccactagacggtactaccttggcgctgtggagctgtcctgggactatatgcagagtgatttgggagagcttcccgtcgacgcacgatttcctcctcgcgttccaaagtcatttcccttcaacacaagcgtggtgtacaagaagacgctcttcgtcgaattcaccgatcacctgttcaatatcgccaaacccagaccaccatggatgggtcttttggggcctaccatacaagcggaggtgtatgacacagttgttatcactctcaagaacatggcttctcatccggtaagtcttcacgcagtgggcgtgtcctactggaaagcttcagaaggagccgagtatgatgatcagacatcccagagggagaaagaagacgacaaggtatttccaggtgggtctcatacctatgtgtggcaagtgctcaaagagaatggccctatggcaagcgatccgctctgtttgacttacagctacctttcacacgttgacctcgtcaaggacctcaactccgggttgattggagccttgttggtatgcagggaaggatctcttgccaaagagaagacacagaccctccacaagtttatccttctctttgctgtgttcgatgagggcaaaagttggcatagcgaaacgaagaattccctcatgcaggatcgcgacgcagccagcgccagagcttggcccaagatgcacactgtgaacggatatattaataggtcacttcctggcttgattgggtgtcatcggaaaagtgtctactggcacgtgatcggaatggggacaacaccagaggtccactccatatttctcgaaggccataccttccttgttcgaaaccacagacaggcatccttggagatctctcccattacctttctcactgcccaaacgctccttatggacttgggtcagttccttctcttctgccatatcagctcacaccagcatgatggtatggaagcttatgtgaaagtcgacagttgtcctgaggagccacagttgcgcatgaagaataatgaagaagccgaggattacgacgacgatctcaccgattctgagatggacgtggtgaggtttgatgacgacaactctccctccttcattcaaatccggagcgtggcgaagaaacaccccaagacttgggtccactatatagcggcggaagaggaggattgggattacgctcctcttgtattggcaccagatgaccgctcatacaaaagccagtacctcaacaacggaccgcagagaattggccggaagtataagaaagtgcgatttatggcctatacagacgaaacctttaagacaagggaggccatccagcatgagagtgggattttgggacctcttctttacggcgaagttggtgataccctcctcatcatcttcaagaatcaagcttctcgcccctataacatttacccacacgggatcactgacgttaggcctttgtatagcagaagacttcccaaaggcgtgaagcatctcaaagacttccccattttgccaggcgagatctttaagtacaaatggaccgtcacagtggaagatggaccgactaaatcagaccctcgatgccttacgcggtactattcctccttcgtgaatatggagagagatttggcaagcggactcataggaccactcctcatctgttacaaggaatctgtagaccagaggggtaaccagattatgagtgataaacgcaatgtgatcctttttagcgtcttcgacgagaaccggtcctggtacttgaccgagaatatacaaaggttccttcccaaccccgcaggcgttcagttggaagaccctgagtttcaggccagcaatattatgcactcaatcaacggctatgtgtttgatagtctccagctttctgtttgcctccatgaagtagcctattggtacatcttgtcaattggtgctcaaacagacttcctctccgtcttcttctccggctacacctttaagcacaagatggtgtatgaggacactctcacactctttccattttctggagaaaccgtgttcatgagcatggagaatccaggcctttggatcttgggttgccacaacagtgattttcgcaatcggggaatgactgctctcctcaaagtcagcagctgtgataagaacacaggcgactattacgaagattcttacgaggacataagtgcctacttgttgtccaagaataacgccattgagcccagatcattctcccagaatcctcccgtgcttaaaaggcatcagcgcgaaatcaccagaactactcttcagtctgatcaagaggagattgactatgacgacaccataagcgtggaaatgaagaaggaggatttcgatatctatgacgaagatgagaaccagtctccgcggagctttcagaagaagacgcgacactacttcattgcagcagtcgaaaggctttgggactacggtatgtcatcatcccctcatgtgttgcgcaatagagctcagagtggaagtgttccacagttcaagaaagtcgtctttcaagagtttacagatggcagcttcacacagcctctctatcggggcgagcttaacgaacatttgggactccttggtccctatatccgagccgaagtggaggacaacattatggttacctttaggaatcaagcctctcgcccctacagcttctactcctccctcatcagttatgaggaggatcagagacaaggcgctgaaccacggaagaactttgtgaaaccgaatgagacgaagacctacttctggaaagtacagcaccacatggcccccacaaaagacgaattcgattgcaaagcatgggcgtatttttcagacgttgacttggagaaagatgtacattcaggacttattggtcctttgttggtgtgtcacactaacactctcaatccagcccatggcaggcaggtgacagtccaggaattcgctcttttctttaccatctttgatgagaccaagtcctggtacttcacggaaaacatggagcgcaattgcagagccccctgtaacatacagatggaggaccctacctttaaggaaaattatcggttccacgcaatcaacggatacattatggatacactccctggccttgtgatggctcaggaccaacgaatcaggtggtacctcctcagcatgggttctaatgagaacatacactccattcacttttcaggacatgtgttcactgtccggaagaaagaagagtataagatggccctctacaatttgtatccaggcgtgtttgagaccgttgaaatgcttccctctaaagctggcatctggagagtagagtgcttgatcggagaacatcttcacgcaggtatgagcaccttgttcctcgtgtacagcaacaaatgtcagaccccacttggcatggccagtggacacattcgcgactttcagatcacagcatctggccagtatggacaatgggccccaaagttggctcgcctccattactccggtagcataaatgcgtggtccactaaagaacctttcagctggattaaggtcgatcttcttgcccccatgatcatccacggcattaagacacagggagcgaggcagaaattctcctccctctacatctcacagttcattattatgtatagtttggacggcaagaagtggcaaacttatagaggtaacagtactggaacactcatggtgttcttcggcaacgttgatagctctggcatcaaacacaacatctttaatcctcccataatagctcggtacatcagattgcatccgacccactacagcattaggagtacactccgaatggagcttatgggttgcgacttgaattcctgttcaatgccactcggaatggagtctaaagccatctctgatgcacagataaccgccagtagctactttacgaacatgtttgctacgtggtcaccctctaaggcaaggcttcatttgcaaggccggtctaatgcctggagacctcaggtgaacaacccgaaagaatggctccaggtggactttcagaagaccatgaaagtaacaggtgtcactactcagggagttaagtccttgctcaccagcatgtatgtgaaggagttccttatttcctcatcacaagatggccaccagtggaccctcttctttcagaatggtaaggtcaaagtgtttcagggcaatcaagacagcttcacacccgtggtgaacagtcttgatcctccactcttgacacgataccttcgaatccatccacagtcttgggttcaccagattgcattgcgcatggaagtacttggatgcgaggctcaggacctctac

SEQ ID NO: 272 - protein, 1457 aa, synthetic construct
  REGION 1..1457: note = Variant of human B-domain deleted Factor VIII
MQIELSTCFFLCLLRFCFSATRRYYLGAVELSWDYMQSDLGELPVDARFPPRVPKSFPFNTSVVYKKTLFVEFTDHLFNIAKPRPPWMGLLGPTIQAEVYDTVVITLKNMASHPVSLHAVGVSYWKASEGAEYDDQTSQREKEDDKVFPGGSHTYVWQVLKENGPMASDPLCLTYSYLSHVDLVKDLNSGLIGALLVCREGSLAKEKTQTLHKFILLFAVFDEGKSWHSETKNSLMQDRDAASARAWPKMHTVNGYINRSLPGLIGCHRKSVYWHVIGMGTTPEVHSIFLEGHTFLVRNHRQASLEISPITFLTAQTLLMDLGQFLLFCHISSHQHDGMEAYVKVDSCPEEPQLRMKNNEEAEDYDDDLTDSEMDVVRFDDDNSPSFIQIRSVAKKHPKTWVHYIAAEEEDWDYAPLVLAPDDRSYKSQYLNNGPQRIGRKYKKVRFMAYTDETFKTREAIQHESGILGPLLYGEVGDTLLIIFKNQASRPYNIYPHGITDVRPLYSRRLPKGVKHLKDFPILPGEIFKYKWTVTVEDGPTKSDPRCLTRYYSSFVNMERDLASGLIGPLLICYKESVDQRGNQIMSDKRNVILFSVFDENRSWYLTENIQRFLPNPAGVQLEDPEFQASNIMHSINGYVFDSLQLSVCLHEVAYWYILSIGAQTDFLSVFFSGYTFKHKMVYEDTLTLFPFSGETVFMSMENPGLWILGCHNSDFRNRGMTALLKVSSCDKNTGDYYEDSYEDISAYLLSKNNAIEPRSFSQNPPVLKRHQREITRTTLQSDQEEIDYDDTISVEMKKEDFDIYDEDENQSPRSFQKKTRHYFIAAVERLWDYGMSSSPHVLRNRAQSGSVPQFKKVVFQEFTDGSFTQPLYRGELNEHLGLLGPYIRAEVEDNIMVTFRNQASRPYSFYSSLISYEEDQRQGAEPRKNFVKPNETKTYFWKVQHHMAPTKDEFDCKAWAYFSDVDLEKDVHSGLIGPLLVCHTNTLNPAHGRQVTVQEFALFFTIFDETKSWYFTENMERNCRAPCNIQMEDPTFKENYRFHAINGYIMDTLPGLVMAQDQRIRWYLLSMGSNENIHSIHFSGHVFTVRKKEEYKMALYNLYPGVFETVEMLPSKAGIWRVECLIGEHLHAGMSTLFLVYSNKCQTPLGMASGHIRDFQITASGQYGQWAPKLARLHYSGSINAWSTKEPFSWIKVDLLAPMIIHGIKTQGARQKFSSLYISQFIIMYSLDGKKWQTYRGNSTGTLMVFFGNVDSSGIKHNIFNPPIIARYIRLHPTHYSIRSTLRMELMGCDLNSCSMPLGMESKAISDAQITASSYFTNMFATWSPSKARLHLQGRSNAWRPQVNNPKEWLQVDFQKTMKVTGVTTQGVKSLLTSMYVKEFLISSSQDGHQWTLFFQNGKVKVFQGNQDSFTPVVNSLDPPLLTRYLRIHPQSWVHQIALRMEVLGCEAQDLY

SEQ ID NO: 273 - DNA, 4371 bp, synthetic construct
  misc_feature 1..4371: note = Variant of human B-domain deleted Factor VIII
  source 1..4371: mol_type = other DNA
atgcagattgaactgtctacctgcttcttcctctgtttgctgaggttctgctttagcgccactagacggtactaccttggcgctgtggagctgtcctgggactatatgcagagtgatttgggagagcttcccgtcgacgcacgatttcctcctcgcgttccaaagtcatttcccttcaacacaagcgtggtgtacaagaagacgctcttcgtcgaattcaccgatcacctgttcaatatcgccaaacccagaccaccatggatgggtcttttggggcctaccatacaagcggaggtgtatgacacagttgttatcactctcaagaacatggcttctcatccggtaagtcttcacgcagtgggcgtgtcctactggaaagcttcagaaggagccgagtatgatgatcagacatcccagagggagaaagaagacgacaaggtatttccaggtgggtctcatacctatgtgtggcaagtgctcaaagagaatggccctatggcaagcgatccgctctgtttgacttacagctacctttcacacgttgacctcgtcaaggacctcaactccgggttgattggagccttgttggtatgcagggaaggatctcttgccaaagagaagacacagaccctccacaagtttatccttctctttgctgtgttcgatgagggcaaaagttggcatagcgaaacgaagaattccctcatgcaggatcgcgacgcagccagcgccagagcttggcccaagatgcacactgtgaacggatatgtcaataggtcacttcctggcttgattgggtgtcatcggaaaagtgtctactggcacgtgatcggaatggggacaacaccagaggtccactccatatttctcgaaggccataccttccttgttcgaaaccacagacaggcatccttggagatctctcccattacctttctcactgcccaaacgctccttatggacttgggtcagttccttctcttctgccatatcagctcacaccagcatgatggtatggaagcttatgtgaaagtcgacagttgtcctgaggagccacagttgcgcatgaagaataatgaagaagccgaggattacgacgacgatctcaccgattctgagatggacgtggtgaggtttgatgacgacaactctccctccttcattcaaatccggagcgtggcgaagaaacaccccaagacttgggtccactatatagcggcggaagaggaggattgggattacgctcctcttgtattggcaccagatgaccgctcatacaaaagccagtacctcaacaacggaccgcagagaattggccggaagtataagaaagtgcgatttatggcctatacagacgaaacctttaagacaagggaggccatccagcatgagagtgggattttgggacctcttctttacggcgaagttggtgataccctcctcatcatcttcaagaatcaagcttctcgcccctataacatttacccacacgggatcactgacgttaggcctttgtatagcagaagacttcccaaaggcgtgaagcatctcaaagacttccccattttgccaggcgagatctttaagtacaaatggaccgtcacagtggaagatggaccgactaaatcagaccctcgatgccttacgcggtactattcctccttcgtgaatatggagagagatttggcaagcggactcataggaccactcctcatctgttacaaggaatctgtagaccagaggggtaaccagattatgagtgataaacgcaatgtgatcctttttagcgtcttcgacgagaaccggtcctggtacttgaccgagaatatacaaaggttccttcccaaccccgcaggcgttcagttggaagaccctgagtttcaggccagcaatattatgcactcaatcaacggctatgtgtttgatagtctccagatttctgtttgcctccatgaagtagcctattggtacatcttgtcaattggtgctcaaacagacttcctctccgtcttcttctccggctacacctttaagcacaagatggtgtatgaggacactctcacactctttccattttctggagaaaccgtgttcatgagcatggagaatccaggcctttggatcttgggttgccacaacagtgattttcgcaatcggggaatgactgctctcctcaaagtcagcagctgtgataagaacacaggcgactattacgaagattcttacgaggacataagtgcctacttgttgtccaagaataacgccattgagcccagatcattctcccagaatcctcccgtgcttaaaaggcatcagcgcgaaatcaccagaactactcttcagtctgatcaagaggagattgactatgacgacaccataagcgtggaaatgaagaaggaggatttcgatatctatgacgaagatgagaaccagtctccgcggagctttcagaagaagacgcgacactacttcattgcagcagtcgaaaggctttgggactacggtatgtcatcatcccctcatgtgttgcgcaatagagctcagagtggaagtgttccacagttcaagaaagtcgtctttcaagagtttacagatggcagcttcacacagcctctctatcggggcgagcttaacgaacatttgggactccttggtccctatatccgagccgaagtggaggacaacattatggttacctttaggaatcaagcctctcgcccctacagcttctactcctccctcatcagttatgaggaggatcagagacaaggcgctgaaccacggaagaactttgtgaaaccgaatgagacgaagacctacttctggaaagtacagcaccacatggcccccacaaaagacgaattcgattgcaaagcatgggcgtatttttcagacgttgacttggagaaagatgtacattcaggacttattggtcctttgttggtgtgtcacactaacactctcaatccagcccatggcaggcaggtgacagtccaggaattcgctcttttctttaccatctttgatgagaccaagtcctggtacttcacggaaaacatggagcgcaattgcagagccccctgtaacatacagatggaggaccctacctttaaggaaaattatcggttccacgcaatcaacggatacattatggatacactccctggccttgtgatggctcaggaccaacgaatcaggtggtacctcctcagcatgggttctaatgagaacatacactccattcacttttcaggacatgtgttcactgtccggaagaaagaagagtataagatggccctctacaatttgtatccaggcgtgtttgagaccgttgaaatgcttccctctaaagctggcatctggagagtagagtgcttgatcggagaacatcttcacgcaggtatgagcaccttgttcctcgtgtacagcaacaaatgtcagaccccacttggcatggccagtggacacattcgcgactttcagatcacagcatctggccagtatggacaatgggccccaaagttggctcgcctccattactccggtagcataaatgcgtggtccactaaagaacctttcagctggattaaggtcgatcttcttgcccccatgatcatccacggcattaagacacagggagcgaggcagaaattctcctccctctacatctcacagttcattattatgtatagtttggacggcaagaagtggcaaacttatagaggtaacagtactggaacactcatggtgttcttcggcaacgttgatagctctggcatcaaacacaacatctttaatcctcccataatagctcggtacatcagattgcatccgacccactacagcattaggagtacactccgaatggagcttatgggttgcgacttgaattcctgttcaatgccactcggaatggagtctaaagccatctctgatgcacagataaccgccagtagctactttacgaacatgtttgctacgtggtcaccctctaaggcaaggcttcatttgcaaggccggtctaatgcctggagacctcaggtgaacaacccgaaagaatggctccaggtggactttcagaagaccatgaaagtaacaggtgtcactactcagggagttaagtccttgctcaccagcatgtatgtgaaggagttccttatttcctcatcacaagatggccaccagtggaccctcttctttcagaatggtaaggtcaaagtgtttcagggcaatcaagacagcttcacacccgtggtgaacagtcttgatcctccactcttgacacgataccttcgaatccatccacagtcttgggttcaccagattgcattgcgcatggaagtacttggatgcgaggctcaggacctctac

SEQ ID NO: 274 - protein, 1457 aa, synthetic construct
  REGION 1..1457: note = Variant of human B-domain deleted Factor VIII
MQIELSTCFFLCLLRFCFSATRRYYLGAVELSWDYMQSDLGELPVDARFPPRVPKSFPFNTSVVYKKTLFVEFTDHLFNIAKPRPPWMGLLGPTIQAEVYDTVVITLKNMASHPVSLHAVGVSYWKASEGAEYDDQTSQREKEDDKVFPGGSHTYVWQVLKENGPMASDPLCLTYSYLSHVDLVKDLNSGLIGALLVCREGSLAKEKTQTLHKFILLFAVFDEGKSWHSETKNSLMQDRDAASARAWPKMHTVNGYVNRSLPGLIGCHRKSVYWHVIGMGTTPEVHSIFLEGHTFLVRNHRQASLEISPITFLTAQTLLMDLGQFLLFCHISSHQHDGMEAYVKVDSCPEEPQLRMKNNEEAEDYDDDLTDSEMDVVRFDDDNSPSFIQIRSVAKKHPKTWVHYIAAEEEDWDYAPLVLAPDDRSYKSQYLNNGPQRIGRKYKKVRFMAYTDETFKTREAIQHESGILGPLLYGEVGDTLLIIFKNQASRPYNIYPHGITDVRPLYSRRLPKGVKHLKDFPILPGEIFKYKWTVTVEDGPTKSDPRCLTRYYSSFVNMERDLASGLIGPLLICYKESVDQRGNQIMSDKRNVILFSVFDENRSWYLTENIQRFLPNPAGVQLEDPEFQASNIMHSINGYVFDSLQISVCLHEVAYWYILSIGAQTDFLSVFFSGYTFKHKMVYEDTLTLFPFSGETVFMSMENPGLWILGCHNSDFRNRGMTALLKVSSCDKNTGDYYEDSYEDISAYLLSKNNAIEPRSFSQNPPVLKRHQREITRTTLQSDQEEIDYDDTISVEMKKEDFDIYDEDENQSPRSFQKKTRHYFIAAVERLWDYGMSSSPHVLRNRAQSGSVPQFKKVVFQEFTDGSFTQPLYRGELNEHLGLLGPYIRAEVEDNIMVTFRNQASRPYSFYSSLISYEEDQRQGAEPRKNFVKPNETKTYFWKVQHHMAPTKDEFDCKAWAYFSDVDLEKDVHSGLIGPLLVCHTNTLNPAHGRQVTVQEFALFFTIFDETKSWYFTENMERNCRAPCNIQMEDPTFKENYRFHAINGYIMDTLPGLVMAQDQRIRWYLLSMGSNENIHSIHFSGHVFTVRKKEEYKMALYNLYPGVFETVEMLPSKAGIWRVECLIGEHLHAGMSTLFLVYSNKCQTPLGMASGHIRDFQITASGQYGQWAPKLARLHYSGSINAWSTKEPFSWIKVDLLAPMIIHGIKTQGARQKFSSLYISQFIIMYSLDGKKWQTYRGNSTGTLMVFFGNVDSSGIKHNIFNPPIIARYIRLHPTHYSIRSTLRMELMGCDLNSCSMPLGMESKAISDAQITASSYFTNMFATWSPSKARLHLQGRSNAWRPQVNNPKEWLQVDFQKTMKVTGVTTQGVKSLLTSMYVKEFLISSSQDGHQWTLFFQNGKVKVFQGNQDSFTPVVNSLDPPLLTRYLRIHPQSWVHQIALRMEVLGCEAQDLY

SEQ ID NO: 275 - DNA, 4371 bp, synthetic construct
  misc_feature 1..4371: note = Variant of human B-domain deleted Factor VIII
  source 1..4371: mol_type = other DNA
atgcagattgaactgtctacctgcttcttcctctgtttgctgaggttctgctttagcgccactagacggtactaccttggcgctgtggagctgtcctgggactatatgcagagtgatttgggagagcttcccgtcgacgcacgatttcctcctcgcgttccaaagtcatttcccttcaacacaagcgtggtgtacaagaagacgctcttcgtcgaattcaccgatcacctgttcaatatcgccaaacccagaccaccatggatgggtcttttggggcctaccatacaagcggaggtgtatgacacagttgttatcactctcaagaacatggcttctcatccggtaagtcttcacgcagtgggcgtgtcctactggaaagcttcagaaggagccgagtatgatgatcagacatcccagagggagaaagaagacgacaaggtatttccaggtgggtctcatacctatgtgtggcaagtgctcaaagagaatggccctatggcaagcgatccgctctgtttgacttacagctacctttcacacgttgacctcgtcaaggacctcaactccgggttgattggagccttgttggtatgcagggaaggatctcttgccaaagagaagacacagaccctccacaagtttatccttctctttgctgtgttcgatgagggcaaaagttggcatagcgaaacgaagaattccctcatgcaggatcgcgacgcagccagcgccagagcttggcccaagatgcacactgtgaacggatatgtcaataggtcacttcctggcttgattgggtgtcatcggaaaagtgtctactggcacgtgatcggaatggggacaacaccagaggtccactccatatttctcgaaggccataccttccttgttcgaaaccacagacaggcatccttggagatctctcccattacctttctcactgcccaaacgctccttatggacttgggtcagttccttctcttctgccatatcagctcacaccagcatgatggtatggaagcttatgtgaaagtccgtagttgtcctgaggagccacagttgcgcatgaagaataatgaagaagccgaggattacgacgacgatctcaccgattctgagatggacgtggtgaggtttgatgacgacaactctccctccttcattcaaatccggagcgtggcgaagaaacaccccaagacttgggtccactatatagcggcggaagaggaggattgggattacgctcctcttgtattggcaccagatgaccgctcatacaaaagccagtacctcaacaacggaccgcagagaattggccggaagtataagaaagtgcgatttatggcctatacagacgaaacctttaagacaagggaggccatccagcatgagagtgggattttgggacctcttctttacggcgaagttggtgataccctcctcatcatcttcaagaatcaagcttctcgcccctataacatttacccacacgggatcactgacgttaggcctttgtatagcagaagacttcccaaaggcgtgaagcatctcaaagacttccccattttgccaggcgagatctttaagtacaaatggaccgtcacagtggaagatggaccgactaaatcagaccctcgatgccttacgcggtactattcctccttcgtgaatatggagagagatttggcaagcggactcataggaccactcctcatctgttacaaggaatctgtagaccagaggggtaaccagattatgagtgataaacgcaatgtgatcctttttagcgtcttcgacgagaaccggtcctggtacttgaccgagaatatacaaaggttccttcccaaccccgcaggcgttcagttggaagaccctgagtttcaggccagcaatattatgcactcaatcaacggctatgtgtttgatagtctccagctttctgtttgcctccatgaagtagcctattggtacatcttgtcaattggtgctcaaacagacttcctctccgtcttcttctccggctacacctttaagcacaagatggtgtatgaggacactctcacactctttccattttctggagaaaccgtgttcatgagcatggagaatccaggcctttggatcttgggttgccacaacagtgattttcgcaatcggggaatgactgctctcctcaaagtcagcagctgtgataagaacacaggcgactattacgaagattcttacgaggacataagtgcctacttgttgtccaagaataacgccattgagcccagatcattctcccagaatcctcccgtgcttaaaaggcatcagcgcgaaatcaccagaactactcttcagtctgatcaagaggagattgactatgacgacaccataagcgtggaaatgaagaaggaggatttcgatatctatgacgaagatgagaaccagtctccgcggagctttcagaagaagacgcgacactacttcattgcagcagtcgaaaggctttgggactacggtatgtcatcatcccctcatgtgttgcgcaatagagctcagagtggaagtgttccacagttcaagaaagtcgtctttcaagagtttacagatggcagcttcacacagcctctctatcggggcgagcttaacgaacatttgggactccttggtccctatatccgagccgaagtggaggacaacattatggttacctttaggaatcaagcctctcgcccctacagcttctactcctccctcatcagttatgaggaggatcagagacaaggcgctgaaccacggaagaactttgtgaaaccgaatgagacgaagacctacttctggaaagtacagcaccacatggcccccacaaaagacgaattcgattgcaaagcatgggcgtatttttcagacgttgacttggagaaagatgtacattcaggacttattggtcctttgttggtgtgtcacactaacactctcaatccagcccatggcaggcaggtgacagtccaggaattcgctcttttctttaccatctttgatgagaccaagtcctggtacttcacggaaaacatggagcgcaattgcagagccccctgtaacatacagatggaggaccctacctttaaggaaaattatcggttccacgcaatcaacggatacattatggatacactccctggccttgtgatggctcaggaccaacgaatcaggtggtacctcctcagcatgggttctaatgagaacatacactccattcacttttcaggacatgtgttcactgtccggaagaaagaagagtataagatggccctctacaatttgtatccaggcgtgtttgagaccgttgaaatgcttccctctaaagctggcatctggagagtagagtgcttgatcggagaacatcttcacgcaggtatgagcaccttgttcctcgtgtacagcaacaaatgtcagaccccacttggcatggccagtggacacattcgcgactttcagatcacagcatctggccagtatggacaatgggccccaaagttggctcgcctccattactccggtagcataaatgcgtggtccactaaagaacctttcagctggattaaggtcgatcttcttgcccccatgatcatccacggcattaagacacagggagcgaggcagaaattctcctccctctacatctcacagttcattattatgtatagtttggacggcaagaagtggcaaacttatagaggtaacagtactggaacactcatggtgttcttcggcaacgttgatagctctggcatcaaacacaacatctttaatcctcccataatagctcggtacatcagattgcatccgacccactacagcattaggagtacactccgaatggagcttatgggttgcgacttgaattcctgttcaatgccactcggaatggagtctaaagccatctctgatgcacagataaccgccagtagctactttacgaacatgtttgctacgtggtcaccctctaaggcaaggcttcatttgcaaggccggtctaatgcctggagacctcaggtgaacaacccgaaagaatggctccaggtggactttcagaagaccatgaaagtaacaggtgtcactactcagggagttaagtccttgctcaccagcatgtatgtgaaggagttccttatttcctcatcacaagatggccaccagtggaccctcttctttcagaatggtaaggtcaaagtgtttcagggcaatcaagacagcttcacacccgtggtgaacagtcttgatcctccactcttgacacgataccttcgaatccatccacagtcttgggttcaccagattgcattgcgcatggaagtacttggatgcgaggctcaggacctctac

SEQ ID NO: 276 - protein, 1457 aa, synthetic construct
  REGION 1..1457: note = Variant of human B-domain deleted Factor VIII
MQIELSTCFFLCLLRFCFSATRRYYLGAVELSWDYMQSDLGELPVDARFPPRVPKSFPFNTSVVYKKTLFVEFTDHLFNIAKPRPPWMGLLGPTIQAEVYDTVVITLKNMASHPVSLHAVGVSYWKASEGAEYDDQTSQREKEDDKVFPGGSHTYVWQVLKENGPMASDPLCLTYSYLSHVDLVKDLNSGLIGALLVCREGSLAKEKTQTLHKFILLFAVFDEGKSWHSETKNSLMQDRDAASARAWPKMHTVNGYVNRSLPGLIGCHRKSVYWHVIGMGTTPEVHSIFLEGHTFLVRNHRQASLEISPITFLTAQTLLMDLGQFLLFCHISSHQHDGMEAYVKVRSCPEEPQLRMKNNEEAEDYDDDLTDSEMDVVRFDDDNSPSFIQIRSVAKKHPKTWVHYIAAEEEDWDYAPLVLAPDDRSYKSQYLNNGPQRIGRKYKKVRFMAYTDETFKTREAIQHESGILGPLLYGEVGDTLLIIFKNQASRPYNIYPHGITDVRPLYSRRLPKGVKHLKDFPILPGEIFKYKWTVTVEDGPTKSDPRCLTRYYSSFVNMERDLASGLIGPLLICYKESVDQRGNQIMSDKRNVILFSVFDENRSWYLTENIQRFLPNPAGVQLEDPEFQASNIMHSINGYVFDSLQLSVCLHEVAYWYILSIGAQTDFLSVFFSGYTFKHKMVYEDTLTLFPFSGETVFMSMENPGLWILGCHNSDFRNRGMTALLKVSSCDKNTGDYYEDSYEDISAYLLSKNNAIEPRSFSQNPPVLKRHQREITRTTLQSDQEEIDYDDTISVEMKKEDFDIYDEDENQSPRSFQKKTRHYFIAAVERLWDYGMSSSPHVLRNRAQSGSVPQFKKVVFQEFTDGSFTQPLYRGELNEHLGLLGPYIRAEVEDNIMVTFRNQASRPYSFYSSLISYEEDQRQGAEPRKNFVKPNETKTYFWKVQHHMAPTKDEFDCKAWAYFSDVDLEKDVHSGLIGPLLVCHTNTLNPAHGRQVTVQEFALFFTIFDETKSWYFTENMERNCRAPCNIQMEDPTFKENYRFHAINGYIMDTLPGLVMAQDQRIRWYLLSMGSNENIHSIHFSGHVFTVRKKEEYKMALYNLYPGVFETVEMLPSKAGIWRVECLIGEHLHAGMSTLFLVYSNKCQTPLGMASGHIRDFQITASGQYGQWAPKLARLHYSGSINAWSTKEPFSWIKVDLLAPMIIHGIKTQGARQKFSSLYISQFIIMYSLDGKKWQTYRGNSTGTLMVFFGNVDSSGIKHNIFNPPIIARYIRLHPTHYSIRSTLRMELMGCDLNSCSMPLGMESKAISDAQITASSYFTNMFATWSPSKARLHLQGRSNAWRPQVNNPKEWLQVDFQKTMKVTGVTTQGVKSLLTSMYVKEFLISSSQDGHQWTLFFQNGKVKVFQGNQDSFTPVVNSLDPPLLTRYLRIHPQSWVHQIALRMEVLGCEAQDLY

SEQ ID NO: 277 - DNA, 4371 bp, synthetic construct
  misc_feature 1..4371: note = Variant of human B-domain deleted Factor VIII
  source 1..4371: mol_type = other DNA
atgcagattgaactgtctacctgcttcttcctctgtttgctgaggttctgctttagcgccactagacggtactaccttggcgctgtggagctgtcctgggactatatgcagagtgatttgggagagcttcccgtcgacgcacgatttcctcctcgcgttccaaagtcatttcccttcaacacaagcgtggtgtacaagaagacgctcttcgtcgaattcaccgatcacctgttcaatatcgccaaacccagaccaccatggatgggtcttttggggcctaccatacaagcggaggtgtatgacacagttgttatcactctcaagaacatggcttctcatccggtaagtcttcacgcagtgggcgtgtcctactggaaagcttcagaaggagccgagtatgatgatcagacatcccagagggagaaagaagacgacaaggtatttccaggtgggtctcatacctatgtgtggcaagtgctcaaagagaatggccctatggcaagcgatccgctctgtttgacttacagctacctttcacacgttgacctcgtcaaggacctcaactccgggttgattggagccttgttggtatgcagggaaggatctcttgccaaagagaagacacagaccctccacaagtttatccttctctttgctgtgttcgatgagggcaaaagttggcatagcgaaacgaagaattccctcatgcaggatcgcgacgcagccagcgccagagcttggcccaagatgcacactgtgaacggatatgtcaataggtcacttcctggcttgattgggtgtcatcggaaaagtgtctactggcacgtgatcggaatggggacaacaccagaggtccactccatatttctcgaaggccataccttccttgttcgaaaccacagacaggcatccttggagatctctcccattacctttctcactgcccaaacgctccttatggacttgggtcagttccttctcttctgccatatcagctcacaccagcatgatggtatggaagcttatgtgaaagtcgacagttgtcctgaggagccacagttgcgcatgaagaataatgaagaagccgaggattacgacgacgatctcaccgattctgagatggacgtggtgaggtttgatgacgacaactctccctccttcattcaaatccggagcgtggcgaagaaacaccccaagacttgggtccactatatagcggcggaagaggaggattgggattacgctcctcttgtattggcaccagatgaccgctcatacaaaagccagtacctcaacaacggacagcagagaattggccggaagtataagaaagtgcgatttatggcctatacagacgaaacctttaagacaagggaggccatccagcatgagagtgggattttgggacctcttctttacggcgaagttggtgataccctcctcatcatcttcaagaatcaagcttctcgcccctataacatttacccacacgggatcactgacgttaggcctttgtatagcagaagacttcccaaaggcgtgaagcatctcaaagacttccccattttgccaggcgagatctttaagtacaaatggaccgtcacagtggaagatggaccgactaaatcagaccctcgatgccttacgcggtactattcctccttcgtgaatatggagagagatttggcaagcggactcataggaccactcctcatctgttacaaggaatctgtagaccagaggggtaaccagattatgagtgataaacgcaatgtgatcctttttagcgtcttcgacgagaaccggtcctggtacttgaccgagaatatacaaaggttccttcccaaccccgcaggcgttcagttggaagaccctgagtttcaggccagcaatattatgcactcaatcaacggctatgtgtttgatagtctccagctttctgtttgcctccatgaagtagcctattggtacatcttgtcaattggtgctcaaacagacttcctctccgtcttcttctccggctacacctttaagcacaagatggtgtatgaggacactctcacactctttccattttctggagaaaccgtgttcatgagcatggagaatccaggcctttggatcttgggttgccacaacagtgattttcgcaatcggggaatgactgctctcctcaaagtcagcagctgtgataagaacacaggcgactattacgaagattcttacgaggacataagtgcctacttgttgtccaagaataacgccattgagcccagatcattctcccagaatcctcccgtgcttaaaaggcatcagcgcgaaatcaccagaactactcttcagtctgatcaagaggagattgactatgacgacaccataagcgtggaaatgaagaaggaggatttcgatatctatgacgaagatgagaaccagtctccgcggagctttcagaagaagacgcgacactacttcattgcagcagtcgaaaggctttgggactacggtatgtcatcatcccctcatgtgttgcgcaatagagctcagagtggaagtgttccacagttcaagaaagtcgtctttcaagagtttacagatggcagcttcacacagcctctctatcggggcgagcttaacgaacatttgggactccttggtccctatatccgagccgaagtggaggacaacattatggttacctttaggaatcaagcctctcgcccctacagcttctactcctccctcatcagttatgaggaggatcagagacaaggcgctgaaccacggaagaactttgtgaaaccgaatgagacgaagacctacttctggaaagtacagcaccacatggcccccacaaaagacgaattcgattgcaaagcatgggcgtatttttcagacgttgacttggagaaagatgtacattcaggacttattggtcctttgttggtgtgtcacactaacactctcaatccagcccatggcaggcaggtgacagtccaggaattcgctcttttctttaccatctttgatgagaccaagtcctggtacttcacggaaaacatggagcgcaattgcagagccccctgtaacatacagatggaggaccctacctttaaggaaaattatcggttccacgcaatcaacggatacattatggatacactccctggccttgtgatggctcaggaccaacgaatcaggtggtacctcctcagcatgggttctaatgagaacatacactccattcacttttcaggacatgtgttcactgtccggaagaaagaagagtataagatggccctctacaatttgtatccaggcgtgtttgagaccgttgaaatgcttccctctaaagctggcatctggagagtagagtgcttgatcggagaacatcttcacgcaggtatgagcaccttgttcctcgtgtacagcaacaaatgtcagaccccacttggcatggccagtggacacattcgcgactttcagatcacagcatctggccagtatggacaatgggccccaaagttggctcgcctccattactccggtagcataaatgcgtggtccactaaagaacctttcagctggattaaggtcgatcttcttgcccccatgatcatccacggcattaagacacagggagcgaggcagaaattctcctccctctacatctcacagttcattattatgtatagtttggacggcaagaagtggcaaacttatagaggtaacagtactggaacactcatggtgttcttcggcaacgttgatagctctggcatcaaacacaacatctttaatcctcccataatagctcggtacatcagattgcatccgacccactacagcattaggagtacactccgaatggagcttatgggttgcgacttgaattcctgttcaatgccactcggaatggagtctaaagccatctctgatgcacagataaccgccagtagctactttacgaacatgtttgctacgtggtcaccctctaaggcaaggcttcatttgcaaggccggtctaatgcctggagacctcaggtgaacaacccgaaagaatggctccaggtggactttcagaagaccatgaaagtaacaggtgtcactactcagggagttaagtccttgctcaccagcatgtatgtgaaggagttccttatttcctcatcacaagatggccaccagtggaccctcttctttcagaatggtaaggtcaaagtgtttcagggcaatcaagacagcttcacacccgtggtgaacagtcttgatcctccactcttgacacgataccttcgaatccatccacagtcttgggttcaccagattgcattgcgcatggaagtacttggatgcgaggctcaggacctctac

SEQ ID NO: 278 - protein, 1457 aa, synthetic construct
  REGION 1..1457: note = Variant of human B-domain deleted Factor VIII
MQIELSTCFFLCLLRFCFSATRRYYLGAVELSWDYMQSDLGELPVDARFPPRVPKSFPFNTSVVYKKTLFVEFTDHLFNIAKPRPPWMGLLGPTIQAEVYDTVVITLKNMASHPVSLHAVGVSYWKASEGAEYDDQTSQREKEDDKVFPGGSHTYVWQVLKENGPMASDPLCLTYSYLSHVDLVKDLNSGLIGALLVCREGSLAKEKTQTLHKFILLFAVFDEGKSWHSETKNSLMQDRDAASARAWPKMHTVNGYVNRSLPGLIGCHRKSVYWHVIGMGTTPEVHSIFLEGHTFLVRNHRQASLEISPITFLTAQTLLMDLGQFLLFCHISSHQHDGMEAYVKVDSCPEEPQLRMKNNEEAEDYDDDLTDSEMDVVRFDDDNSPSFIQIRSVAKKHPKTWVHYIAAEEEDWDYAPLVLAPDDRSYKSQYLNNGQQRIGRKYKKVRFMAYTDETFKTREAIQHESGILGPLLYGEVGDTLLIIFKNQASRPYNIYPHGITDVRPLYSRRLPKGVKHLKDFPILPGEIFKYKWTVTVEDGPTKSDPRCLTRYYSSFVNMERDLASGLIGPLLICYKESVDQRGNQIMSDKRNVILFSVFDENRSWYLTENIQRFLPNPAGVQLEDPEFQASNIMHSINGYVFDSLQLSVCLHEVAYWYILSIGAQTDFLSVFFSGYTFKHKMVYEDTLTLFPFSGETVFMSMENPGLWILGCHNSDFRNRGMTALLKVSSCDKNTGDYYEDSYEDISAYLLSKNNAIEPRSFSQNPPVLKRHQREITRTTLQSDQEEIDYDDTISVEMKKEDFDIYDEDENQSPRSFQKKTRHYFIAAVERLWDYGMSSSPHVLRNRAQSGSVPQFKKVVFQEFTDGSFTQPLYRGELNEHLGLLGPYIRAEVEDNIMVTFRNQASRPYSFYSSLISYEEDQRQGAEPRKNFVKPNETKTYFWKVQHHMAPTKDEFDCKAWAYFSDVDLEKDVHSGLIGPLLVCHTNTLNPAHGRQVTVQEFALFFTIFDETKSWYFTENMERNCRAPCNIQMEDPTFKENYRFHAINGYIMDTLPGLVMAQDQRIRWYLLSMGSNENIHSIHFSGHVFTVRKKEEYKMALYNLYPGVFETVEMLPSKAGIWRVECLIGEHLHAGMSTLFLVYSNKCQTPLGMASGHIRDFQITASGQYGQWAPKLARLHYSGSINAWSTKEPFSWIKVDLLAPMIIHGIKTQGARQKFSSLYISQFIIMYSLDGKKWQTYRGNSTGTLMVFFGNVDSSGIKHNIFNPPIIARYIRLHPTHYSIRSTLRMELMGCDLNSCSMPLGMESKAISDAQITASSYFTNMFATWSPSKARLHLQGRSNAWRPQVNNPKEWLQVDFQKTMKVTGVTTQGVKSLLTSMYVKEFLISSSQDGHQWTLFFQNGKVKVFQGNQDSFTPVVNSLDPPLLTRYLRIHPQSWVHQIALRMEVLGCEAQDLY

SEQ ID NO: 279 - DNA, 4371 bp, synthetic construct
  misc_feature 1..4371: note = Variant of human B-domain deleted Factor VIII
  source 1..4371: mol_type = other DNA
atgcagattgaactgtctacctgcttcttcctctgtttgctgaggttctgctttagcgccactagacggtactaccttggcgctgtggagctgtcctgggactatatgcagagtgatttgggagagcttcccgtcgacgcacgatttcctcctcgcgttccaaagtcatttcccttcaacacaagcgtggtgtacaagaagacgctcttcgtcgaattcaccgatcacctgttcaatatcgccaaacccagaccaccatggatgggtcttttggggcctaccatagtggcggaggtgtatgacacagttgttatcactctcaagaacatggcttctcatccggtaagtcttcacgcagtgggcgtgtcctactggaaagcttcagaaggagccgagtatgatgatcagacatcccagagggagaaagaagacgacaaggtatttccaggtgggtctcatacctatgtgtggcaagtgctcaaagagaatggccctatggcaagcgatccgctctgtttgacttacagctacctttcacacgttgacctcgtcaaggacctcaactccgggttgattggagccttgttggtatgcagggaaggatctcttgccaaagagaagacacagaccctccacaagtttatccttctctttgctgtgttcgatgagggcaaaagttggcatagcgaaacgaagaattccctcatgcaggatcgcgacgcagccagcgccagagcttggcccaagatgcacactgtgaacggatatgtcaataggtcacttcctggcttgattgggtgtcatcggaaaagtgtctactggcacgtgatcggaatggggacaacaccagaggtccactccatatttctcgaaggccataccttccttgttcgaaaccacagacaggcatccttggagatctctcccattacctttctcactgcccaaacgctccttatggacttgggtcagttccttctcttctgccatatcagctcacaccagcatgatggtatggaagcttatgtgaaagtcgacagttgtcctgaggagccacagttgcgcatgaagaataatgaagaagccgaggattacgacgacgatctcaccgattctgagatggacgtggtgaggtttgatgacgacaactctccctccttcattcaaatccggagcgtggcgaagaaacaccccaagacttgggtccactatatagcggcggaagaggaggattgggattacgctcctcttgtattggcaccagatgaccgctcatacaaaagccagtacctcaacaacggaccgcagagaattggccggaagtataagaaagtgcgatttatggcctatacagacgaaacctttaagacaagggaggccatccagcatgagagtgggattttgggacctcttctttacggcgaagttggtgataccctcctcatcatcttcaagaatcaagcttctcgcccctataacatttacccacacgggatcactgacgttaggcctttgtatagcagaagacttcccaaaggcgtgaagcatctcaaagacttccccattttgccaggcgagatctttaagtacaaatggaccgtcacagtggaagatggaccgactaaatcagaccctcgatgccttacgcggtactattcctccttcgtgaatatggagagagatttggcaagcggactcataggaccactcctcatctgttacaaggaatctgtagaccagaggggtaaccagattatgagtgataaacgcaatgtgatcctttttagcgtcttcgacgagaaccggtcctggtacttgaccgagaatatacaaaggttccttcccaaccccgcaggcgttcagttggaagaccctgagtttcaggccagcaatattatgcactcaatcaacggctatgtgtttgatagtctccagctttctgtttgcctccatgaagtagcctattggtacatcttgtcaattggtgctcaaacagacttcctctccgtcttcttctccggctacacctttaagcacaagatggtgtatgaggacactctcacactctttccattttctggagaaaccgtgttcatgagcatggagaatccaggcctttggatcttgggttgccacaacagtgattttcgcaatcggggaatgactgctctcctcaaagtcagcagctgtgataagaacacaggcgactattacgaagattcttacgaggacataagtgcctacttgttgtccaagaataacgccattgagcccagatcattctcccagaatcctcccgtgcttaaaaggcatcagcgcgaaatcaccagaactactcttcagtctgatcaagaggagattgactatgacgacaccataagcgtggaaatgaagaaggaggatttcgatatctatgacgaagatgagaaccagtctccgcggagctttcagaagaagacgcgacactacttcattgcagcagtcgaaaggctttgggactacggtatgtcatcatcccctcatgtgttgcgcaatagagctcagagtggaagtgttccacagttcaagaaagtcgtctttcaagagtttacagatggcagcttcacacagcctctctatcggggcgagcttaacgaacatttgggactccttggtccctatatccgagccgaagtggaggacaacattatggttacctttaggaatcaagcctctcgcccctacagcttctactcctccctcatcagttatgaggaggatcagagacaaggcgctgaaccacggaagaactttgtgaaaccgaatgagacgaagacctacttctggaaagtacagcaccacatggcccccacaaaagacgaattcgattgcaaagcatgggcgtatttttcagacgttgacttggagaaagatgtacattcaggacttattggtcctttgttggtgtgtcacactaacactctcaatccagcccatggcaggcaggtgacagtccaggaattcgctcttttctttaccatctttgatgagaccaagtcctggtacttcacggaaaacatggagcgcaattgcagagccccctgtaacatacagatggaggaccctacctttaaggaaaattatcggttccacgcaatcaacggatacattatggatacactccctggccttgtgatggctcaggaccaacgaatcaggtggtacctcctcagcatgggttctaatgagaacatacactccattcacttttcaggacatgtgttcactgtccggaagaaagaagagtataagatggccctctacaatttgtatccaggcgtgtttgagaccgttgaaatgcttccctctaaagctggcatctggagagtagagtgcttgatcggagaacatcttcacgcaggtatgagcaccttgttcctcgtgtacagcaacaaatgtcagaccccacttggcatggccagtggacacattcgcgactttcagatcacagcatctggccagtatggacaatgggccccaaagttggctcgcctccattactccggtagcataaatgcgtggtccactaaagaacctttcagctggattaaggtcgatcttcttgcccccatgatcatccacggcattaagacacagggagcgaggcagaaattctcctccctctacatctcacagttcattattatgtatagtttggacggcaagaagtggcaaacttatagaggtaacagtactggaacactcatggtgttcttcggcaacgttgatagctctggcatcaaacacaacatctttaatcctcccataatagctcggtacatcagattgcatccgacccactacagcattaggagtacactccgaatggagcttatgggttgcgacttgaattcctgttcaatgccactcggaatggagtctaaagccatctctgatgcacagataaccgccagtagctactttacgaacatgtttgctacgtggtcaccctctaaggcaaggcttcatttgcaaggccggtctaatgcctggagacctcaggtgaacaacccgaaagaatggctccaggtggactttcagaagaccatgaaagtaacaggtgtcactactcagggagttaagtccttgctcaccagcatgtatgtgaaggagttccttatttcctcatcacaagatggccaccagtggaccctcttctttcagaatggtaaggtcaaagtgtttcagggcaatcaagacagcttcacacccgtggtgaacagtcttgatcctccactcttgacacgataccttcgaatccatccacagtcttgggttcaccagattgcattgcgcatggaagtacttggatgcgaggctcaggacctctac

SEQ ID NO: 280 - protein, 1457 aa, synthetic construct
  REGION 1..1457: note = Variant of human B-domain deleted Factor VIII
MQIELSTCFFLCLLRFCFSATRRYYLGAVELSWDYMQSDLGELPVDARFPPRVPKSFPFNTSVVYKKTLFVEFTDHLFNIAKPRPPWMGLLGPTIVAEVYDTVVITLKNMASHPVSLHAVGVSYWKASEGAEYDDQTSQREKEDDKVFPGGSHTYVWQVLKENGPMASDPLCLTYSYLSHVDLVKDLNSGLIGALLVCREGSLAKEKTQTLHKFILLFAVFDEGKSWHSETKNSLMQDRDAASARAWPKMHTVNGYVNRSLPGLIGCHRKSVYWHVIGMGTTPEVHSIFLEGHTFLVRNHRQASLEISPITFLTAQTLLMDLGQFLLFCHISSHQHDGMEAYVKVDSCPEEPQLRMKNNEEAEDYDDDLTDSEMDVVRFDDDNSPSFIQIRSVAKKHPKTWVHYIAAEEEDWDYAPLVLAPDDRSYKSQYLNNGPQRIGRKYKKVRFMAYTDETFKTREAIQHESGILGPLLYGEVGDTLLIIFKNQASRPYNIYPHGITDVRPLYSRRLPKGVKHLKDFPILPGEIFKYKWTVTVEDGPTKSDPRCLTRYYSSFVNMERDLASGLIGPLLICYKESVDQRGNQIMSDKRNVILFSVFDENRSWYLTENIQRFLPNPAGVQLEDPEFQASNIMHSINGYVFDSLQLSVCLHEVAYWYILSIGAQTDFLSVFFSGYTFKHKMVYEDTLTLFPFSGETVFMSMENPGLWILGCHNSDFRNRGMTALLKVSSCDKNTGDYYEDSYEDISAYLLSKNNAIEPRSFSQNPPVLKRHQREITRTTLQSDQEEIDYDDTISVEMKKEDFDIYDEDENQSPRSFQKKTRHYFIAAVERLWDYGMSSSPHVLRNRAQSGSVPQFKKVVFQEFTDGSFTQPLYRGELNEHLGLLGPYIRAEVEDNIMVTFRNQASRPYSFYSSLISYEEDQRQGAEPRKNFVKPNETKTYFWKVQHHMAPTKDEFDCKAWAYFSDVDLEKDVHSGLIGPLLVCHTNTLNPAHGRQVTVQEFALFFTIFDETKSWYFTENMERNCRAPCNIQMEDPTFKENYRFHAINGYIMDTLPGLVMAQDQRIRWYLLSMGSNENIHSIHFSGHVFTVRKKEEYKMALYNLYPGVFETVEMLPSKAGIWRVECLIGEHLHAGMSTLFLVYSNKCQTPLGMASGHIRDFQITASGQYGQWAPKLARLHYSGSINAWSTKEPFSWIKVDLLAPMIIHGIKTQGARQKFSSLYISQFIIMYSLDGKKWQTYRGNSTGTLMVFFGNVDSSGIKHNIFNPPIIARYIRLHPTHYSIRSTLRMELMGCDLNSCSMPLGMESKAISDAQITASSYFTNMFATWSPSKARLHLQGRSNAWRPQVNNPKEWLQVDFQKTMKVTGVTTQGVKSLLTSMYVKEFLISSSQDGHQWTLFFQNGKVKVFQGNQDSFTPVVNSLDPPLLTRYLRIHPQSWVHQIALRMEVLGCEAQDLY

SEQ ID NO: 281 - DNA, 4371 bp, synthetic construct
  misc_feature 1..4371: note = Variant of human B-domain deleted Factor VIII
  source 1..4371: mol_type = other DNA
atgcagattgaactgtctacctgcttcttcctctgtttgctgaggttctgctttagcgccactagacggtactaccttggcgctgtggagctgtcctgggactatatgcagagtgatttgggagagcttcccgtcgacgcacgatttcctcctcgcgttccaaagtcatttcccttcaacacaagcgtggtgtacaagaagacgctcttcgtcgaattcaccgatcacctgttcaatatcgccaaacccagaccaccatggatgggtcttttggggcctaccatacaagcggaggtgtatgacacagttgttatcactctcaagaacatggcttctcatccggtaagtcttcacgcagtgggcgtgtcctactggaaagcttcagaaggagccgagtatgatgatcagacatcccagagggagaaagaagacgacaaggtatttccaggtgggtctcatacctatgtgtggcaagtgctcaaagagaatggccctatggcaagcgatccgctctgtttgacttacagctacctttcacacgttgacctcgtcaaggacctcaactccgggttgattggagccttgttggtatgcagggaaggatctcttgccaaagagaagacacagaccctccacaagtttatccttctctttgctgtgttcgatgagggcaaaagttggcatagcgaaacgaagaattccctcatgcaggatcgcgacgcagccagcgccagagcttggcccaagatgcacactgtgaacggatatgtcaataggtcacttcctggcttgattgggtgtcatcggaaaagtgtctactggcacgtgatcggaatggggacaacaccagaggtccactccatatttctcgaaggccataccttccttgttcgaaaccacagacaggcatccttggagatctctcccattacctttctcactgcccaaacgctccttatggacttgggtcagttccttctcttctgccatatcagctcacaccagcatgatggtatggaagcttatgtgaaagtcgacagttgtcctgaggagccacagttgcgcatgaagaataatgaagaagccgaggattacgacgacgatctcaccgattctgagatggacgtggtgaggtttgatgacgacaactctccctccttcattcaaatccggagcgtggcgaagaaacaccccaagacttgggtccactatatagcggcggaagaggaggattgggattacgctcctcttgtattggcaccagatgaccgctcatacaaaagccagtacctcaacaacggaccgcagagaattggccggaagtataagaaagtgcgatttatggcctatacagacgaaacctttaagacaagggaggccatccagcatgagagtgggattttgggacctcttctttacggcgaagttggtgataccctcctcatcatcttcaagaatcaagcttctcgcccctataacatttacccacacgggatcactgacgttaggcctttgtatagcagaagacttcccaaaggcgtgaagcatctcaaagacttccccattttgccaggcgagatctttaagtacaaatggaccgtcacagtggaagatggaccgactaaatcagaccctcgatgccttacgcggtactattcctccttcgtgaatatggagagagatttggcaagcggactcataggaccactcctcatctgttacaaggaatctgtagaccagaggggtaaccagattatgagtgataaacgcaatgtgatcctttttagcgtcttcgacgagaaccggtcctggtacttgaccgagaatatacaaaggttccttcccaaccccgcaggcgttcagttggaagaccctgagtttcaggccagcaatattatgcactcaatcaacggctatgtgtttgatagtctccagctttctgtttgcctccatgaagtagcctattggtacatcttgtcaattggtgctcaaacagacttcctctccgtcttcttctccggctacacctttaagcacaagatggtgtatgaggacactctcacactctttccattttctggagaaaccgtgttcatgagcatggagaatccaggcctttggatcttgggttgccacaacagtgattttcgcaatcggggaatgactgctctcctcaaagtcagcagctgtgataagaacacaggcgactattacgaagattcttacgaggacataagtgcctacttgttgtccaagaataacgccattgagcccagatcattctcccagaatcctcccgtgcttaaaaggcatcagcgcgaaatcaccagaactactcttcagtctgatcaagaggagattgactatgacgacaccataagcgtggaaatgaagaaggaggatttcgatatctatgacgaagatgagaaccagtctccgcggagctttcagaagaagacgcgacactacttcattgcagcagtcgaaaggctttgggactacggtatgtcatcatcccctcatgtgttgcgcaatagagctcagagtggaagtgttccacagttcaagaaagtcgtctttcaagagtttacagatggcagcttcacacagcctctctatcggggcgagcttaacgaacatttgggactccttggtccctatatccgagccgaagtggaggacaacattatggttacctttaggaatcaagcctctcgcccctacagcttctactcctccctcatcagttatgaggaggatcagagacaaggcgctgaaccacggaagaactttgtgaaaccgaatgagacgaagacctacttctggaaagtacagcaccacatggcccccacaaaagacgaattcgattgcaaagcatgggcgtatttttcagacgttgacttggagaaagatgtacattcaggacttattggtcctttgttggtgtgtcacactaacactctcaatccagcccatggcaggcaggtgacagtccaggaattcgctcttttctttaccatctttgatgagaccaagtcctggtacttcacggaaaacatggagcgcaattgcagagccccctgtaacatacagatggaggaccctacctttaaggaaaattatcggttccacgcaatcaacggatacattatggatacactccctggccttgtgatggctcaggaccaacgaatcaggtggtacctcctcagcatgggttctaatgagaacatacactccattcacttttcaggacatgtgttcactgtccggaagaaagaagagtataagatggccctctacaatttgtatccaggcgtgtttgagaccgttgaaatgcttccctctaaagctggcatctggagagtagagtgcttgatcggagaacatcttcacgcaggtatgagcaccttgttcctcgtgtacagcaacaaatgtcagaccccacttggcatggccagtggacacattcgcgactttcagatcacagcatctggccagtatggacaatgggccccaaagttggctcgcctccattactccggtagcataaatgcgtggtccactaaagaacctttcagctggattaaggtcgatcttcttgcccccatgatcatccacggcattaagacacagggagcgaggcagaaattctcctccctctacatctcacagttcattattatgtatagtttggacggcaagaagtggcaaacttatagaggtaacagtactggaacactcatggtgttcttcggcaacgttgatagctctggcatcaaacacaacatctttaatcctcccataatagctcggtacatcagattgcatccgacccactacagcattaggagtacactccgaatggagcttatgggttgcgacttgaattcctgttcaatgccactcggaatggagtctaaagccatctctgatgcacagataaccgccagtagctactttacgaacatgtttgctacgtggtcaccctctaaggcaaggcttcatttgcaaggccggtctaatgcctggagacctcaggtgaacaacccgaaagaatggctccaggtggactttcagaagaccatgaaagtaacaggtgtcactactcagggagttaagtccttgcggaccagcatgtatgtgaaggagttccttatttcctcatcacaagatggccaccagtggaccctcttctttcagaatggtaaggtcaaagtgtttcagggcaatcaagacagcttcacacccgtggtgaacagtcttgatcctccactcttgacacgataccttcgaatccatccacagtcttgggttcaccagattgcattgcgcatggaagtacttggatgcgaggctcaggacctctac

SEQ ID NO: 282 - protein, 1457 aa, synthetic construct
  REGION 1..1457: note = Variant of human B-domain deleted Factor VIII
MQIELSTCFFLCLLRFCFSATRRYYLGAVELSWDYMQSDLGELPVDARFPPRVPKSFPFNTSVVYKKTLFVEFTDHLFNIAKPRPPWMGLLGPTIQAEVYDTVVITLKNMASHPVSLHAVGVSYWKASEGAEYDDQTSQREKEDDKVFPGGSHTYVWQVLKENGPMASDPLCLTYSYLSHVDLVKDLNSGLIGALLVCREGSLAKEKTQTLHKFILLFAVFDEGKSWHSETKNSLMQDRDAASARAWPKMHTVNGYVNRSLPGLIGCHRKSVYWHVIGMGTTPEVHSIFLEGHTFLVRNHRQASLEISPITFLTAQTLLMDLGQFLLFCHISSHQHDGMEAYVKVDSCPEEPQLRMKNNEEAEDYDDDLTDSEMDVVRFDDDNSPSFIQIRSVAKKHPKTWVHYIAAEEEDWDYAPLVLAPDDRSYKSQYLNNGPQRIGRKYKKVRFMAYTDETFKTREAIQHESGILGPLLYGEVGDTLLIIFKNQASRPYNIYPHGITDVRPLYSRRLPKGVKHLKDFPILPGEIFKYKWTVTVEDGPTKSDPRCLTRYYSSFVNMERDLASGLIGPLLICYKESVDQRGNQIMSDKRNVILFSVFDENRSWYLTENIQRFLPNPAGVQLEDPEFQASNIMHSINGYVFDSLQLSVCLHEVAYWYILSIGAQTDFLSVFFSGYTFKHKMVYEDTLTLFPFSGETVFMSMENPGLWILGCHNSDFRNRGMTALLKVSSCDKNTGDYYEDSYEDISAYLLSKNNAIEPRSFSQNPPVLKRHQREITRTTLQSDQEEIDYDDTISVEMKKEDFDIYDEDENQSPRSFQKKTRHYFIAAVERLWDYGMSSSPHVLRNRAQSGSVPQFKKVVFQEFTDGSFTQPLYRGELNEHLGLLGPYIRAEVEDNIMVTFRNQASRPYSFYSSLISYEEDQRQGAEPRKNFVKPNETKTYFWKVQHHMAPTKDEFDCKAWAYFSDVDLEKDVHSGLIGPLLVCHTNTLNPAHGRQVTVQEFALFFTIFDETKSWYFTENMERNCRAPCNIQMEDPTFKENYRFHAINGYIMDTLPGLVMAQDQRIRWYLLSMGSNENIHSIHFSGHVFTVRKKEEYKMALYNLYPGVFETVEMLPSKAGIWRVECLIGEHLHAGMSTLFLVYSNKCQTPLGMASGHIRDFQITASGQYGQWAPKLARLHYSGSINAWSTKEPFSWIKVDLLAPMIIHGIKTQGARQKFSSLYISQFIIMYSLDGKKWQTYRGNSTGTLMVFFGNVDSSGIKHNIFNPPIIARYIRLHPTHYSIRSTLRMELMGCDLNSCSMPLGMESKAISDAQITASSYFTNMFATWSPSKARLHLQGRSNAWRPQVNNPKEWLQVDFQKTMKVTGVTTQGVKSLRTSMYVKEFLISSSQDGHQWTLFFQNGKVKVFQGNQDSFTPVVNSLDPPLLTRYLRIHPQSWVHQIALRMEVLGCEAQDLY

SEQ ID NO: 283 - DNA, 4371 bp, synthetic construct
  misc_feature 1..4371: note = Variant of human B-domain deleted Factor VIII
  source 1..4371: mol_type = other DNA
atgcagattgaactgtctacctgcttcttcctctgtttgctgaggttctgctttagcgccactagacggtactaccttggcgctgtggagctgtcctgggactatatgcagagtgatttgggagagcttcccgtcgacgcacgatttcctcctcgcgttccaaagtcatttcccttcaacacaagcgtggtgtacaagaagacgctcttcgtcgaattcaccgatcacctgttcaatatcgccaaacccagaccaccatggatgggtcttttggggcctaccatacaagcggaggtgtatgacacagttgttatcactctcaagaacatggcttctcatccggtaagtcttcacgcagtgggcgtgtcctactggaaagcttcagaaggagccgagtatgatgatcagacatcccagagggagaaagaagacgacaaggtatttccaggtgggtctcatacctatgtgtggcaagtgctcaaagagaatggccctatggcaagcgatccgctctgtttgacttacagctacctttcacacgttgacctcgtcaaggacctcaactccgggttgattggagccttgttggtatgcagggaaggatctcttgccaaagagaagacacagaccctccacaagtttatccttctctttgctgtgttcgatgagggcaaaagttggcatagcgaaacgaagaattccctcatgcaggatcgcgacgcagccagcgccagagcttggcccaagatgcacactgtgaacggatatgtcaataggtcacttcctggcttgattgggtgtcatcggaaaagtgtctactggcacgtgatcggaatggggacaacaccagaggtccactccatatttctcgaaggccataccttccttgttcgaaaccacagacaggcatccttggagatctctcccattacctttctcactgcccaaacgctccttatggacttgggtcagttccttctcttctgccatatcagctcacaccagcatgatggtatggaagcttatgtgaaagtcgacagttgtcctgaggagccacagttgcgcatgaagaataatgaagaagccgaggattacgacgacgatctcaccgattctgagatggacgtggtgaggtttgatgacgacaactctccctccttcattcaaatccggagcgtggcgaagaaacaccccaagacttgggtccactatatagcggcggaagaggaggattgggattacgctcctcttgtattggcaccagatgaccgctcatacaaaagccagtacctcaacaacggaccgcagagaattggccggaagtataagaaagtgcgatttatggcctatacagacgaaacctttaagacaagggaggccatccagcatgagagtgggattttgggacctcttctttacggcgaagttggtgataccctcctcatcatcttcaagaatcaagcttctcgcccctataacatttacccacacgggatcactgacgttaggcctttgtatagcagaagacttcccaaaggcgtgaagcatctcaaagacttccccattttgccaggcgagatctttaagtacaaatggaccgtcacagtggaagatggaccgactaaatcagaccctcgatgccttacgcggtactattcctccttcgtgaatatggagagagatttggcaagcggactcataggaccactcctcatctgttacaaggaatctgtagaccagaggggtaaccagattatgagtgataaacgcaatgtgatcctttttagcgtcttcgacgagaaccggtcctggtacttgaccgagaatatacaaaggttccttcccaaccccgcaggcgttcagttggaagaccctgagtttcaggccagcaatattatgcactcaatcaacggctatgtgtttgatagtctccagctttctgtttgcctccatgaagtagcctattggtacatcttgtcaattggtgctcaaacagacttcctctccgtcttcttctccggctacacctttaagcacaagatggtgtatgaggacactctcacactctttccattttctggagaaaccgtgttcatgagcatggagaatccaggcctttggatcttgggttgccacaacagtgattttcgcaatcggggaatgactgctctcctcaaagtcagcagctgtgataagaacacaggcgactattacgaagattcttacgaggacataagtgcctacttgttgtccaagaataacgccattgagcccagatcattctcccagaatcctcccgtgcttaaaaggcatcagcgcgaaatcaccagaactactcttcagtctgatcaagaggagattgactatgacgacaccataagcgtggaaatgaagaaggaggatttcgatatctatgacgaagatgagaaccagtctccgcggagctttcagaagaagacgcgacactacttcattgcagcagtcgaaaggctttgggactacggtatgtcatcatcccctcatgtgttgcgcaatagagctcagagtggaagtgttccacagttcaagaaagtcgtctttcaagagtttacagatggcagcttcacacagcctctctatcggggcgagcttaacgaacatttgggactccttggtccctatatccgagccgaagtggaggacaacattatggttacctttaggaatcaagcctctcgcccctacagcttctactcctccctcatcagttatgaggaggatcagagacaaggcgctgaaccacggaagaactttgtgaaaccgaatgagacgaagacctacttctggaaagtacagcaccacatggcccccacaaaagacgaattcgattgcaaagcatgggcgtatttttcagacgttgacttggagaaagatgtacattcaggacttattggtcctttgttggtgtgtcacactaacactctcaatccagcccatggcaggcaggtgacagtccaggaattcgctcttttctttaccatctttgatgagaccaagtcctggtacttcacggaaaacatggagcgcaattgcagagccccctgtaacatacagatggaggaccctacctttaaggaaaattatcggttccacgcaatcaacggatacattatggatacactccctggccttgtgatggctcaggaccaacgaatcaggtggtacctcctcagcatgggttctaatgagaacatacactccattcacttttcaggacatgtgttcactgtccggaagaaagaagagtataagatggccctctacaatttgtatccaggcgtgtttgagaccgttgaaatgcttccctctaaagctggcatctggagagtagagtgcttgatcggagaacatcttcacgcaggtatgagcaccttgttcctcgtgtacagcaacaaatgtcagaccccacttggcatggccagtggacacattcgcgactttcagatcacagcatctggccagtatggacaatgggccccaaagttggctcgcctccattactccggtagcataaatgcgtggtccactaaagaacctttcagctggattaaggtcgatcttcttgcccccatgatcatccacggcattaagacacagggagcgaggcagaaattctcctccctctacatctcacagttcattattatgtatagtttggacggcaagaagtggcaaacttatagaggtaacagtactggaacactcatggtgttcttcggcaacgttgatagctctggcatcaaacacaacatctttaatcctcccataatagctcggtacatcagattgcatccgacccactacagcattaggagtacactccgaatggagcttatgggttgcgacttgaattcctgttcaatgccactcggaatggagtctaaagccatctctgatgcacagataaccgccagtagctactttacgaacatgtttgctacgtggtcaccctctaaggcaaggcttcatttgcaaggccggtctaatgcctggagacctcaggtgaacaacccgaaagaatggctccaggtggactttcagaagaccatgaaagtaacaggtgtcactactcagggagttaagtccttgtctaccagcatgtatgtgaaggagttccttatttcctcatcacaagatggccaccagtggaccctcttctttcagaatggtaaggtcaaagtgtttcagggcaatcaagacagcttcacacccgtggtgaacagtcttgatcctccactcttgacacgataccttcgaatccatccacagtcttgggttcaccagattgcattgcgcatggaagtacttggatgcgaggctcaggacctctac

SEQ ID NO: 284 - protein, 1457 aa, synthetic construct
  REGION 1..1457: note = Variant of human B-domain deleted Factor VIII
MQIELSTCFFLCLLRFCFSATRRYYLGAVELSWDYMQSDLGELPVDARFPPRVPKSFPFNTSVVYKKTLFVEFTDHLFNIAKPRPPWMGLLGPTIQAEVYDTVVITLKNMASHPVSLHAVGVSYWKASEGAEYDDQTSQREKEDDKVFPGGSHTYVWQVLKENGPMASDPLCLTYSYLSHVDLVKDLNSGLIGALLVCREGSLAKEKTQTLHKFILLFAVFDEGKSWHSETKNSLMQDRDAASARAWPKMHTVNGYVNRSLPGLIGCHRKSVYWHVIGMGTTPEVHSIFLEGHTFLVRNHRQASLEISPITFLTAQTLLMDLGQFLLFCHISSHQHDGMEAYVKVDSCPEEPQLRMKNNEEAEDYDDDLTDSEMDVVRFDDDNSPSFIQIRSVAKKHPKTWVHYIAAEEEDWDYAPLVLAPDDRSYKSQYLNNGPQRIGRKYKKVRFMAYTDETFKTREAIQHESGILGPLLYGEVGDTLLIIFKNQASRPYNIYPHGITDVRPLYSRRLPKGVKHLKDFPILPGEIFKYKWTVTVEDGPTKSDPRCLTRYYSSFVNMERDLASGLIGPLLICYKESVDQRGNQIMSDKRNVILFSVFDENRSWYLTENIQRFLPNPAGVQLEDPEFQASNIMHSINGYVFDSLQLSVCLHEVAYWYILSIGAQTDFLSVFFSGYTFKHKMVYEDTLTLFPFSGETVFMSMENPGLWILGCHNSDFRNRGMTALLKVSSCDKNTGDYYEDSYEDISAYLLSKNNAIEPRSFSQNPPVLKRHQREITRTTLQSDQEEIDYDDTISVEMKKEDFDIYDEDENQSPRSFQKKTRHYFIAAVERLWDYGMSSSPHVLRNRAQSGSVPQFKKVVFQEFTDGSFTQPLYRGELNEHLGLLGPYIRAEVEDNIMVTFRNQASRPYSFYSSLISYEEDQRQGAEPRKNFVKPNETKTYFWKVQHHMAPTKDEFDCKAWAYFSDVDLEKDVHSGLIGPLLVCHTNTLNPAHGRQVTVQEFALFFTIFDETKSWYFTENMERNCRAPCNIQMEDPTFKENYRFHAINGYIMDTLPGLVMAQDQRIRWYLLSMGSNENIHSIHFSGHVFTVRKKEEYKMALYNLYPGVFETVEMLPSKAGIWRVECLIGEHLHAGMSTLFLVYSNKCQTPLGMASGHIRDFQITASGQYGQWAPKLARLHYSGSINAWSTKEPFSWIKVDLLAPMIIHGIKTQGARQKFSSLYISQFIIMYSLDGKKWQTYRGNSTGTLMVFFGNVDSSGIKHNIFNPPIIARYIRLHPTHYSIRSTLRMELMGCDLNSCSMPLGMESKAISDAQITASSYFTNMFATWSPSKARLHLQGRSNAWRPQVNNPKEWLQVDFQKTMKVTGVTTQGVKSLSTSMYVKEFLISSSQDGHQWTLFFQNGKVKVFQGNQDSFTPVVNSLDPPLLTRYLRIHPQSWVHQIALRMEVLGCEAQDLY

SEQ ID NO: 285 - DNA, 4371 bp, synthetic construct
  misc_feature 1..4371: note = Variant of human B-domain deleted Factor VIII
  source 1..4371: mol_type = other DNA
atgcagattgaactgtctacctgcttcttcctctgtttgctgaggttctgctttagcgccactagacggtactaccttggcgctgtggagctgtcctgggactatatgcagagtgatttgggagagcttcccgtcgacgcacgatttcctcctcgcgttccaaagtcatttcccgggaacacaagcgtggtgtacaagaagacgctcttcgtcgaattcaccgatcacctgttcaatatcgccaaacccagaccaccatggatgggtcttttggggcctaccatacaagcggaggtgtatgacacagttgttatcactctcaagaacatggcttctcatccggtaagtcttcacgcagtgggcgtgtcctactggaaagcttcagaaggagccgagtatgatgatcagacatcccagagggagaaagaagacgacaaggtatttccaggtgggtctcatacctatgtgtggcaagtgctcaaagagaatggccctatggcaagcgatccgctctgtttgacttacagctacctttcacacgttgacctcgtcaaggacctcaactccgggttgattggagccttgttggtatgcagggaaggatctcttgccaaagagaagacacagaccctccacaagtttatccttctctttgctgtgttcgatgagggcaaaagttggcatagcgaaacgaagaattccctcatgcaggatcgcgacgcagccagcgccagagcttggcccaagatgcacactgtgaacggatatgtcaataggtcacttcctggcttgattgggtgtcatcggaaaagtgtctactggcacgtgatcggaatggggacaacaccagaggtccactccatatttctcgaaggccataccttccttgttcgaaaccacagacaggcatccttggagatctctcccattacctttctcactgcccaaacgctccttatggacttgggtcagttccttctcttctgccatatcagctcacaccagcatgatggtatggaagcttatgtgaaagtcgacagttgtcctgaggagccacagttgcgcatgaagaataatgaagaagccgaggattacgacgacgatctcaccgattctgagatggacgtggtgaggtttgatgacgacaactctccctccttcattcaaatccggagcgtggcgaagaaacaccccaagacttgggtccactatatagcggcggaagaggaggattgggattacgctcctcttgtattggcaccagatgaccgctcatacaaaagccagtacctcaacaacggaccgcagagaattggccggaagtataagaaagtgcgatttatggcctatacagacgaaacctttaagacaagggaggccatccagcatgagagtgggattttgggacctcttctttacggcgaagttggtgataccctcctcatcatcttcaagaatcaagcttctcgcccctataacatttacccacacgggatcactgacgttaggcctttgtatagcagaagacttcccaaaggcgtgaagcatctcaaagacttccccattttgccaggcgagatctttaagtacaaatggaccgtcacagtggaagatggaccgactaaatcagaccctcgatgccttacgcggtactattcctccttcgtgaatatggagagagatttggcaagcggactcataggaccactcctcatctgttacaaggaatctgtagaccagaggggtaaccagattatgagtgataaacgcaatgtgatcctttttagcgtcttcgacgagaaccggtcctggtacttgaccgagaatatacaaaggttccttcccaaccccgcaggcgttcagttggaagaccctgagtttcaggccagcaatattatgcactcaatcaacggctatgtgtttgatagtctccagctttctgtttgcctccatgaagtagcctattggtacatcttgtcaattggtgctcaaacagacttcctctccgtcttcttctccggctacacctttaagcacaagatggtgtatgaggacactctcacactctttccattttctggagaaaccgtgttcatgagcatggagaatccaggcctttggatcttgggttgccacaacagtgattttcgcaatcggggaatgactgctctcctcaaagtcagcagctgtgataagaacacaggcgactattacgaagattcttacgaggacataagtgcctacttgttgtccaagaataacgccattgagcccagatcattctcccagaatcctcccgtgcttaaaaggcatcagcgcgaaatcaccagaactactcttcagtctgatcaagaggagattgactatgacgacaccataagcgtggaaatgaagaaggaggatttcgatatctatgacgaagatgagaaccagtctccgcggagctttcagaagaagacgcgacactacttcattgcagcagtcgaaaggctttgggactacggtatgtcatcatcccctcatgtgttgcgcaatagagctcagagtggaagtgttccacagttcaagaaagtcgtctttcaagagtttacagatggcagcttcacacagcctctctatcggggcgagcttaacgaacatttgggactccttggtccctatatccgagccgaagtggaggacaacattatggttacctttaggaatcaagcctctcgcccctacagcttctactcctccctcatcagttatgaggaggatcagagacaaggcgctgaaccacggaagaactttgtgaaaccgaatgagacgaagacctacttctggaaagtacagcaccacatggcccccacaaaagacgaattcgattgcaaagcatgggcgtatttttcagacgttgacttggagaaagatgtacattcaggacttattggtcctttgttggtgtgtcacactaacactctcaatccagcccatggcaggcaggtgacagtccaggaattcgctcttttctttaccatctttgatgagaccaagtcctggtacttcacggaaaacatggagcgcaattgcagagccccctgtaacatacagatggaggaccctacctttaaggaaaattatcggttccacgcaatcaacggatacattatggatacactccctggccttgtgatggctcaggaccaacgaatcaggtggtacctcctcagcatgggttctaatgagaacatacactccattcacttttcaggacatgtgttcactgtccggaagaaagaagagtataagatggccctctacaatttgtatccaggcgtgtttgagaccgttgaaatgcttccctctaaagctggcatctggagagtagagtgcttgatcggagaacatcttcacgcaggtatgagcaccttgttcctcgtgtacagcaacaaatgtcagaccccacttggcatggccagtggacacattcgcgactttcagatcacagcatctggccagtatggacaatgggccccaaagttggctcgcctccattactccggtagcataaatgcgtggtccactaaagaacctttcagctggattaaggtcgatcttcttgcccccatgatcatccacggcattaagacacagggagcgaggcagaaattctcctccctctacatctcacagttcattattatgtatagtttggacggcaagaagtggcaaacttatagaggtaacagtactggaacactcatggtgttcttcggcaacgttgatagctctggcatcaaacacaacatctttaatcctcccataatagctcggtacatcagattgcatccgacccactacagcattaggagtacactccgaatggagcttatgggttgcgacttgaattcctgttcaatgccactcggaatggagtctaaagccatctctgatgcacagataaccgccagtagctactttacgaacatgtttgctacgtggtcaccctctaaggcaaggcttcatttgcaaggccggtctaatgcctggagacctcaggtgaacaacccgaaagaatggctccaggtggactttcagaagaccatgaaagtaacaggtgtcactactcagggagttaagtccttgctcaccagcatgtatgtgaaggagttccttatttcctcatcacaagatggccaccagtggaccctcttctttcagaatggtaaggtcaaagtgtttcagggcaatcaagacagcttcacacccgtggtgaacagtcttgatcctccactcttgacacgataccttcgaatccatccacagtcttgggttcaccagattgcattgcgcatggaagtacttggatgcgaggctcaggacctctac

SEQ ID NO: 286 - protein, 1457 aa, synthetic construct
  REGION 1..1457: note = Variant of human B-domain deleted Factor VIII
MQIELSTCFFLCLLRFCFSATRRYYLGAVELSWDYMQSDLGELPVDARFPPRVPKSFPGNTSVVYKKTLFVEFTDHLFNIAKPRPPWMGLLGPTIQAEVYDTVVITLKNMASHPVSLHAVGVSYWKASEGAEYDDQTSQREKEDDKVFPGGSHTYVWQVLKENGPMASDPLCLTYSYLSHVDLVKDLNSGLIGALLVCREGSLAKEKTQTLHKFILLFAVFDEGKSWHSETKNSLMQDRDAASARAWPKMHTVNGYVNRSLPGLIGCHRKSVYWHVIGMGTTPEVHSIFLEGHTFLVRNHRQASLEISPITFLTAQTLLMDLGQFLLFCHISSHQHDGMEAYVKVDSCPEEPQLRMKNNEEAEDYDDDLTDSEMDVVRFDDDNSPSFIQIRSVAKKHPKTWVHYIAAEEEDWDYAPLVLAPDDRSYKSQYLNNGPQRIGRKYKKVRFMAYTDETFKTREAIQHESGILGPLLYGEVGDTLLIIFKNQASRPYNIYPHGITDVRPLYSRRLPKGVKHLKDFPILPGEIFKYKWTVTVEDGPTKSDPRCLTRYYSSFVNMERDLASGLIGPLLICYKESVDQRGNQIMSDKRNVILFSVFDENRSWYLTENIQRFLPNPAGVQLEDPEFQASNIMHSINGYVFDSLQLSVCLHEVAYWYILSIGAQTDFLSVFFSGYTFKHKMVYEDTLTLFPFSGETVFMSMENPGLWILGCHNSDFRNRGMTALLKVSSCDKNTGDYYEDSYEDISAYLLSKNNAIEPRSFSQNPPVLKRHQREITRTTLQSDQEEIDYDDTISVEMKKEDFDIYDEDENQSPRSFQKKTRHYFIAAVERLWDYGMSSSPHVLRNRAQSGSVPQFKKVVFQEFTDGSFTQPLYRGELNEHLGLLGPYIRAEVEDNIMVTFRNQASRPYSFYSSLISYEEDQRQGAEPRKNFVKPNETKTYFWKVQHHMAPTKDEFDCKAWAYFSDVDLEKDVHSGLIGPLLVCHTNTLNPAHGRQVTVQEFALFFTIFDETKSWYFTENMERNCRAPCNIQMEDPTFKENYRFHAINGYIMDTLPGLVMAQDQRIRWYLLSMGSNENIHSIHFSGHVFTVRKKEEYKMALYNLYPGVFETVEMLPSKAGIWRVECLIGEHLHAGMSTLFLVYSNKCQTPLGMASGHIRDFQITASGQYGQWAPKLARLHYSGSINAWSTKEPFSWIKVDLLAPMIIHGIKTQGARQKFSSLYISQFIIMYSLDGKKWQTYRGNSTGTLMVFFGNVDSSGIKHNIFNPPIIARYIRLHPTHYSIRSTLRMELMGCDLNSCSMPLGMESKAISDAQITASSYFTNMFATWSPSKARLHLQGRSNAWRPQVNNPKEWLQVDFQKTMKVTGVTTQGVKSLLTSMYVKEFLISSSQDGHQWTLFFQNGKVKVFQGNQDSFTPVVNSLDPPLLTRYLRIHPQSWVHQIALRMEVLGCEAQDLY

SEQ ID NO: 287 - DNA, 4371 bp, synthetic construct
  misc_feature 1..4371: note = Variant of human B-domain deleted Factor VIII
  source 1..4371: mol_type = other DNA
atgcagattgaactgtctacctgcttcttcctctgtttgctgaggttctgctttagcgccactagacggtactaccttggcgctgtggagctgtcctgggactatatgcagagtgatttgggagagcttcccgtcgacgcacgatttcctcctcgcgttccaaagtcatttcccttcaacacaagcgtggtgtacaagaagacgctcttcgtcgaattcaccgatcacctgttcaatatcgccaaacccagaccaccatggatgggtcttttggggcctaccatacaagcggaggtgtatgacacagttgttatcactctcaagaacatggcttctcatccggtaagtcttcacgcagtgggcgtgtcctactggaaagcttcagaaggagccgagtatgatgatcagacatcccagagggagaaagaagacgacaaggtatttccaggtgggtctcatacctatgtgtggcaagtgctcaaagagaatggccctatggcaagcgatccgatgtgtttgacttacagctacctttcacacgttgacctcgtcaaggacctcaactccgggttgattggagccttgttggtatgcagggaaggatctcttgccaaagagaagacacagaccctccacaagtttatccttctctttgctgtgttcgatgagggcaaaagttggcatagcgaaacgaagaattccctcatgcaggatcgcgacgcagccagcgccagagcttggcccaagatgcacactgtgaacggatatgtcaataggtcacttcctggcttgattgggtgtcatcggaaaagtgtctactggcacgtgatcggaatggggacaacaccagaggtccactccatatttctcgaaggccataccttccttgttcgaaaccacagacaggcatccttggagatctctcccattacctttctcactgcccaaacgctccttatggacttgggtcagttccttctcttctgccatatcagctcacaccagcatgatggtatggaagcttatgtgaaagtcgacagttgtcctgaggagccacagttgcgcatgaagaataatgaagaagccgaggattacgacgacgatctcaccgattctgagatggacgtggtgaggtttgatgacgacaactctccctccttcattcaaatccggagcgtggcgaagaaacaccccaagacttgggtccactatatagcggcggaagaggaggattgggattacgctcctcttgtattggcaccagatgaccgctcatacaaaagccagtacctcaacaacggaccgcagagaattggccggaagtataagaaagtgcgatttatggcctatacagacgaaacctttaagacaagggaggccatccagcatgagagtgggattttgggacctcttctttacggcgaagttggtgataccctcctcatcatcttcaagaatcaagcttctcgcccctataacatttacccacacgggatcactgacgttaggcctttgtatagcagaagacttcccaaaggcgtgaagcatctcaaagacttccccattttgccaggcgagatctttaagtacaaatggaccgtcacagtggaagatggaccgactaaatcagaccctcgatgccttacgcggtactattcctccttcgtgaatatggagagagatttggcaagcggactcataggaccactcctcatctgttacaaggaatctgtagaccagaggggtaaccagattatgagtgataaacgcaatgtgatcctttttagcgtcttcgacgagaaccggtcctggtacttgaccgagaatatacaaaggttccttcccaaccccgcaggcgttcagttggaagaccctgagtttcaggccagcaatattatgcactcaatcaacggctatgtgtttgatagtctccagctttctgtttgcctccatgaagtagcctattggtacatcttgtcaattggtgctcaaacagacttcctctccgtcttcttctccggctacacctttaagcacaagatggtgtatgaggacactctcacactctttccattttctggagaaaccgtgttcatgagcatggagaatccaggcctttggatcttgggttgccacaacagtgattttcgcaatcggggaatgactgctctcctcaaagtcagcagctgtgataagaacacaggcgactattacgaagattcttacgaggacataagtgcctacttgttgtccaagaataacgccattgagcccagatcattctcccagaatcctcccgtgcttaaaaggcatcagcgcgaaatcaccagaactactcttcagtctgatcaagaggagattgactatgacgacaccataagcgtggaaatgaagaaggaggatttcgatatctatgacgaagatgagaaccagtctccgcggagctttcagaagaagacgcgacactacttcattgcagcagtcgaaaggctttgggactacggtatgtcatcatcccctcatgtgttgcgcaatagagctcagagtggaagtgttccacagttcaagaaagtcgtctttcaagagtttacagatggcagcttcacacagcctctctatcggggcgagcttaacgaacatttgggactccttggtccctatatccgagccgaagtggaggacaacattatggttacctttaggaatcaagcctctcgcccctacagcttctactcctccctcatcagttatgaggaggatcagagacaaggcgctgaaccacggaagaactttgtgaaaccgaatgagacgaagacctacttctggaaagtacagcaccacatggcccccacaaaagacgaattcgattgcaaagcatgggcgtatttttcagacgttgacttggagaaagatgtacattcaggacttattggtcctttgttggtgtgtcacactaacactctcaatccagcccatggcaggcaggtgacagtccaggaattcgctcttttctttaccatctttgatgagaccaagtcctggtacttcacggaaaacatggagcgcaattgcagagccccctgtaacatacagatggaggaccctacctttaaggaaaattatcggttccacgcaatcaacggatacattatggatacactccctggccttgtgatggctcaggaccaacgaatcaggtggtacctcctcagcatgggttctaatgagaacatacactccattcacttttcaggacatgtgttcactgtccggaagaaagaagagtataagatggccctctacaatttgtatccaggcgtgtttgagaccgttgaaatgcttccctctaaagctggcatctggagagtagagtgcttgatcggagaacatcttcacgcaggtatgagcaccttgttcctcgtgtacagcaacaaatgtcagaccccacttggcatggccagtggacacattcgcgactttcagatcacagcatctggccagtatggacaatgggccccaaagttggctcgcctccattactccggtagcataaatgcgtggtccactaaagaacctttcagctggattaaggtcgatcttcttgcccccatgatcatccacggcattaagacacagggagcgaggcagaaattctcctccctctacatctcacagttcattattatgtatagtttggacggcaagaagtggcaaacttatagaggtaacagtactggaacactcatggtgttcttcggcaacgttgatagctctggcatcaaacacaacatctttaatcctcccataatagctcggtacatcagattgcatccgacccactacagcattaggagtacactccgaatggagcttatgggttgcgacttgaattcctgttcaatgccactcggaatggagtctaaagccatctctgatgcacagataaccgccagtagctactttacgaacatgtttgctacgtggtcaccctctaaggcaaggcttcatttgcaaggccggtctaatgcctggagacctcaggtgaacaacccgaaagaatggctccaggtggactttcagaagaccatgaaagtaacaggtgtcactactcagggagttaagtccttgctcaccagcatgtatgtgaaggagttccttatttcctcatcacaagatggccaccagtggaccctcttctttcagaatggtaaggtcaaagtgtttcagggcaatcaagacagcttcacacccgtggtgaacagtcttgatcctccactcttgacacgataccttcgaatccatccacagtcttgggttcaccagattgcattgcgcatggaagtacttggatgcgaggctcaggacctctac

SEQ ID NO: 288 - protein, 1457 aa, synthetic construct
  REGION 1..1457: note = Variant of human B-domain deleted Factor VIII
MQIELSTCFFLCLLRFCFSATRRYYLGAVELSWDYMQSDLGELPVDARFPPRVPKSFPFNTSVVYKKTLFVEFTDHLFNIAKPRPPWMGLLGPTIQAEVYDTVVITLKNMASHPVSLHAVGVSYWKASEGAEYDDQTSQREKEDDKVFPGGSHTYVWQVLKENGPMASDPMCLTYSYLSHVDLVKDLNSGLIGALLVCREGSLAKEKTQTLHKFILLFAVFDEGKSWHSETKNSLMQDRDAASARAWPKMHTVNGYVNRSLPGLIGCHRKSVYWHVIGMGTTPEVHSIFLEGHTFLVRNHRQASLEISPITFLTAQTLLMDLGQFLLFCHISSHQHDGMEAYVKVDSCPEEPQLRMKNNEEAEDYDDDLTDSEMDVVRFDDDNSPSFIQIRSVAKKHPKTWVHYIAAEEEDWDYAPLVLAPDDRSYKSQYLNNGPQRIGRKYKKVRFMAYTDETFKTREAIQHESGILGPLLYGEVGDTLLIIFKNQASRPYNIYPHGITDVRPLYSRRLPKGVKHLKDFPILPGEIFKYKWTVTVEDGPTKSDPRCLTRYYSSFVNMERDLASGLIGPLLICYKESVDQRGNQIMSDKRNVILFSVFDENRSWYLTENIQRFLPNPAGVQLEDPEFQASNIMHSINGYVFDSLQLSVCLHEVAYWYILSIGAQTDFLSVFFSGYTFKHKMVYEDTLTLFPFSGETVFMSMENPGLWILGCHNSDFRNRGMTALLKVSSCDKNTGDYYEDSYEDISAYLLSKNNAIEPRSFSQNPPVLKRHQREITRTTLQSDQEEIDYDDTISVEMKKEDFDIYDEDENQSPRSFQKKTRHYFIAAVERLWDYGMSSSPHVLRNRAQSGSVPQFKKVVFQEFTDGSFTQPLYRGELNEHLGLLGPYIRAEVEDNIMVTFRNQASRPYSFYSSLISYEEDQRQGAEPRKNFVKPNETKTYFWKVQHHMAPTKDEFDCKAWAYFSDVDLEKDVHSGLIGPLLVCHTNTLNPAHGRQVTVQEFALFFTIFDETKSWYFTENMERNCRAPCNIQMEDPTFKENYRFHAINGYIMDTLPGLVMAQDQRIRWYLLSMGSNENIHSIHFSGHVFTVRKKEEYKMALYNLYPGVFETVEMLPSKAGIWRVECLIGEHLHAGMSTLFLVYSNKCQTPLGMASGHIRDFQITASGQYGQWAPKLARLHYSGSINAWSTKEPFSWIKVDLLAPMIIHGIKTQGARQKFSSLYISQFIIMYSLDGKKWQTYRGNSTGTLMVFFGNVDSSGIKHNIFNPPIIARYIRLHPTHYSIRSTLRMELMGCDLNSCSMPLGMESKAISDAQITASSYFTNMFATWSPSKARLHLQGRSNAWRPQVNNPKEWLQVDFQKTMKVTGVTTQGVKSLLTSMYVKEFLISSSQDGHQWTLFFQNGKVKVFQGNQDSFTPVVNSLDPPLLTRYLRIHPQSWVHQIALRMEVLGCEAQDLY

SEQ ID NO: 289 - DNA, 4371 bp, synthetic construct
  misc_feature 1..4371: note = Variant of human B-domain deleted Factor VIII
  source 1..4371: mol_type = other DNA
atgcagattgaactgtctacctgcttcttcctctgtttgctgaggttctgctttagcgccactagacggtactaccttggcgctgtggagctgtcctgggactatatgcagagtgatttgggagagcttcccgtcgacgcacgatttcctcctcgcgttccaaagtcatttcccttcaacacaagcgtggtgtacaagaagacgctcttcgtcgaattcaccgatcacctgttcaatatcgccaaacccagaccaccatggatgggtcttttggggcctaccatacaagcggaggtgtatgacacagttgttatcactctcaagaacatggcttctcatccggtaagtcttcacgcagtgggcgtgtcctactggaaagcttcagaaggagccgagtatgatgatcagacatcccagagggagaaagaagacgacaaggtatttccaggtgggtctcatacctatgtgtggcaagtgctcaaagagaatggccctatggcaagcgatccgctctgtttgacttacagctacctttcacacgttgacctcgtcaaggacctcaactccgggttgattggagccttgttggtatgcagggaaggatctcttgccaaagagaagacacagaccctccacaagtttatccttctctttgctgtgttcgatgagggcaaaagttggcatagcgaaacgaagaattccctcatgcaggatcgcgacgcagccagcgccagagcttggcccaagatgcacactgtgaacggatatgtcaataggtcacttcctggcttgattgggtgtcatcggaaaagtgtctactggcacgtgatcggaatggggacaacaccagaggtccactccatatttctcgaaggccataccttccttgttcgaaaccacagacaggcatccttggagatctctcccattacctttctcactgcccaaacgctccttatggacttgggtcagttccttctcttctgccatatcagctcacaccagcatgatggtatggaagcttatgtgaaagtcgacagttgtcctgaggagccacagttgcgcatgaagaataatgaagaagccgaggattacgacgacgatctcaccgattctgagatggacgtggtgaggtttgatgacgacaactctccctccttcattcaaatccggagcgtggcgaagaaacaccccaagacttgggtccactatatagcggcggaagaggaggattgggattacgctcctcttgtattggcaccagatgaccgctcatacaaaagccagtacctcaacaacggaccgcagagaattggccggaagtataagaaagtgcgatttatggcctatacagacgaaacctttaagacaagggaggccatccagcatgagagtgggattttgggacctcttctttacggcgaagttggtgataccctcctcatcatcttcaagaatcaagcttctcgcccctataacatttacccacacgggatcactgacgttaggcctttgtatagcagaagacttcccaaaggcgtgaagcatctcaaagacttccccattttgccaggcgagatctttaagtacaaatggaccgtcacagtggaagatggaccgactaaatcagaccctcgatgccttacgcggtactattcctccttcgtgaatatggagagagatttggcaagcggactcataggaccactcctcatctgttacaaggaatctgtagaccagaggggtaaccagattatgagtgataaacgcaatgtgatcctttttagcgtcttcgacgagaaccggtcctggtacttgaccgagaatatacaaaggttccttcccaaccccgcaggcgttcagttggaagaccctgagtttcaggccagcaatattatgcactcaatcaacggctatgtgtttgatagtctccagctttctgtttgcctccatgaagtagcctattggtacatcttgtcaattggtgctcaaacagacttcctctccgtcttcttctccggctacacctttaagcacaagatggtgtatgaggacactctcacactctttccattttctggagaaaccgtgttcatgagcatggagaatccaggcctttggatcttgggttgccacaacagtgattttcgcaatcggggaatgactgctctcctcaaagtcagcagctgtgataagaacacaggcgactattacgaagattcttacgaggacataagtgcctacttgttgtccaagaataacgccattgagcccagatcattctcccagaatcctcccgtgcttaaaaggcatcagcgcgaaatcaccagaactactcttcagtctgatcaagaggagattgactatgacgaccatataagcgtggaaatgaagaaggaggatttcgatatctatgacgaagatgagaaccagtctccgcggagctttcagaagaagacgcgacactacttcattgcagcagtcgaaaggctttgggactacggtatgtcatcatcccctcatgtgttgcgcaatagagctcagagtggaagtgttccacagttcaagaaagtcgtctttcaagagtttacagatggcagcttcacacagcctctctatcggggcgagcttaacgaacatttgggactccttggtccctatatccgagccgaagtggaggacaacattatggttacctttaggaatcaagcctctcgcccctacagcttctactcctccctcatcagttatgaggaggatcagagacaaggcgctgaaccacggaagaactttgtgaaaccgaatgagacgaagacctacttctggaaagtacagcaccacatggcccccacaaaagacgaattcgattgcaaagcatgggcgtatttttcagacgttgacttggagaaagatgtacattcaggacttattggtcctttgttggtgtgtcacactaacactctcaatccagcccatggcaggcaggtgacagtccaggaattcgctcttttctttaccatctttgatgagaccaagtcctggtacttcacggaaaacatggagcgcaattgcagagccccctgtaacatacagatggaggaccctacctttaaggaaaattatcggttccacgcaatcaacggatacattatggatacactccctggccttgtgatggctcaggaccaacgaatcaggtggtacctcctcagcatgggttctaatgagaacatacactccattcacttttcaggacatgtgttcactgtccggaagaaagaagagtataagatggccctctacaatttgtatccaggcgtgtttgagaccgttgaaatgcttccctctaaagctggcatctggagagtagagtgcttgatcggagaacatcttcacgcaggtatgagcaccttgttcctcgtgtacagcaacaaatgtcagaccccacttggcatggccagtggacacattcgcgactttcagatcacagcatctggccagtatggacaatgggccccaaagttggctcgcctccattactccggtagcataaatgcgtggtccactaaagaacctttcagctggattaaggtcgatcttcttgcccccatgatcatccacggcattaagacacagggagcgaggcagaaattctcctccctctacatctcacagttcattattatgtatagtttggacggcaagaagtggcaaacttatagaggtaacagtactggaacactcatggtgttcttcggcaacgttgatagctctggcatcaaacacaacatctttaatcctcccataatagctcggtacatcagattgcatccgacccactacagcattaggagtacactccgaatggagcttatgggttgcgacttgaattcctgttcaatgccactcggaatggagtctaaagccatctctgatgcacagataaccgccagtagctactttacgaacatgtttgctacgtggtcaccctctaaggcaaggcttcatttgcaaggccggtctaatgcctggagacctcaggtgaacaacccgaaagaatggctccaggtggactttcagaagaccatgaaagtaacaggtgtcactactcagggagttaagtccttgctcaccagcatgtatgtgaaggagttccttatttcctcatcacaagatggccaccagtggaccctcttctttcagaatggtaaggtcaaagtgtttcagggcaatcaagacagcttcacacccgtggtgaacagtcttgatcctccactcttgacacgataccttcgaatccatccacagtcttgggttcaccagattgcattgcgcatggaagtacttggatgcgaggctcaggacctctac

SEQ ID NO: 290 - protein, 1457 aa, synthetic construct
  REGION 1..1457: note = Variant of human B-domain deleted Factor VIII
MQIELSTCFFLCLLRFCFSATRRYYLGAVELSWDYMQSDLGELPVDARFPPRVPKSFPFNTSVVYKKTLFVEFTDHLFNIAKPRPPWMGLLGPTIQAEVYDTVVITLKNMASHPVSLHAVGVSYWKASEGAEYDDQTSQREKEDDKVFPGGSHTYVWQVLKENGPMASDPLCLTYSYLSHVDLVKDLNSGLIGALLVCREGSLAKEKTQTLHKFILLFAVFDEGKSWHSETKNSLMQDRDAASARAWPKMHTVNGYVNRSLPGLIGCHRKSVYWHVIGMGTTPEVHSIFLEGHTFLVRNHRQASLEISPITFLTAQTLLMDLGQFLLFCHISSHQHDGMEAYVKVDSCPEEPQLRMKNNEEAEDYDDDLTDSEMDVVRFDDDNSPSFIQIRSVAKKHPKTWVHYIAAEEEDWDYAPLVLAPDDRSYKSQYLNNGPQRIGRKYKKVRFMAYTDETFKTREAIQHESGILGPLLYGEVGDTLLIIFKNQASRPYNIYPHGITDVRPLYSRRLPKGVKHLKDFPILPGEIFKYKWTVTVEDGPTKSDPRCLTRYYSSFVNMERDLASGLIGPLLICYKESVDQRGNQIMSDKRNVILFSVFDENRSWYLTENIQRFLPNPAGVQLEDPEFQASNIMHSINGYVFDSLQLSVCLHEVAYWYILSIGAQTDFLSVFFSGYTFKHKMVYEDTLTLFPFSGETVFMSMENPGLWILGCHNSDFRNRGMTALLKVSSCDKNTGDYYEDSYEDISAYLLSKNNAIEPRSFSQNPPVLKRHQREITRTTLQSDQEEIDYDDHISVEMKKEDFDIYDEDENQSPRSFQKKTRHYFIAAVERLWDYGMSSSPHVLRNRAQSGSVPQFKKVVFQEFTDGSFTQPLYRGELNEHLGLLGPYIRAEVEDNIMVTFRNQASRPYSFYSSLISYEEDQRQGAEPRKNFVKPNETKTYFWKVQHHMAPTKDEFDCKAWAYFSDVDLEKDVHSGLIGPLLVCHTNTLNPAHGRQVTVQEFALFFTIFDETKSWYFTENMERNCRAPCNIQMEDPTFKENYRFHAINGYIMDTLPGLVMAQDQRIRWYLLSMGSNENIHSIHFSGHVFTVRKKEEYKMALYNLYPGVFETVEMLPSKAGIWRVECLIGEHLHAGMSTLFLVYSNKCQTPLGMASGHIRDFQITASGQYGQWAPKLARLHYSGSINAWSTKEPFSWIKVDLLAPMIIHGIKTQGARQKFSSLYISQFIIMYSLDGKKWQTYRGNSTGTLMVFFGNVDSSGIKHNIFNPPIIARYIRLHPTHYSIRSTLRMELMGCDLNSCSMPLGMESKAISDAQITASSYFTNMFATWSPSKARLHLQGRSNAWRPQVNNPKEWLQVDFQKTMKVTGVTTQGVKSLLTSMYVKEFLISSSQDGHQWTLFFQNGKVKVFQGNQDSFTPVVNSLDPPLLTRYLRIHPQSWVHQIALRMEVLGCEAQDLY

SEQ ID NO: 291 - DNA, 4371 bp, synthetic construct
  misc_feature 1..4371: note = Variant of human B-domain deleted Factor VIII
  source 1..4371: mol_type = other DNA
atgcagattgaactgtctacctgcttcttcctctgtttgctgaggttctgctttagcgccactagacggtactaccttggcgctgtggagctgtcctgggactatatgcagagtgatttgggagagcttcccgtcgacgcacgatttcctcctcgcgttccaaagtcatttcccttcaacacaagcgtggtgtacaagaagacgctcttcgtcgaattcaccgatcacctgttcaatatcgccaaacccagaccaccatggatgggtcttttggggcctaccatacaagcggaggtgtatgacacagttgttatcactctcaagaacatggcttctcatccggtaagtcttcacgcagtgggcgtgtcctactggaaagcttcagaaggagccgagtatgatgatcagacatcccagagggagaaagaagacgacaaggtatttccaggtgggtctcatacctatgtgtggcaagtgctcaaagagaatggccctatggcaagcgatccgctctgtttgacttacagctacctttcacacgttgacctcgtcaaggacctcaactccgggttgattggagccttgttggtatgcagggaaggatctcttgccaaagagaagacacagaccctccacaagtttatccttctctttgctgtgttcgatgagggcaaaagttggcatagcgaaacgaagaattccctcatgcaggatcgcgacgcagccagcgccagagcttggcccaagatgcacactgtgaacggatatgtcaataggtcacttcctggcttgattgggtgtcatcggaaaagtgtctactggcacgtgatcggaatggggacaacaccagaggtccactccatatttctcgaaggccataccttccttgttcgaaaccacagacaggcatccttggagatctctcccattacctttctcactgcccaaacgctccttatggacttgggtcagttccttctcttctgccatatcagctcacaccagcatgatggtatggaagcttatgtgaaagtcgacagttgtcctgaggagccacagttgcgcatgaagaataatgaagaagccgaggattacgacgacgatctcaccgattctgagatggacgtggtgaggtttgatgacgacaactctccctccttcattcaaatccggagcgtggcgaagaaacaccccaagacttgggtccactatatagcggcggaagaggaggattgggattacgctcctcttgtattggcaccagatgaccgctcatacaaaagccagtacctcaacaacggaccgcagagaattggccggaagtataagaaagtgcgatttatggcctatacagacgaaacctttaagacaagggaggccatccagcatgagagtgggattttgggacctcttctttacggcgaagttggtgataccctcctcatcatcttcaagaatcaagcttctcgcccctataacatttacccacacgggatcactgacgttaggcctttgtatagcagaagacttcccaaaggcgtgaagcatctcaaagacttccccattttgccaggcgagatctttaagtacaaatggaccgtcacagtggaagatggaccgactaaatcagaccctcgatgccttacgcggtactattcctccttcgtgaatatggagagagatttggcaagcggactcataggaccactcctcatctgttacaaggaatctgtagaccagaggggtaaccagattatgagtgataaacgcaatgtgatcctttttagcgtcttcgacgagaaccggtcctggtacttgaccgagaatatacaaaggttccttcccaaccccgcaggcgttcagttggaagaccctgagtttcaggccagcaatattatgcactcaatcaacggctatgtgtttgatagtctccagctttctgtttgcctccatgaagtagcctattggtacatcttgtcaattggtgctcaaacagacttcctctccgtcttcttctccggctacacctttaagcacaagatggtgtatgaggacactctcacactctttccattttctggagaaaccgtgttcatgagcatggagaatccaggcctttggatcttgggttgccacaacagtgattttcgcaatcggggaatgactgctctcctcaaagtcagcagctgtgataagaacacaggcgactattacgaagattcttacgaggacataagtgcctacttgttgtccaagaataacgccattgagcccagatcattctcccagaatcctcccgtgcttaaaaggcatcagcgcgaaatcaccagaactactcttcagtctgatcaagaggagattgactatgacgacaccataagcgtggaaatgaagaaggaggatttcgatatctatgacgaagatgagaaccagtctccgcggagctttcagaagaagacgcgacactacttcattgcagcagtcgaaaggctttgggactacggtatgtcatcatcccctcatgtgttgcgcaatagagctcagagtggaagtgttccacagttcaagaaagtcgtctttcaagagtttacagatggcagcttcacacagcctctctatcggggcgagcttaacgaacatttgggactccttggtccctatatccgagccgaagtggaggacaacattatggttacctttaggaatcaagcctctcgcccctacagcttctactcctccctcatcagttatgaggaggatcagagacaaggcgctgaaccacggaagaactttgtgaaaccgaatgagacgaagacctacttctggaaagtacagcaccacatggcccccacaaaagacgaattcgattgcaaagcatgggcgtatttttcagacgttgacttggagaaagatgtacattcaggacttattggtcctttgttggtgtgtcacactaacactctcaatccagcccatggcaggcaggtgacagtccaggaattcgctcttttctttaccatctttgatgagaccaagtcctggtacttcacggaaaacatggagcgcaattgcagagccccctgtaacatacagatggaggaccctacctttaaggaaaattatcggttccacgcaatcaacggatacattatggatacactccctggccttgtgatggctcaggaccaacgaatcaggtggtacctcctcagcatgggttctaatgagaacatacactccattcacttttcaggacatgtgttcactgtccggaagaaagaagagtataagatggccctctacaatttgtatccaggcgtgtttgagaccgttgaaatgcttccctctaaagctggcatctggagagtagagtgcttgatcggagaacatcttcacgcaggtatgagcaccttgttcctcgtgtacagcaacaaatgtcagaccccacttggcatggccagtggacacattcgcgactttcagatcacagcatctggccagtatggacaatgggccccaaagttggctcgcctccattactccggtagcataaatgcgtggtccactaaagaacctttcagctggattaaggtcgatcttcttgcccccatgatcatccacggcattaagacacagggagcgaggcagaaattctcctccctctacatctcacagttcattattatgtatagtttggacggcaagaagtggcaaacttatagaggtaacagtactggaacagatatggtgttcttcggcaacgttgatagctctggcatcaaacacaacatctttaatcctcccataatagctcggtacatcagattgcatccgacccactacagcattaggagtacactccgaatggagcttatgggttgcgacttgaattcctgttcaatgccactcggaatggagtctaaagccatctctgatgcacagataaccgccagtagctactttacgaacatgtttgctacgtggtcaccctctaaggcaaggcttcatttgcaaggccggtctaatgcctggagacctcaggtgaacaacccgaaagaatggctccaggtggactttcagaagaccatgaaagtaacaggtgtcactactcagggagttaagtccttgctcaccagcatgtatgtgaaggagttccttatttcctcatcacaagatggccaccagtggaccctcttctttcagaatggtaaggtcaaagtgtttcagggcaatcaagacagcttcacacccgtggtgaacagtcttgatcctccactcttgacacgataccttcgaatccatccacagtcttgggttcaccagattgcattgcgcatggaagtacttggatgcgaggctcaggacctctac

SEQ ID NO: 292 - protein, 1457 aa, synthetic construct
  REGION 1..1457: note = Variant of human B-domain deleted Factor VIII
MQIELSTCFFLCLLRFCFSATRRYYLGAVELSWDYMQSDLGELPVDARFPPRVPKSFPFNTSVVYKKTLFVEFTDHLFNIAKPRPPWMGLLGPTIQAEVYDTVVITLKNMASHPVSLHAVGVSYWKASEGAEYDDQTSQREKEDDKVFPGGSHTYVWQVLKENGPMASDPLCLTYSYLSHVDLVKDLNSGLIGALLVCREGSLAKEKTQTLHKFILLFAVFDEGKSWHSETKNSLMQDRDAASARAWPKMHTVNGYVNRSLPGLIGCHRKSVYWHVIGMGTTPEVHSIFLEGHTFLVRNHRQASLEISPITFLTAQTLLMDLGQFLLFCHISSHQHDGMEAYVKVDSCPEEPQLRMKNNEEAEDYDDDLTDSEMDVVRFDDDNSPSFIQIRSVAKKHPKTWVHYIAAEEEDWDYAPLVLAPDDRSYKSQYLNNGPQRIGRKYKKVRFMAYTDETFKTREAIQHESGILGPLLYGEVGDTLLIIFKNQASRPYNIYPHGITDVRPLYSRRLPKGVKHLKDFPILPGEIFKYKWTVTVEDGPTKSDPRCLTRYYSSFVNMERDLASGLIGPLLICYKESVDQRGNQIMSDKRNVILFSVFDENRSWYLTENIQRFLPNPAGVQLEDPEFQASNIMHSINGYVFDSLQLSVCLHEVAYWYILSIGAQTDFLSVFFSGYTFKHKMVYEDTLTLFPFSGETVFMSMENPGLWILGCHNSDFRNRGMTALLKVSSCDKNTGDYYEDSYEDISAYLLSKNNAIEPRSFSQNPPVLKRHQREITRTTLQSDQEEIDYDDTISVEMKKEDFDIYDEDENQSPRSFQKKTRHYFIAAVERLWDYGMSSSPHVLRNRAQSGSVPQFKKVVFQEFTDGSFTQPLYRGELNEHLGLLGPYIRAEVEDNIMVTFRNQASRPYSFYSSLISYEEDQRQGAEPRKNFVKPNETKTYFWKVQHHMAPTKDEFDCKAWAYFSDVDLEKDVHSGLIGPLLVCHTNTLNPAHGRQVTVQEFALFFTIFDETKSWYFTENMERNCRAPCNIQMEDPTFKENYRFHAINGYIMDTLPGLVMAQDQRIRWYLLSMGSNENIHSIHFSGHVFTVRKKEEYKMALYNLYPGVFETVEMLPSKAGIWRVECLIGEHLHAGMSTLFLVYSNKCQTPLGMASGHIRDFQITASGQYGQWAPKLARLHYSGSINAWSTKEPFSWIKVDLLAPMIIHGIKTQGARQKFSSLYISQFIIMYSLDGKKWQTYRGNSTGTDMVFFGNVDSSGIKHNIFNPPIIARYIRLHPTHYSIRSTLRMELMGCDLNSCSMPLGMESKAISDAQITASSYFTNMFATWSPSKARLHLQGRSNAWRPQVNNPKEWLQVDFQKTMKVTGVTTQGVKSLLTSMYVKEFLISSSQDGHQWTLFFQNGKVKVFQGNQDSFTPVVNSLDPPLLTRYLRIHPQSWVHQIALRMEVLGCEAQDLY

SEQ ID NO: 293 - DNA, 4371 bp, synthetic construct
  misc_feature 1..4371: note = Variant of human B-domain deleted Factor VIII
  source 1..4371: mol_type = other DNA
atgcagattgaactgtctacctgcttcttcctctgtttgctgaggttctgctttagcgccactagacggtactaccttggcgctgtggagctgtcctgggactatatgcagagtgatttgggagagcttcccgtcgacgcacgatttcctcctcgcgttccaaagtcatttcccttcaacacaagcgtggtgtacaagaagacgctcttcgtcgaattcaccgatcacctgttcaatatcgccaaacccagaccaccatggatgggtcttttggggcctaccatacaagcggaggtgtatgacacagttgttatcactctcaagaacatggcttctcatccggtaagtcttcacgcagtgggcgtgtcctactggaaagcttcagaaggagccgagtatgatgatcagacatcccagagggagaaagaagacgacaaggtatttccaggtgggtctcatacctatgtgtggcaagtgctcaaagagaatggccctatggcaagcgatccgctctgtttgacttacagctacctttcacacgttgacctcgtcaaggacctcaactccgggttgattggagccttgttggtatgcagggaaggatctcttgccaaagagaagacacagaccctccacaagtttatccttctctttgctgtgttcgatgagggcaaaagttggcatagcgaaacgaagaattccctcatgcaggatcgcgacgcagccagcgccagagcttggcccaagatgcacactgtgaacggatatgtcaataggtcacttcctggcttgattgggtgtcatcggaaaagtgtctactggcacgtgatcggaatggggacaacaccagaggtccactccatatttctcgaaggccataccttccttgttcgaaaccacagacaggcatccttgtctatctctcccattacctttctcactgcccaaacgctccttatggacttgggtcagttccttctcttctgccatatcagctcacaccagcatgatggtatggaagcttatgtgaaagtcgacagttgtcctgaggagccacagttgcgcatgaagaataatgaagaagccgaggattacgacgacgatctcaccgattctgagatggacgtggtgaggtttgatgacgacaactctccctccttcattcaaatccggagcgtggcgaagaaacaccccaagacttgggtccactatatagcggcggaagaggaggattgggattacgctcctcttgtattggcaccagatgaccgctcatacaaaagccagtacctcaacaacggaccgcagagaattggccggaagtataagaaagtgcgatttatggcctatacagacgaaacctttaagacaagggaggccatccagcatgagagtgggattttgggacctcttctttacggcgaagttggtgataccctcctcatcatcttcaagaatcaagcttctcgcccctataacatttacccacacgggatcactgacgttaggcctttgtatagcagaagacttcccaaaggcgtgaagcatctcaaagacttccccattttgccaggcgagatctttaagtacaaatggaccgtcacagtggaagatggaccgactaaatcagaccctcgatgccttacgcggtactattcctccttcgtgaatatggagagagatttggcaagcggactcataggaccactcctcatctgttacaaggaatctgtagaccagaggggtaaccagattatgagtgataaacgcaatgtgatcctttttagcgtcttcgacgagaaccggtcctggtacttgaccgagaatatacaaaggttccttcccaaccccgcaggcgttcagttggaagaccctgagtttcaggccagcaatattatgcactcaatcaacggctatgtgtttgatagtctccagctttctgtttgcctccatgaagtagcctattggtacatcttgtcaattggtgctcaaacagacttcctctccgtcttcttctccggctacacctttaagcacaagatggtgtatgaggacactctcacactctttccattttctggagaaaccgtgttcatgagcatggagaatccaggcctttggatcttgggttgccacaacagtgattttcgcaatcggggaatgactgctctcctcaaagtcagcagctgtgataagaacacaggcgactattacgaagattcttacgaggacataagtgcctacttgttgtccaagaataacgccattgagcccagatcattctcccagaatcctcccgtgcttaaaaggcatcagcgcgaaatcaccagaactactcttcagtctgatcaagaggagattgactatgacgacaccataagcgtggaaatgaagaaggaggatttcgatatctatgacgaagatgagaaccagtctccgcggagctttcagaagaagacgcgacactacttcattgcagcagtcgaaaggctttgggactacggtatgtcatcatcccctcatgtgttgcgcaatagagctcagagtggaagtgttccacagttcaagaaagtcgtctttcaagagtttacagatggcagcttcacacagcctctctatcggggcgagcttaacgaacatttgggactccttggtccctatatccgagccgaagtggaggacaacattatggttacctttaggaatcaagcctctcgcccctacagcttctactcctccctcatcagttatgaggaggatcagagacaaggcgctgaaccacggaagaactttgtgaaaccgaatgagacgaagacctacttctggaaagtacagcaccacatggcccccacaaaagacgaattcgattgcaaagcatgggcgtatttttcagacgttgacttggagaaagatgtacattcaggacttattggtcctttgttggtgtgtcacactaacactctcaatccagcccatggcaggcaggtgacagtccaggaattcgctcttttctttaccatctttgatgagaccaagtcctggtacttcacggaaaacatggagcgcaattgcagagccccctgtaacatacagatggaggaccctacctttaaggaaaattatcggttccacgcaatcaacggatacattatggatacactccctggccttgtgatggctcaggaccaacgaatcaggtggtacctcctcagcatgggttctaatgagaacatacactccattcacttttcaggacatgtgttcactgtccggaagaaagaagagtataagatggccctctacaatttgtatccaggcgtgtttgagaccgttgaaatgcttccctctaaagctggcatctggagagtagagtgcttgatcggagaacatcttcacgcaggtatgagcaccttgttcctcgtgtacagcaacaaatgtcagaccccacttggcatggccagtggacacattcgcgactttcagatcacagcatctggccagtatggacaatgggccccaaagttggctcgcctccattactccggtagcataaatgcgtggtccactaaagaacctttcagctggattaaggtcgatcttcttgcccccatgatcatccacggcattaagacacagggagcgaggcagaaattctcctccctctacatctcacagttcattattatgtatagtttggacggcaagaagtggcaaacttatagaggtaacagtactggaacactcatggtgttcttcggcaacgttgatagctctggcatcaaacacaacatctttaatcctcccataatagctcggtacatcagattgcatccgacccactacagcattaggagtacactccgaatggagcttatgggttgcgacttgaattcctgttcaatgccactcggaatggagtctaaagccatctctgatgcacagataaccgccagtagctactttacgaacatgtttgctacgtggtcaccctctaaggcaaggcttcatttgcaaggccggtctaatgcctggagacctcaggtgaacaacccgaaagaatggctccaggtggactttcagaagaccatgaaagtaacaggtgtcactactcagggagttaagtccttgctcaccagcatgtatgtgaaggagttccttatttcctcatcacaagatggccaccagtggaccctcttctttcagaatggtaaggtcaaagtgtttcagggcaatcaagacagcttcacacccgtggtgaacagtcttgatcctccactcttgacacgataccttcgaatccatccacagtcttgggttcaccagattgcattgcgcatggaagtacttggatgcgaggctcaggacctctac

SEQ ID NO: 294 - protein, 1457 aa, synthetic construct
  REGION 1..1457: note = Variant of human B-domain deleted Factor VIII
MQIELSTCFFLCLLRFCFSATRRYYLGAVELSWDYMQSDLGELPVDARFPPRVPKSFPFNTSVVYKKTLFVEFTDHLFNIAKPRPPWMGLLGPTIQAEVYDTVVITLKNMASHPVSLHAVGVSYWKASEGAEYDDQTSQREKEDDKVFPGGSHTYVWQVLKENGPMASDPLCLTYSYLSHVDLVKDLNSGLIGALLVCREGSLAKEKTQTLHKFILLFAVFDEGKSWHSETKNSLMQDRDAASARAWPKMHTVNGYVNRSLPGLIGCHRKSVYWHVIGMGTTPEVHSIFLEGHTFLVRNHRQASLSISPITFLTAQTLLMDLGQFLLFCHISSHQHDGMEAYVKVDSCPEEPQLRMKNNEEAEDYDDDLTDSEMDVVRFDDDNSPSFIQIRSVAKKHPKTWVHYIAAEEEDWDYAPLVLAPDDRSYKSQYLNNGPQRIGRKYKKVRFMAYTDETFKTREAIQHESGILGPLLYGEVGDTLLIIFKNQASRPYNIYPHGITDVRPLYSRRLPKGVKHLKDFPILPGEIFKYKWTVTVEDGPTKSDPRCLTRYYSSFVNMERDLASGLIGPLLICYKESVDQRGNQIMSDKRNVILFSVFDENRSWYLTENIQRFLPNPAGVQLEDPEFQASNIMHSINGYVFDSLQLSVCLHEVAYWYILSIGAQTDFLSVFFSGYTFKHKMVYEDTLTLFPFSGETVFMSMENPGLWILGCHNSDFRNRGMTALLKVSSCDKNTGDYYEDSYEDISAYLLSKNNAIEPRSFSQNPPVLKRHQREITRTTLQSDQEEIDYDDTISVEMKKEDFDIYDEDENQSPRSFQKKTRHYFIAAVERLWDYGMSSSPHVLRNRAQSGSVPQFKKVVFQEFTDGSFTQPLYRGELNEHLGLLGPYIRAEVEDNIMVTFRNQASRPYSFYSSLISYEEDQRQGAEPRKNFVKPNETKTYFWKVQHHMAPTKDEFDCKAWAYFSDVDLEKDVHSGLIGPLLVCHTNTLNPAHGRQVTVQEFALFFTIFDETKSWYFTENMERNCRAPCNIQMEDPTFKENYRFHAINGYIMDTLPGLVMAQDQRIRWYLLSMGSNENIHSIHFSGHVFTVRKKEEYKMALYNLYPGVFETVEMLPSKAGIWRVECLIGEHLHAGMSTLFLVYSNKCQTPLGMASGHIRDFQITASGQYGQWAPKLARLHYSGSINAWSTKEPFSWIKVDLLAPMIIHGIKTQGARQKFSSLYISQFIIMYSLDGKKWQTYRGNSTGTLMVFFGNVDSSGIKHNIFNPPIIARYIRLHPTHYSIRSTLRMELMGCDLNSCSMPLGMESKAISDAQITASSYFTNMFATWSPSKARLHLQGRSNAWRPQVNNPKEWLQVDFQKTMKVTGVTTQGVKSLLTSMYVKEFLISSSQDGHQWTLFFQNGKVKVFQGNQDSFTPVVNSLDPPLLTRYLRIHPQSWVHQIALRMEVLGCEAQDLY

SEQ ID NO: 295 - DNA, 4371 bp, synthetic construct
  misc_feature 1..4371: note = Variant of human B-domain deleted Factor VIII
  source 1..4371: mol_type = other DNA
atgcagattgaactgtctacctgcttcttcctctgtttgctgaggttctgctttagcgccactagacggtactaccttggcgctgtggagctgtcctgggactatatgcagagtgatttgggagagcttcccgtcgacgcacgatttcctcctcgcgttccaaagtcatttcccttcaacacaagcgtggtgtacaagaagacgctcttcgtcgaattcaccgatcacctgttcaatatcgccaaacccagaccaccatggatgggtcttttggggcctaccatacaagcggaggtgtatgacacagttgttatcactctcaagaacatggcttctcatccggtaagtcttcacgcagtgggcgtgtcctactggaaagcttcagaaggagccgagtatgatgatcagacatcccagagggagaaagaagacgacaaggtatttccaggtgggtctcatacctatgtgtggcaagtgctcaaagagaatggccctatggcaagcgatccgctctgtttgacttacagctacctttcacacgttgacctcgtcaaggacctcaactccgggttgattggagccttgttggtatgcagggaaggatctcttgccaaagagaagacacagaccctccacaagtttatccttctctttgctgtgttcgatgagggcaaaagttggcatagcgaaacgaagaattccctcatgcaggatcgcgacgcagccagcgccagagcttggcccaagatgcacactgtgaacggatatgtcaataggtcacttcctggcttgattgggtgtcatcggaaaagtgtctactggcacgtgatcggaatggggacaacaccagaggtccactccatatttctcgaaggccataccttccttgttcgaaaccacagacaggcatccttggagatctctcccattacctttctcactgcccaaacgctccttatggacttgggtcagttccttctcttctgccatatcagctcacaccagcatgatggtatggaagcttatgtgaaagtcgacagttgtcctgaggagccacagttgcgcatgaagaataatgaagaagccgaggattacgacgacgatctcaccgattctgagatggacgtggtgaggtttgatgacgacaactctccctccttcattcaaatccggagcgtggcgaagaaacaccccaagacttgggtccactatatagcggcggaagaggaggattgggattacgctcctcttgtattggcaccagatgaccgctcatacaaaagccagtacctcaacaacggaccgcagagaattggccggaagtataagaaagtgcgatttatggcctatacagacgaaacctttaagacaagggaggccatccagcatgagagtgggattttgggacctcttctttacggcgaagttggtgataccctcctcatcatcttcaagaatcaagcttctcgcccctataacatttacccacacgggatcactgacgttaggcctttgtatagcagaagacttcccaaaggcgtgaagcatctcaaagacttccccattttgccaggcgagatctttaagtacaaatggaccgtcacagtggaagatggaccgactaaatcagaccctcgatgccttacgcggtactattcctccttcgtgaatatggagagagatttggcaagcggactcataggaccactcctcatctgttacaaggaatctgtagaccagaggggtaaccagattatgagtgataaacgcaatgtgatcctttttagcgtcttcgacgagaaccggtcctggtacttgaccgagaatatacaaaggttccttcccaaccccgcaggcgttcagttggaagaccctgagtttcaggccagcaatattatgcactcaatcaacggctatgtgtttgatagtctccagctttctgtttgcctccatgaagtagcctattggtacatcttgtcaattggtgctcaaacagacttcctctccgtcttcttctccggctacacctttaagcacaagatggtgtatgaggacactctcacactctttccattttctggagaaaccgtgttcatgagcatggagaatccaggcatgtggatcttgggttgccacaacagtgattttcgcaatcggggaatgactgctctcctcaaagtcagcagctgtgataagaacacaggcgactattacgaagattcttacgaggacataagtgcctacttgttgtccaagaataacgccattgagcccagatcattctcccagaatcctcccgtgcttaaaaggcatcagcgcgaaatcaccagaactactcttcagtctgatcaagaggagattgactatgacgacaccataagcgtggaaatgaagaaggaggatttcgatatctatgacgaagatgagaaccagtctccgcggagctttcagaagaagacgcgacactacttcattgcagcagtcgaaaggctttgggactacggtatgtcatcatcccctcatgtgttgcgcaatagagctcagagtggaagtgttccacagttcaagaaagtcgtctttcaagagtttacagatggcagcttcacacagcctctctatcggggcgagcttaacgaacatttgggactccttggtccctatatccgagccgaagtggaggacaacattatggttacctttaggaatcaagcctctcgcccctacagcttctactcctccctcatcagttatgaggaggatcagagacaaggcgctgaaccacggaagaactttgtgaaaccgaatgagacgaagacctacttctggaaagtacagcaccacatggcccccacaaaagacgaattcgattgcaaagcatgggcgtatttttcagacgttgacttggagaaagatgtacattcaggacttattggtcctttgttggtgtgtcacactaacactctcaatccagcccatggcaggcaggtgacagtccaggaattcgctcttttctttaccatctttgatgagaccaagtcctggtacttcacggaaaacatggagcgcaattgcagagccccctgtaacatacagatggaggaccctacctttaaggaaaattatcggttccacgcaatcaacggatacattatggatacactccctggccttgtgatggctcaggaccaacgaatcaggtggtacctcctcagcatgggttctaatgagaacatacactccattcacttttcaggacatgtgttcactgtccggaagaaagaagagtataagatggccctctacaatttgtatccaggcgtgtttgagaccgttgaaatgcttccctctaaagctggcatctggagagtagagtgcttgatcggagaacatcttcacgcaggtatgagcaccttgttcctcgtgtacagcaacaaatgtcagaccccacttggcatggccagtggacacattcgcgactttcagatcacagcatctggccagtatggacaatgggccccaaagttggctcgcctccattactccggtagcataaatgcgtggtccactaaagaacctttcagctggattaaggtcgatcttcttgcccccatgatcatccacggcattaagacacagggagcgaggcagaaattctcctccctctacatctcacagttcattattatgtatagtttggacggcaagaagtggcaaacttatagaggtaacagtactggaacactcatggtgttcttcggcaacgttgatagctctggcatcaaacacaacatctttaatcctcccataatagctcggtacatcagattgcatccgacccactacagcattaggagtacactccgaatggagcttatgggttgcgacttgaattcctgttcaatgccactcggaatggagtctaaagccatctctgatgcacagataaccgccagtagctactttacgaacatgtttgctacgtggtcaccctctaaggcaaggcttcatttgcaaggccggtctaatgcctggagacctcaggtgaacaacccgaaagaatggctccaggtggactttcagaagaccatgaaagtaacaggtgtcactactcagggagttaagtccttgctcaccagcatgtatgtgaaggagttccttatttcctcatcacaagatggccaccagtggaccctcttctttcagaatggtaaggtcaaagtgtttcagggcaatcaagacagcttcacacccgtggtgaacagtcttgatcctccactcttgacacgataccttcgaatccatccacagtcttgggttcaccagattgcattgcgcatggaagtacttggatgcgaggctcaggacctctac

SEQ ID NO: 296 - protein, 1457 aa, synthetic construct
  REGION 1..1457: note = Variant of human B-domain deleted Factor VIII
MQIELSTCFFLCLLRFCFSATRRYYLGAVELSWDYMQSDLGELPVDARFPPRVPKSFPFNTSVVYKKTLFVEFTDHLFNIAKPRPPWMGLLGPTIQAEVYDTVVITLKNMASHPVSLHAVGVSYWKASEGAEYDDQTSQREKEDDKVFPGGSHTYVWQVLKENGPMASDPLCLTYSYLSHVDLVKDLNSGLIGALLVCREGSLAKEKTQTLHKFILLFAVFDEGKSWHSETKNSLMQDRDAASARAWPKMHTVNGYVNRSLPGLIGCHRKSVYWHVIGMGTTPEVHSIFLEGHTFLVRNHRQASLEISPITFLTAQTLLMDLGQFLLFCHISSHQHDGMEAYVKVDSCPEEPQLRMKNNEEAEDYDDDLTDSEMDVVRFDDDNSPSFIQIRSVAKKHPKTWVHYIAAEEEDWDYAPLVLAPDDRSYKSQYLNNGPQRIGRKYKKVRFMAYTDETFKTREAIQHESGILGPLLYGEVGDTLLIIFKNQASRPYNIYPHGITDVRPLYSRRLPKGVKHLKDFPILPGEIFKYKWTVTVEDGPTKSDPRCLTRYYSSFVNMERDLASGLIGPLLICYKESVDQRGNQIMSDKRNVILFSVFDENRSWYLTENIQRFLPNPAGVQLEDPEFQASNIMHSINGYVFDSLQLSVCLHEVAYWYILSIGAQTDFLSVFFSGYTFKHKMVYEDTLTLFPFSGETVFMSMENPGMWILGCHNSDFRNRGMTALLKVSSCDKNTGDYYEDSYEDISAYLLSKNNAIEPRSFSQNPPVLKRHQREITRTTLQSDQEEIDYDDTISVEMKKEDFDIYDEDENQSPRSFQKKTRHYFIAAVERLWDYGMSSSPHVLRNRAQSGSVPQFKKVVFQEFTDGSFTQPLYRGELNEHLGLLGPYIRAEVEDNIMVTFRNQASRPYSFYSSLISYEEDQRQGAEPRKNFVKPNETKTYFWKVQHHMAPTKDEFDCKAWAYFSDVDLEKDVHSGLIGPLLVCHTNTLNPAHGRQVTVQEFALFFTIFDETKSWYFTENMERNCRAPCNIQMEDPTFKENYRFHAINGYIMDTLPGLVMAQDQRIRWYLLSMGSNENIHSIHFSGHVFTVRKKEEYKMALYNLYPGVFETVEMLPSKAGIWRVECLIGEHLHAGMSTLFLVYSNKCQTPLGMASGHIRDFQITASGQYGQWAPKLARLHYSGSINAWSTKEPFSWIKVDLLAPMIIHGIKTQGARQKFSSLYISQFIIMYSLDGKKWQTYRGNSTGTLMVFFGNVDSSGIKHNIFNPPIIARYIRLHPTHYSIRSTLRMELMGCDLNSCSMPLGMESKAISDAQITASSYFTNMFATWSPSKARLHLQGRSNAWRPQVNNPKEWLQVDFQKTMKVTGVTTQGVKSLLTSMYVKEFLISSSQDGHQWTLFFQNGKVKVFQGNQDSFTPVVNSLDPPLLTRYLRIHPQSWVHQIALRMEVLGCEAQDLY

SEQ ID NO: 297 - DNA, 4371 bp, synthetic construct
  misc_feature 1..4371: note = Variant of human B-domain deleted Factor VIII
  source 1..4371: mol_type = other DNA
atgcagattgaactgtctacctgcttcttcctctgtttgctgaggttctgctttagcgccactagacggtactaccttggcgctgtggagctgtcctgggactatatgcagagtgatttgggagagcttcccgtcgacgcacgatttcctcctcgcgttccaaagtcatttcccttcaacacaagcgtggtgtacaagaagacgctcttcgtcgaattcaccgatcacctgttcaatatcgccaaacccagaccaccatggatgggtcttttggggcctaccatacaagcggaggtgtatgacacagttgttatcactctcaagaacatggcttctcatccggtaagtcttcacgcagtgggcgtgtcctactggaaagcttcagaaggagccgagtatgatgatcagacatcccagagggagaaagaagacgacaaggtatttccaggtgggtctcatacctatgtgtggcaagtgctcaaagagaatggccctatggcaagcgatccgcattgtttgacttacagctacctttcacacgttgacctcgtcaaggacctcaactccgggttgattggagccttgttggtatgcagggaaggatctcttgccaaagagaagacacagaccctccacaagtttatccttctctttgctgtgttcgatgagggcaaaagttggcatagcgaaacgaagaattccctcatgcaggatcgcgacgcagccagcgccagagcttggcccaagatgcacactgtgaacggatatgtcaataggtcacttcctggcttgattgggtgtcatcggaaaagtgtctactggcacgtgatcggaatggggacaacaccagaggtccactccatatttctcgaaggccataccttccttgttcgaaaccacagacaggcatccttggagatctctcccattacctttctcactgcccaaacgctccttatggacttgggtcagttccttctcttctgccatatcagctcacaccagcatgatggtatggaagcttatgtgaaagtcgacagttgtcctgaggagccacagttgcgcatgaagaataatgaagaagccgaggattacgacgacgatctcaccgattctgagatggacgtggtgaggtttgatgacgacaactctccctccttcattcaaatccggagcgtggcgaagaaacaccccaagacttgggtccactatatagcggcggaagaggaggattgggattacgctcctcttgtattggcaccagatgaccgctcatacaaaagccagtacctcaacaacggaccgcagagaattggccggaagtataagaaagtgcgatttatggcctatacagacgaaacctttaagacaagggaggccatccagcatgagagtgggattttgggacctcttctttacggcgaagttggtgataccctcctcatcatcttcaagaatcaagcttctcgcccctataacatttacccacacgggatcactgacgttaggcctttgtatagcagaagacttcccaaaggcgtgaagcatctcaaagacttccccattttgccaggcgagatctttaagtacaaatggaccgtcacagtggaagatggaccgactaaatcagaccctcgatgccttacgcggtactattcctccttcgtgaatatggagagagatttggcaagcggactcataggaccactcctcatctgttacaaggaatctgtagaccagaggggtaaccagattatgagtgataaacgcaatgtgatcctttttagcgtcttcgacgagaaccggtcctggtacttgaccgagaatatacaaaggttccttcccaaccccgcaggcgttcagttggaagaccctgagtttcaggccagcaatattatgcactcaatcaacggctatgtgtttgatagtctccagctttctgtttgcctccatgaagtagcctattggtacatcttgtcaattggtgctcaaacagacttcctctccgtcttcttctccggctacacctttaagcacaagatggtgtatgaggacactctcacactctttccattttctggagaaaccgtgttcatgagcatggagaatccaggcctttggatcttgggttgccacaacagtgattttcgcaatcggggaatgactgctctcctcaaagtcagcagctgtgataagaacacaggcgactattacgaagattcttacgaggacataagtgcctacttgttgtccaagaataacgccattgagcccagatcattctcccagaatcctcccgtgcttaaaaggcatcagcgcgaaatcaccagaactactcttcagtctgatcaagaggagattgactatgacgacaccataagcgtggaaatgaagaaggaggatttcgatatctatgacgaagatgagaaccagtctccgcggagctttcagaagaagacgcgacactacttcattgcagcagtcgaaaggctttgggactacggtatgtcatcatcccctcatgtgttgcgcaatagagctcagagtggaagtgttccacagttcaagaaagtcgtctttcaagagtttacagatggcagcttcacacagcctctctatcggggcgagcttaacgaacatttgggactccttggtccctatatccgagccgaagtggaggacaacattatggttacctttaggaatcaagcctctcgcccctacagcttctactcctccctcatcagttatgaggaggatcagagacaaggcgctgaaccacggaagaactttgtgaaaccgaatgagacgaagacctacttctggaaagtacagcaccacatggcccccacaaaagacgaattcgattgcaaagcatgggcgtatttttcagacgttgacttggagaaagatgtacattcaggacttattggtcctttgttggtgtgtcacactaacactctcaatccagcccatggcaggcaggtgacagtccaggaattcgctcttttctttaccatctttgatgagaccaagtcctggtacttcacggaaaacatggagcgcaattgcagagccccctgtaacatacagatggaggaccctacctttaaggaaaattatcggttccacgcaatcaacggatacattatggatacactccctggccttgtgatggctcaggaccaacgaatcaggtggtacctcctcagcatgggttctaatgagaacatacactccattcacttttcaggacatgtgttcactgtccggaagaaagaagagtataagatggccctctacaatttgtatccaggcgtgtttgagaccgttgaaatgcttccctctaaagctggcatctggagagtagagtgcttgatcggagaacatcttcacgcaggtatgagcaccttgttcctcgtgtacagcaacaaatgtcagaccccacttggcatggccagtggacacattcgcgactttcagatcacagcatctggccagtatggacaatgggccccaaagttggctcgcctccattactccggtagcataaatgcgtggtccactaaagaacctttcagctggattaaggtcgatcttcttgcccccatgatcatccacggcattaagacacagggagcgaggcagaaattctcctccctctacatctcacagttcattattatgtatagtttggacggcaagaagtggcaaacttatagaggtaacagtactggaacactcatggtgttcttcggcaacgttgatagctctggcatcaaacacaacatctttaatcctcccataatagctcggtacatcagattgcatccgacccactacagcattaggagtacactccgaatggagcttatgggttgcgacttgaattcctgttcaatgccactcggaatggagtctaaagccatctctgatgcacagataaccgccagtagctactttacgaacatgtttgctacgtggtcaccctctaaggcaaggcttcatttgcaaggccggtctaatgcctggagacctcaggtgaacaacccgaaagaatggctccaggtggactttcagaagaccatgaaagtaacaggtgtcactactcagggagttaagtccttgctcaccagcatgtatgtgaaggagttccttatttcctcatcacaagatggccaccagtggaccctcttctttcagaatggtaaggtcaaagtgtttcagggcaatcaagacagcttcacacccgtggtgaacagtcttgatcctccactcttgacacgataccttcgaatccatccacagtcttgggttcaccagattgcattgcgcatggaagtacttggatgcgaggctcaggacctctac

SEQ ID NO: 298 - protein, 1457 aa, synthetic construct
  REGION 1..1457: note = Variant of human B-domain deleted Factor VIII
MQIELSTCFFLCLLRFCFSATRRYYLGAVELSWDYMQSDLGELPVDARFPPRVPKSFPFNTSVVYKKTLFVEFTDHLFNIAKPRPPWMGLLGPTIQAEVYDTVVITLKNMASHPVSLHAVGVSYWKASEGAEYDDQTSQREKEDDKVFPGGSHTYVWQVLKENGPMASDPHCLTYSYLSHVDLVKDLNSGLIGALLVCREGSLAKEKTQTLHKFILLFAVFDEGKSWHSETKNSLMQDRDAASARAWPKMHTVNGYVNRSLPGLIGCHRKSVYWHVIGMGTTPEVHSIFLEGHTFLVRNHRQASLEISPITFLTAQTLLMDLGQFLLFCHISSHQHDGMEAYVKVDSCPEEPQLRMKNNEEAEDYDDDLTDSEMDVVRFDDDNSPSFIQIRSVAKKHPKTWVHYIAAEEEDWDYAPLVLAPDDRSYKSQYLNNGPQRIGRKYKKVRFMAYTDETFKTREAIQHESGILGPLLYGEVGDTLLIIFKNQASRPYNIYPHGITDVRPLYSRRLPKGVKHLKDFPILPGEIFKYKWTVTVEDGPTKSDPRCLTRYYSSFVNMERDLASGLIGPLLICYKESVDQRGNQIMSDKRNVILFSVFDENRSWYLTENIQRFLPNPAGVQLEDPEFQASNIMHSINGYVFDSLQLSVCLHEVAYWYILSIGAQTDFLSVFFSGYTFKHKMVYEDTLTLFPFSGETVFMSMENPGLWILGCHNSDFRNRGMTALLKVSSCDKNTGDYYEDSYEDISAYLLSKNNAIEPRSFSQNPPVLKRHQREITRTTLQSDQEEIDYDDTISVEMKKEDFDIYDEDENQSPRSFQKKTRHYFIAAVERLWDYGMSSSPHVLRNRAQSGSVPQFKKVVFQEFTDGSFTQPLYRGELNEHLGLLGPYIRAEVEDNIMVTFRNQASRPYSFYSSLISYEEDQRQGAEPRKNFVKPNETKTYFWKVQHHMAPTKDEFDCKAWAYFSDVDLEKDVHSGLIGPLLVCHTNTLNPAHGRQVTVQEFALFFTIFDETKSWYFTENMERNCRAPCNIQMEDPTFKENYRFHAINGYIMDTLPGLVMAQDQRIRWYLLSMGSNENIHSIHFSGHVFTVRKKEEYKMALYNLYPGVFETVEMLPSKAGIWRVECLIGEHLHAGMSTLFLVYSNKCQTPLGMASGHIRDFQITASGQYGQWAPKLARLHYSGSINAWSTKEPFSWIKVDLLAPMIIHGIKTQGARQKFSSLYISQFIIMYSLDGKKWQTYRGNSTGTLMVFFGNVDSSGIKHNIFNPPIIARYIRLHPTHYSIRSTLRMELMGCDLNSCSMPLGMESKAISDAQITASSYFTNMFATWSPSKARLHLQGRSNAWRPQVNNPKEWLQVDFQKTMKVTGVTTQGVKSLLTSMYVKEFLISSSQDGHQWTLFFQNGKVKVFQGNQDSFTPVVNSLDPPLLTRYLRIHPQSWVHQIALRMEVLGCEAQDLY

SEQ ID NO: 299 - DNA, 4371 bp, synthetic construct
  misc_feature 1..4371: note = Variant of human B-domain deleted Factor VIII
  source 1..4371: mol_type = other DNA
atgcagattgaactgtctacctgcttcttcctctgtttgctgaggttctgctttagcgccactagacggtactaccttggcgctgtggagctgtcctgggactatatgcagagtgatttgggagagcttcccgtcgacgcacgatttcctcctcgcgttccaaagtcatttcccttcaacacaagcgtggtgtacaagaagacgctcttcgtcgaattcaccgatcacctgttcaatatcgccaaacccagaccaccatggatgggtcttttggggcctaccatacaagcggaggtgtatgacacagttgttatcactctcaagaacatggcttctcatccggtaagtcttcacgcagtgggcgtgtcctactggaaagcttcagaaggagccgagtatgatgatcagacatcccagagggagaaagaagacgacaaggtatttccaggtgggtctcatacctatgtgtggcaagtgctcaaagagaatggccctatggcaagcgatccgctctgtttgacttacagctacctttcacacgttgacctcgtcaaggacctcaactccgggttgattggagccttgttggtatgcagggaaggatctcttgccaaagagaagacacagaccctccacaagtttatccttctctttgctgtgttcgatgagggcaaaagttggcatagcgaaacgaagaattccctcatgcaggatcgcgacgcagccagcgccagagcttggcccaagatgcacactgtgaacggatatgtcaataggtcacttcctggcttgattgggtgtcatcggaaaagtgtctactggcacgtgatcggaatggggacaacaccagaggtccactccatatttctcgaaggccataccttccttgttcgaaaccacagacaggcatccttggagatctctcccattacctttctcactgcccaaacgctccttatggacttgggtcagttccttctcttctgccatatcagctcacaccagcatgatggtatggaagcttatgtgaaagtcgacagttgtcctgaggagccacagttgcgcatgaagaataatgaagaagccgaggattacgacgacgatctcaccgattctgagatggacgtggtgaggtttgatgacgacaactctccctccttcattcaaatccggagcgtggcgaagaaacaccccaagacttgggtccactatatagcggcggaagaggaggattgggattacgctcctcttgtattggcaccagatgaccgctcatacaaaagccagtacctcaacaacggaccgcagagaattggccggaagtataagaaagtgcgatttatggcctatacagacgaaacctttaagacaagggaggccatccagcatgagagtgggattttgggacctcttctttacggcgaagttggtgataccctcctcatcatcttcaagaatcaagcttctcgcccctataacatttacccacacgggatcactgacgttaggcctttgtatagcagaagacttcccaaaggcgtgaagcatctcaaagacttccccattttgccaggcgagatctttaagtacaaatggaccgtcacagtggaagatggaccgactaaatcagaccctcgatgccttacgcggtactattcctccttcgtgaatatggagagagatttggcaagcggactcataggaccactcctcatctgttacaaggaatctgtagaccagaggggtaaccagattatgagtgataaacgcaatgtgatcctttttagcgtcttcgacgagaaccggtcctggtacttgaccgagaatatacaaaggttccttcccaaccccgcaggcgttcagttggaagaccctgagtttcaggccagcaatattatgcactcaatcaacggctatgtgtttgatagtctccagctttctgtttgcctccatgaagtagcctattggtacatcttgtcaattggtgctcaaacagacttcctctccgtcttcttctccggctacacctttaagcacaagatggtgtatgaggacactctcacactctttccattttctggagaaaccgtgttcatgagcatggagaatccaggcctttggatcttgggttgccacaacagtgattttcgcaatcggggaatgactgctctcctcaaagtcagcagctgtgataagaacacaggcgactattacgaagattcttacgaggacataagtgcctacttgttgtccaagaataacgccattgagcccagatcattctcccagaatcctcccgtgcttaaaaggcatcagcgcgaaatcaccagaactactcttcagtctgatcaagaggagattgactatgacgacaccataagcgtggaaatgaagaaggaggatttcgatatctatgacgaagatgagaaccagtctccgcggagctttcagaagaagacgcgacactacttcattgcagcagtcgaaaggctttgggactacggtatgtcatcatcccctcatgtgttgcgcaatagagctcagagtggaagtgttccacagttcaagaaagtcgtctttcaagagtttacagatggcagcttcacacagcctctctatcggggcgagcttaacgaacatttgggactccttggtccctatatccgagccgaagtggaggacaacattatggttacctttaggaatcaagcctctcgcccctacagcttctactcctccctcatcagttatgaggaggatcagagacaaggcgctgaaccacggaagaactttgtgaaaccgaatgagacgaagacctacttctggaaagtacagcaccacatggcccccacaaaagacgaattcgattgcaaagcatgggcgtatttttcagacgttgacttggagaaagatgtacattcaggacttattggtcctttgttggtgtgtcacactaacactctcaatccagcccatggcaggcaggtgacagtccaggaattcgctcttttctttaccatctttgatgagaccaagtcctggtacttcacggaaaacatggagcgcaattgcagagccccctgtaacatacagatggaggaccctacctttaaggaaaattatcggttccacgcaatcaacggatacattatggatacactccctggccttgtgatggctcaggaccaacgaatcaggtggtacctcctcagcatgggttctaatgagaacatacactccattcacttttcaggacatgtgttcactgtccggaagaaagaagagtataagatggccctctacaatttgtatccaggcgtgtttgagaccgttgaaatgcttccctctaaagctggcatctggagagtagagtgcttgatcggagaacatcttcacgcaggtatgagcaccttgttcctcgtgtacagcaacaaatgtcagaccccacttggcatggccagtggacacattcgcgactttcagatcacagcatctggccagtatggacaatgggccccaaagttggctcgcctccattactccggtagcataaatgcgtggtccactaaagaacctttcagctggattaaggtcgatcttcttgcccccatgatcatccacggcattaagacacagggagcgaggcagaaattctcctccctctacatctcacagttcattattatgtatagtttggacggcaagaagtggcaaacttatagaggtaacagtactggaacactcatggtgttcttcggcaacgttgatagctctggcatcaaacacaacatctttaatcctcccataatagctcggtacatcagattgcatccgacccactacagcattaggagtacactccgaatggagcttatgggttgcgacttgaattcctgttcaatgccactcggaatggagtctaaagccatctctgatgcacagataaccgccagtagctactttacgaacatgtttgctacgtggtcaccctctaaggcaaggcttcatttgcaaggccggtctaatgcctggagacctcaggtgaacaacccgaaagaatggctccaggtggactttcagaagaccatgaaagtaacaggtgtcactactcagggagttaagtccttggcgaccagcatgtatgtgaaggagttccttatttcctcatcacaagatggccaccagtggaccctcttctttcagaatggtaaggtcaaagtgtttcagggcaatcaagacagcttcacacccgtggtgaacagtcttgatcctccactcttgacacgataccttcgaatccatccacagtcttgggttcaccagattgcattgcgcatggaagtacttggatgcgaggctcaggacctctac

SEQ ID NO: 300 - protein, 1457 aa, synthetic construct
  REGION 1..1457: note = Variant of human B-domain deleted Factor VIII
MQIELSTCFFLCLLRFCFSATRRYYLGAVELSWDYMQSDLGELPVDARFPPRVPKSFPFNTSVVYKKTLFVEFTDHLFNIAKPRPPWMGLLGPTIQAEVYDTVVITLKNMASHPVSLHAVGVSYWKASEGAEYDDQTSQREKEDDKVFPGGSHTYVWQVLKENGPMASDPLCLTYSYLSHVDLVKDLNSGLIGALLVCREGSLAKEKTQTLHKFILLFAVFDEGKSWHSETKNSLMQDRDAASARAWPKMHTVNGYVNRSLPGLIGCHRKSVYWHVIGMGTTPEVHSIFLEGHTFLVRNHRQASLEISPITFLTAQTLLMDLGQFLLFCHISSHQHDGMEAYVKVDSCPEEPQLRMKNNEEAEDYDDDLTDSEMDVVRFDDDNSPSFIQIRSVAKKHPKTWVHYIAAEEEDWDYAPLVLAPDDRSYKSQYLNNGPQRIGRKYKKVRFMAYTDETFKTREAIQHESGILGPLLYGEVGDTLLIIFKNQASRPYNIYPHGITDVRPLYSRRLPKGVKHLKDFPILPGEIFKYKWTVTVEDGPTKSDPRCLTRYYSSFVNMERDLASGLIGPLLICYKESVDQRGNQIMSDKRNVILFSVFDENRSWYLTENIQRFLPNPAGVQLEDPEFQASNIMHSINGYVFDSLQLSVCLHEVAYWYILSIGAQTDFLSVFFSGYTFKHKMVYEDTLTLFPFSGETVFMSMENPGLWILGCHNSDFRNRGMTALLKVSSCDKNTGDYYEDSYEDISAYLLSKNNAIEPRSFSQNPPVLKRHQREITRTTLQSDQEEIDYDDTISVEMKKEDFDIYDEDENQSPRSFQKKTRHYFIAAVERLWDYGMSSSPHVLRNRAQSGSVPQFKKVVFQEFTDGSFTQPLYRGELNEHLGLLGPYIRAEVEDNIMVTFRNQASRPYSFYSSLISYEEDQRQGAEPRKNFVKPNETKTYFWKVQHHMAPTKDEFDCKAWAYFSDVDLEKDVHSGLIGPLLVCHTNTLNPAHGRQVTVQEFALFFTIFDETKSWYFTENMERNCRAPCNIQMEDPTFKENYRFHAINGYIMDTLPGLVMAQDQRIRWYLLSMGSNENIHSIHFSGHVFTVRKKEEYKMALYNLYPGVFETVEMLPSKAGIWRVECLIGEHLHAGMSTLFLVYSNKCQTPLGMASGHIRDFQITASGQYGQWAPKLARLHYSGSINAWSTKEPFSWIKVDLLAPMIIHGIKTQGARQKFSSLYISQFIIMYSLDGKKWQTYRGNSTGTLMVFFGNVDSSGIKHNIFNPPIIARYIRLHPTHYSIRSTLRMELMGCDLNSCSMPLGMESKAISDAQITASSYFTNMFATWSPSKARLHLQGRSNAWRPQVNNPKEWLQVDFQKTMKVTGVTTQGVKSLATSMYVKEFLISSSQDGHQWTLFFQNGKVKVFQGNQDSFTPVVNSLDPPLLTRYLRIHPQSWVHQIALRMEVLGCEAQDLY

SEQ ID NO: 301 - DNA, 4371 bp, synthetic construct
  misc_feature 1..4371: note = Variant of human B-domain deleted Factor VIII
  source 1..4371: mol_type = other DNA
atgcagattgaactgtctacctgcttcttcctctgtttgctgaggttctgctttagcgccactagacggtactaccttggcgctgtggagctgtcctgggactatatgcagagtgatttgggagagcttcccgtcgacgcacgatttcctcctcgcgttccaaagtcatttcccttcaacacaagcgtggtgtacaagaagacgctcttcgtcgaattcaccgatcacctgttcaatatcgccaaacccagaccaccatggatgggtcttttggggcctaccatacaagcggaggtgtatgacacagttgttatcactctcaagaacatggcttctcatccggtaagtcttcacgcagtgggcgtgtcctactggaaagcttcagaaggagccgagtatgatgatcagacatcccagagggagaaagaagacgacaaggtatttccaggtgggtctcatacctatgtgtggcaagtgctcaaagagaatggccctatggcaagcgatccgctctgtttgacttacagctacctttcacacgttgacctcgtcaaggacctcaactccgggttgattggagccttgttggtatgcagggaaggatctcttgccaaagagaagacacagaccctccacaagtttatccttctctttgctgtgttcgatgagggcaaaagttggcatagcgaaacgaagaattccctcatgcaggatcgcgacgcagccagcgccagagcttggcccaagatgcacactgtgaacggatatgtcaataggtcacttcctggcttgattgggtgtcatcggaaaagtgtctactggcacgtgatcggaatggggacaacaccagaggtccactccatatttctcgaaggccataccttccttgttcgaaaccacagacaggcatccttggagatctctcccattacctttctcactgcccaaacgctccttatggacttgggtcagttccttctcttctgccatatcagctcacaccagcatgatggtatggaagcttatgtgaaagtcgacagttgtcctgaggagccacagttgcgcatgaagaataatgaagaagccgaggattacgacgacgatctcaccgattctgagatggacgtggtgaggtttgatgacgacaactctccctccttcattcaaatccggagcgtggcgaagaaacaccccaagacttgggtccactatatagcggcggaagaggaggattgggattacgctcctcttgtattggcaccagatgaccgctcatacaaaagccagtacctcaacaacggaccgcagagaattggccggaagtataagaaagtgcgatttatggcctatacagacgaaacctttaagacaagggaggccatccagcatgagagtgggattttgggacctcttctttacggcgaagttggtgataccctcctcatcatcttcaagaatcaagcttctcgcccctataacatttacccacacgggatcactgacgttaggcctttgtatagcagaagacttcccaaaggcgtgaagcatctcaaagacttccccattttgccaggcgagatctttaagtacaaatggaccgtcacagtggaagatggaccgactaaatcagaccctcgatgccttacgcggtactattcctccttcgtgaatatggagagagatttggcaagcggactcataggaccactcctcatctgttacaaggaatctgtagaccagaggggtaaccagattatgagtgataaacgcaatgtgatcctttttagcgtcttcgacgagaaccggtcctggtacttgaccgagaatatacaaaggttccttcccaaccccgcaggcgttcagttggaagaccctgagtttcaggccagcaatattatgcactcaatcaacggctatgtgtttgatagtctccagctttctgtttgcctccatgaagtagcctattggtacatcttgtcaattggtgctcaaacagacttcctctccgtcttcttctccggctacacctttaagcacaagatggtgtatgaggacactctcacactctttccattttctggagaaaccgtgttcatgagcatggagaatccaggcctttggatcttgggttgccacaacagtgattttcgcaatcggggaatgactgctctcctcaaagtcagcagctgtgataagaacacaggcgactattacgaagattcttacgaggacataagtgcctacttgttgtccaagaataacgccattgagcccagatcattctcccagaatcctcccgtgcttaaaaggcatcagcgcgaaatcaccagaactactcttcagtctgatcaagaggagattgactatgacgacaccataagcgtggaaatgaagaaggaggatttcgatatctatgacgaagatgagaaccagtctccgcggagctttcagaagaagacgcgacactacttcattgcagcagtcgaaaggctttgggactacggtatgtcatcatcccctcatgtgttgcgcaatagagctcagagtggaagtgttccacagttcaagaaagtcgtctttcaagagtttacagatggcagcttcacacagcctctctatcggggcgagcttaacgaacatttgggactccttggtccctatatccgagccgaagtggaggacaacattatggttacctttaggaatcaagcctctcgcccctacagcttctactcctccctcatcagttatgaggaggatcagagacaaggcgctgaaccacggaagaactttgtgaaaccgaatgagacgaagacctacttctggaaagtacagcaccacatggcccccacaaaagacgaattcgattgcaaagcatgggcgtatttttcagacgttgacttggagaaagatgtacattcaggacttattggtcctttgttggtgtgtcacactaacactctcaatccagcccatggcaggcaggtgacagtccaggaattcgctcttttctttaccatctttgatgagaccaagtcctggtacttcacggaaaacatggagcgcaattgcagagccccctgtaacatacagatggaggaccctacctttaaggaaaattatcggttccacgcaatcaacggatacattatggatacactccctggccttgtgatggctcaggaccaacgaatcaggtggtacctcctcagcatgggttctaatgagaacatacactccattcacttttcaggacatgtgttcactgtccggaagaaagaagagtataagatggccctctacaatttgtatccaggcgtgtttgagaccgttgaaatgcttccctctaaagctggcatctggagagtagagtgcttgatcggagaacatcttcacgcaggtatgagcaccttgttcctcgtgtacagcaacaaatgtcagaccccacttggcatggccagtggacacattcgcgactttcagatcacagcatctggccagtatggacaatgggccccaaagttggctcgcctccattactccggtagcataaatgcgtggtccactaaagaacctttcagctggattaaggtcgatcttcttgcccccatgatcatccacggcattaagacacagggagcgaggcagaaattctcctccctctacatctcacagttcattattatgtatagtttggacggcaagaagtggcaaacttatagaggtaacagtactggaacactcatggtgttcttcggcaacgttgatagctctggcatcaaacacaacatctttaatcctcccataatagctcggtacatcagattgcatccgacccactacagcattaggagtacactccgaatggagcttatgggttgcgacttgaattcctgttcaatgccactcggaatggagtctaaagccatctctgatgcacagataaccgccagtagctactttacgaacatgtttgctacgtggtcaccctctaaggcaaggcttcatttgcaaggccggtctaatgcctggagacctcaggtgaacaacccgaaagaatggctccaggtggactttcagaagaccatgaaagtaacaggtgtcactactcagggagttaagtccttggttaccagcatgtatgtgaaggagttccttatttcctcatcacaagatggccaccagtggaccctcttctttcagaatggtaaggtcaaagtgtttcagggcaatcaagacagcttcacacccgtggtgaacagtcttgatcctccactcttgacacgataccttcgaatccatccacagtcttgggttcaccagattgcattgcgcatggaagtacttggatgcgaggctcaggacctctac

SEQ ID NO: 302 - protein, 1457 aa, synthetic construct
  REGION 1..1457: note = Variant of human B-domain deleted Factor VIII
MQIELSTCFFLCLLRFCFSATRRYYLGAVELSWDYMQSDLGELPVDARFPPRVPKSFPFNTSVVYKKTLFVEFTDHLFNIAKPRPPWMGLLGPTIQAEVYDTVVITLKNMASHPVSLHAVGVSYWKASEGAEYDDQTSQREKEDDKVFPGGSHTYVWQVLKENGPMASDPLCLTYSYLSHVDLVKDLNSGLIGALLVCREGSLAKEKTQTLHKFILLFAVFDEGKSWHSETKNSLMQDRDAASARAWPKMHTVNGYVNRSLPGLIGCHRKSVYWHVIGMGTTPEVHSIFLEGHTFLVRNHRQASLEISPITFLTAQTLLMDLGQFLLFCHISSHQHDGMEAYVKVDSCPEEPQLRMKNNEEAEDYDDDLTDSEMDVVRFDDDNSPSFIQIRSVAKKHPKTWVHYIAAEEEDWDYAPLVLAPDDRSYKSQYLNNGPQRIGRKYKKVRFMAYTDETFKTREAIQHESGILGPLLYGEVGDTLLIIFKNQASRPYNIYPHGITDVRPLYSRRLPKGVKHLKDFPILPGEIFKYKWTVTVEDGPTKSDPRCLTRYYSSFVNMERDLASGLIGPLLICYKESVDQRGNQIMSDKRNVILFSVFDENRSWYLTENIQRFLPNPAGVQLEDPEFQASNIMHSINGYVFDSLQLSVCLHEVAYWYILSIGAQTDFLSVFFSGYTFKHKMVYEDTLTLFPFSGETVFMSMENPGLWILGCHNSDFRNRGMTALLKVSSCDKNTGDYYEDSYEDISAYLLSKNNAIEPRSFSQNPPVLKRHQREITRTTLQSDQEEIDYDDTISVEMKKEDFDIYDEDENQSPRSFQKKTRHYFIAAVERLWDYGMSSSPHVLRNRAQSGSVPQFKKVVFQEFTDGSFTQPLYRGELNEHLGLLGPYIRAEVEDNIMVTFRNQASRPYSFYSSLISYEEDQRQGAEPRKNFVKPNETKTYFWKVQHHMAPTKDEFDCKAWAYFSDVDLEKDVHSGLIGPLLVCHTNTLNPAHGRQVTVQEFALFFTIFDETKSWYFTENMERNCRAPCNIQMEDPTFKENYRFHAINGYIMDTLPGLVMAQDQRIRWYLLSMGSNENIHSIHFSGHVFTVRKKEEYKMALYNLYPGVFETVEMLPSKAGIWRVECLIGEHLHAGMSTLFLVYSNKCQTPLGMASGHIRDFQITASGQYGQWAPKLARLHYSGSINAWSTKEPFSWIKVDLLAPMIIHGIKTQGARQKFSSLYISQFIIMYSLDGKKWQTYRGNSTGTLMVFFGNVDSSGIKHNIFNPPIIARYIRLHPTHYSIRSTLRMELMGCDLNSCSMPLGMESKAISDAQITASSYFTNMFATWSPSKARLHLQGRSNAWRPQVNNPKEWLQVDFQKTMKVTGVTTQGVKSLVTSMYVKEFLISSSQDGHQWTLFFQNGKVKVFQGNQDSFTPVVNSLDPPLLTRYLRIHPQSWVHQIALRMEVLGCEAQDLY

SEQ ID NO: 303 - DNA, 4371 bp, synthetic construct
  misc_feature 1..4371: note = Variant of human B-domain deleted Factor VIII
  source 1..4371: mol_type = other DNA
atgcagattgaactgtctacctgcttcttcctctgtttgctgaggttctgctttagcgccactagacggtactaccttggcgctgtggagctgtcctgggactatatgcagagtgatttgggagagcttcccgtcgacgcacgatttcctcctcgcgttccaaagtcatttcccttcaacacaagcgtggtgtacaagaagacgctcttcgtcgaattcaccgatcacctgttcaatatcgccaaacccagaccaccatggatgggtcttttggggcctaccatacaagcggaggtgtatgacacagttgttatcactctcaagaacatggcttctcatccggtaagtcttcacgcagtgggcgtgtcctactggaaagcttcagaaggagccgagtatgatgatcagacatcccagagggagaaagaagacgacaaggtatttccaggtgggtctcatacctatgtgtggcaagtgctcaaagagaatggccctatggcaagcgatccgctctgtttgacttacagctacctttcacacgttgacctcgtcaaggacctcaactccgggttgattggagccttgttggtatgcagggaaggatctcttgccaaagagaagacacagaccctccacaagtttatccttctctttgctgtgttcgatgagggcaaaagttggcatagcgaaacgaagaattccctcatgcaggatcgcgacgcagccagcgccagagcttggcccaagatgcacactgtgaacggatatgtcaataggtcacttcctggcttgattgggtgtcatcggaaaagtgtctactggcacgtgatcggaatggggacaacaccagaggtccactccatatttctcgaaggccataccttccttgttcgaaaccacagacaggcatccttggagatctctcccattacctttctcactgcccaaacgctccttatggacttgggtcagttccttctcttctgccatatcagctcacaccagcatgatggtatggaagcttatgtgaaagtcgacagttgtcctgaggagccacagttgcgcatgaagaataatgaagaagccgaggattacgacgacgatctcaccgattctgagatggacgtggtgaggtttgatgacgacaactctccctccttcattcaaatccggagcgtggcgaagaaacaccccaagacttgggtccactatatagcggcggaagaggaggattgggattacgctcctcttgtattggcaccagatgaccgctcatacaaaagccagtacctcaacaacggaccgcagagaattggccggaagtataagaaagtgcgatttatggcctatacagacgaaacctttaagacaagggaggccatccagcatgagagtgggattttgggacctcttctttacggcgaagttggtgataccctcctcatcatcttcaagaatcaagcttctcgcccctataacatttacccacacgggatcactgacgttaggcctttgtatagcagaagacttcccaaaggcgtgaagcatctcaaagacttccccattttgccaggcgagatctttaagtacaaatggaccgtcacagtggaagatggaccgactaaatcagaccctcgatgccttacgcggtactattcctccttcgtgaatatggagagagatttggcaagcggactcataggaccactcctcatctgttacaaggaatctgtagaccagaggggtaaccagattatgagtgataaacgcaatgtgatcctttttagcgtcttcgacgagaaccggtcctggtacttgaccgagaatatacaaaggttccttcccaaccccgcaggcgttcagttggaagaccctgagtttcaggccagcaatattatgcactcaatcaacggctatgtgtttgatagtctccagctttctgtttgcctccatgaagtagcctattggtacatcttgtcaattggtgctcaaacagacttcctctccgtcttcttctccggctacacctttaagcacaagatggtgtatgaggacactctcacactctttccattttctggagaaaccgtgttcatgagcatggagaatccaggcctttggatcttgggttgccacaacagtgattttcgcaatcggggaatgactgctctcctcaaagtcagcagctgtgataagaactctggcgactattacgaagattcttacgaggacataagtgcctacttgttgtccaagaataacgccattgagcccagatcattctcccagaatcctcccgtgcttaaaaggcatcagcgcgaaatcaccagaactactcttcagtctgatcaagaggagattgactatgacgacaccataagcgtggaaatgaagaaggaggatttcgatatctatgacgaagatgagaaccagtctccgcggagctttcagaagaagacgcgacactacttcattgcagcagtcgaaaggctttgggactacggtatgtcatcatcccctcatgtgttgcgcaatagagctcagagtggaagtgttccacagttcaagaaagtcgtctttcaagagtttacagatggcagcttcacacagcctctctatcggggcgagcttaacgaacatttgggactccttggtccctatatccgagccgaagtggaggacaacattatggttacctttaggaatcaagcctctcgcccctacagcttctactcctccctcatcagttatgaggaggatcagagacaaggcgctgaaccacggaagaactttgtgaaaccgaatgagacgaagacctacttctggaaagtacagcaccacatggcccccacaaaagacgaattcgattgcaaagcatgggcgtatttttcagacgttgacttggagaaagatgtacattcaggacttattggtcctttgttggtgtgtcacactaacactctcaatccagcccatggcaggcaggtgacagtccaggaattcgctcttttctttaccatctttgatgagaccaagtcctggtacttcacggaaaacatggagcgcaattgcagagccccctgtaacatacagatggaggaccctacctttaaggaaaattatcggttccacgcaatcaacggatacattatggatacactccctggccttgtgatggctcaggaccaacgaatcaggtggtacctcctcagcatgggttctaatgagaacatacactccattcacttttcaggacatgtgttcactgtccggaagaaagaagagtataagatggccctctacaatttgtatccaggcgtgtttgagaccgttgaaatgcttccctctaaagctggcatctggagagtagagtgcttgatcggagaacatcttcacgcaggtatgagcaccttgttcctcgtgtacagcaacaaatgtcagaccccacttggcatggccagtggacacattcgcgactttcagatcacagcatctggccagtatggacaatgggccccaaagttggctcgcctccattactccggtagcataaatgcgtggtccactaaagaacctttcagctggattaaggtcgatcttcttgcccccatgatcatccacggcattaagacacagggagcgaggcagaaattctcctccctctacatctcacagttcattattatgtatagtttggacggcaagaagtggcaaacttatagaggtaacagtactggaacactcatggtgttcttcggcaacgttgatagctctggcatcaaacacaacatctttaatcctcccataatagctcggtacatcagattgcatccgacccactacagcattaggagtacactccgaatggagcttatgggttgcgacttgaattcctgttcaatgccactcggaatggagtctaaagccatctctgatgcacagataaccgccagtagctactttacgaacatgtttgctacgtggtcaccctctaaggcaaggcttcatttgcaaggccggtctaatgcctggagacctcaggtgaacaacccgaaagaatggctccaggtggactttcagaagaccatgaaagtaacaggtgtcactactcagggagttaagtccttgctcaccagcatgtatgtgaaggagttccttatttcctcatcacaagatggccaccagtggaccctcttctttcagaatggtaaggtcaaagtgtttcagggcaatcaagacagcttcacacccgtggtgaacagtcttgatcctccactcttgacacgataccttcgaatccatccacagtcttgggttcaccagattgcattgcgcatggaagtacttggatgcgaggctcaggacctctac

SEQ ID NO: 304 - protein, 1457 aa, synthetic construct
  REGION 1..1457: note = Variant of human B-domain deleted Factor VIII
MQIELSTCFFLCLLRFCFSATRRYYLGAVELSWDYMQSDLGELPVDARFPPRVPKSFPFNTSVVYKKTLFVEFTDHLFNIAKPRPPWMGLLGPTIQAEVYDTVVITLKNMASHPVSLHAVGVSYWKASEGAEYDDQTSQREKEDDKVFPGGSHTYVWQVLKENGPMASDPLCLTYSYLSHVDLVKDLNSGLIGALLVCREGSLAKEKTQTLHKFILLFAVFDEGKSWHSETKNSLMQDRDAASARAWPKMHTVNGYVNRSLPGLIGCHRKSVYWHVIGMGTTPEVHSIFLEGHTFLVRNHRQASLEISPITFLTAQTLLMDLGQFLLFCHISSHQHDGMEAYVKVDSCPEEPQLRMKNNEEAEDYDDDLTDSEMDVVRFDDDNSPSFIQIRSVAKKHPKTWVHYIAAEEEDWDYAPLVLAPDDRSYKSQYLNNGPQRIGRKYKKVRFMAYTDETFKTREAIQHESGILGPLLYGEVGDTLLIIFKNQASRPYNIYPHGITDVRPLYSRRLPKGVKHLKDFPILPGEIFKYKWTVTVEDGPTKSDPRCLTRYYSSFVNMERDLASGLIGPLLICYKESVDQRGNQIMSDKRNVILFSVFDENRSWYLTENIQRFLPNPAGVQLEDPEFQASNIMHSINGYVFDSLQLSVCLHEVAYWYILSIGAQTDFLSVFFSGYTFKHKMVYEDTLTLFPFSGETVFMSMENPGLWILGCHNSDFRNRGMTALLKVSSCDKNSGDYYEDSYEDISAYLLSKNNAIEPRSFSQNPPVLKRHQREITRTTLQSDQEEIDYDDTISVEMKKEDFDIYDEDENQSPRSFQKKTRHYFIAAVERLWDYGMSSSPHVLRNRAQSGSVPQFKKVVFQEFTDGSFTQPLYRGELNEHLGLLGPYIRAEVEDNIMVTFRNQASRPYSFYSSLISYEEDQRQGAEPRKNFVKPNETKTYFWKVQHHMAPTKDEFDCKAWAYFSDVDLEKDVHSGLIGPLLVCHTNTLNPAHGRQVTVQEFALFFTIFDETKSWYFTENMERNCRAPCNIQMEDPTFKENYRFHAINGYIMDTLPGLVMAQDQRIRWYLLSMGSNENIHSIHFSGHVFTVRKKEEYKMALYNLYPGVFETVEMLPSKAGIWRVECLIGEHLHAGMSTLFLVYSNKCQTPLGMASGHIRDFQITASGQYGQWAPKLARLHYSGSINAWSTKEPFSWIKVDLLAPMIIHGIKTQGARQKFSSLYISQFIIMYSLDGKKWQTYRGNSTGTLMVFFGNVDSSGIKHNIFNPPIIARYIRLHPTHYSIRSTLRMELMGCDLNSCSMPLGMESKAISDAQITASSYFTNMFATWSPSKARLHLQGRSNAWRPQVNNPKEWLQVDFQKTMKVTGVTTQGVKSLLTSMYVKEFLISSSQDGHQWTLFFQNGKVKVFQGNQDSFTPVVNSLDPPLLTRYLRIHPQSWVHQIALRMEVLGCEAQDLY

SEQ ID NO: 305 - DNA, 4371 bp, synthetic construct
  misc_feature 1..4371: note = Variant of human B-domain deleted Factor VIII
  source 1..4371: mol_type = other DNA
atgcagattgaactgtctacctgcttcttcctctgtttgctgaggttctgctttagcgccactagacggtactaccttggcgctgtggagctgtcctgggactatatgcagagtgatttgggagagcttcccgtcgacgcacgatttcctcctcgcgttccaaagtcatttcccttcaacacaagcgtggtgtacaagaagacgctcttcgtcgaattcaccgatcacctgttcaatatcgccaaacccagaccaccatggatgggtcttttggggcctaccatacaagcggaggtgtatgacacagttgttatcactctcaagaacatggcttctcatccggtaagtcttcacgcagtgggcgtgtcctactggaaagcttcagaaggagccgagtatgatgatcagacatcccagagggagaaagaagacgacaaggtatttccaggtgggtctcatacctatgtgtggcaagtgctcaaagagaatggccctatggcaagcgatccgctctgtttgacttacagctacctttcacacgttgacctcgtcaaggacctcaactccgggttgattggagccttgttggtatgcagggaaggatctcttgccaaagagaagacacagaccctccacaagtttatccttctctttgctgtgttcgatgagggcaaaagttggcatagcgaaacgaagaattccctcatgcaggatcgcgacgcagccagcgccagagcttggcccaagatgcacactgtgaacggatatgtcaataggtcacttcctggcttgattgggtgtcatcggaaaagtgtctactggcacgtgatcggaatggggacaacaccagaggtccactccatatttctcgaaggccataccttccttgttcgaaaccacagacaggcatccttggagatctctcccattacctttctcactgcccaaacgctccttatggacttgggtcagttccttctcttctgccatatcagctcacaccagcatgatggtatggaagcttatgtgaaagtcgacagttgtcctgaggagccacagttgcgcatgaagaataatgaagaagccgaggattacgacgacgatctcaccgattctgagatggacgtggtgaggtttgatgacgacaactctccctccttcattcaaatccggagcgtggcgaagaaacaccccaagacttgggtccactatatagcggcggaagaggaggattgggattacgctcctcttgtattggcaccagatgaccgctcatacaaaagccagtacctcaacaacggaccgcagagaattggccggaagtataagaaagtgcgatttatggcctatacagacgaaacctttaagacaagggaggccatccagcatgagagtgggattttgggacctcttctttacggcgaagttggtgataccctcctcatcatcttcaagaatcaagcttctcgcccctataacatttacccacacgggatcactgacgttaggcctttgtatagcagaagacttcccaaaggcgtgaagcatctcaaagacttccccattttgccaggcgagatctttaagtacaaatggaccgtcacagtggaagatggaccgactaaatcagaccctcgatgccttacgcggtactattcctccttcgtgaatatggagagagatttggcaagcggactcataggaccactcctcatctgttacaaggaatctgtagaccagaggggtaaccagattatgagtgataaacgcaatgtgatcctttttagcgtcttcgacgagaaccggtcctggtacttgaccgagaatatacaaaggttccttcccaaccccgcaggcgttcagttggaagaccctgagtttcaggccagcaatattatgcactcaatcaacggctatgtgtttgatagtctccagctttctgtttgcctccatgaagtagcctattggtacatcttgtcaattggtgctcaaacagacttcctctccgtcttcttctccggctacacctttaagcacaagatggtgtatgaggacactctcacactctttccattttctggagaaaccgtgttcatgagcatggagaatccaggcctttggatcttgggttgccacaacagtgattttcgcaatcggggaatgactgctctcctcaaagtcagcagctgtgataagaacacaggcgactattacgaagattcttacgaggacataagtgcctacttgttgtccaagaataacgccattgagcccagatcattctcccagaatcctcccgtgcttaaaaggcatcagcgcgaaatcaccagaactactcttcagtctgatcaagaggagattgactatgacgacaccataagcgtggaaatgaagaaggaggatttcgatatctatgacgaagatgagaaccagtctccgcggagctttcagaagaagacgcgacactacttcattgcagcagtcgaaaggctttgggactacggtatgtcatcatcccctcatgtgttgcgcaatagagctcagagtggaagtgttccacagttcaagaaagtcgtctttcaagagtttacagatggcagcttcacacagcctctctatcggggcgagcttaacgaacatttgggactccttggtccctatatccgagccgaagtggaggacaacattatggttacctttaggaatcaagcctctcgcccctacagcttctactcctccctcatcagttatgaggaggatcagagacaaggcgctgaaccacggaagaactttgtgaaaccgaatgagacgaagacctacttctggaaagtacagcaccacatggcccccacaaaagacgaattcgattgcaaagcatgggcgtatttttcagacgttgacttggagaaagatgtacattcaggacttattggtcctttgttggtgtgtcacactaacactctcaatccagcccatggcaggcaggtgacagtccaggaattcgctcttttctttaccatctttgatgagaccaagtcctggtacttcacggaaaacatggagcgcaattgcagagccccctgtaacatacagatggaggaccctacctttaaggaaaattatcggttccacgcaatcaacggatacattatggatacactccctggccttgtgatggctcaggaccaacgaatcaggtggtacctcctcagcatgggttctaatgagaacatacactccattcacttttcaggacatgtgttcactgtccggaagaaagaagagtataagatggccctctacaatttgtatccaggcgtgtttgagaccgttgaaatgcttccctctaaagctggcatctggagagtagagtgcttgatcggagaacatcttcacgcaggtatgagcaccttgttcctcgtgtacagcaacaaatgtcagcggccacttggcatggccagtggacacattcgcgactttcagatcacagcatctggccagtatggacaatgggccccaaagttggctcgcctccattactccggtagcataaatgcgtggtccactaaagaacctttcagctggattaaggtcgatcttcttgcccccatgatcatccacggcattaagacacagggagcgaggcagaaattctcctccctctacatctcacagttcattattatgtatagtttggacggcaagaagtggcaaacttatagaggtaacagtactggaacactcatggtgttcttcggcaacgttgatagctctggcatcaaacacaacatctttaatcctcccataatagctcggtacatcagattgcatccgacccactacagcattaggagtacactccgaatggagcttatgggttgcgacttgaattcctgttcaatgccactcggaatggagtctaaagccatctctgatgcacagataaccgccagtagctactttacgaacatgtttgctacgtggtcaccctctaaggcaaggcttcatttgcaaggccggtctaatgcctggagacctcaggtgaacaacccgaaagaatggctccaggtggactttcagaagaccatgaaagtaacaggtgtcactactcagggagttaagtccttgctcaccagcatgtatgtgaaggagttccttatttcctcatcacaagatggccaccagtggaccctcttctttcagaatggtaaggtcaaagtgtttcagggcaatcaagacagcttcacacccgtggtgaacagtcttgatcctccactcttgacacgataccttcgaatccatccacagtcttgggttcaccagattgcattgcgcatggaagtacttggatgcgaggctcaggacctctac

SEQ ID NO: 306 - protein, 1457 aa, synthetic construct
  REGION 1..1457: note = Variant of human B-domain deleted Factor VIII
MQIELSTCFFLCLLRFCFSATRRYYLGAVELSWDYMQSDLGELPVDARFPPRVPKSFPFNTSVVYKKTLFVEFTDHLFNIAKPRPPWMGLLGPTIQAEVYDTVVITLKNMASHPVSLHAVGVSYWKASEGAEYDDQTSQREKEDDKVFPGGSHTYVWQVLKENGPMASDPLCLTYSYLSHVDLVKDLNSGLIGALLVCREGSLAKEKTQTLHKFILLFAVFDEGKSWHSETKNSLMQDRDAASARAWPKMHTVNGYVNRSLPGLIGCHRKSVYWHVIGMGTTPEVHSIFLEGHTFLVRNHRQASLEISPITFLTAQTLLMDLGQFLLFCHISSHQHDGMEAYVKVDSCPEEPQLRMKNNEEAEDYDDDLTDSEMDVVRFDDDNSPSFIQIRSVAKKHPKTWVHYIAAEEEDWDYAPLVLAPDDRSYKSQYLNNGPQRIGRKYKKVRFMAYTDETFKTREAIQHESGILGPLLYGEVGDTLLIIFKNQASRPYNIYPHGITDVRPLYSRRLPKGVKHLKDFPILPGEIFKYKWTVTVEDGPTKSDPRCLTRYYSSFVNMERDLASGLIGPLLICYKESVDQRGNQIMSDKRNVILFSVFDENRSWYLTENIQRFLPNPAGVQLEDPEFQASNIMHSINGYVFDSLQLSVCLHEVAYWYILSIGAQTDFLSVFFSGYTFKHKMVYEDTLTLFPFSGETVFMSMENPGLWILGCHNSDFRNRGMTALLKVSSCDKNTGDYYEDSYEDISAYLLSKNNAIEPRSFSQNPPVLKRHQREITRTTLQSDQEEIDYDDTISVEMKKEDFDIYDEDENQSPRSFQKKTRHYFIAAVERLWDYGMSSSPHVLRNRAQSGSVPQFKKVVFQEFTDGSFTQPLYRGELNEHLGLLGPYIRAEVEDNIMVTFRNQASRPYSFYSSLISYEEDQRQGAEPRKNFVKPNETKTYFWKVQHHMAPTKDEFDCKAWAYFSDVDLEKDVHSGLIGPLLVCHTNTLNPAHGRQVTVQEFALFFTIFDETKSWYFTENMERNCRAPCNIQMEDPTFKENYRFHAINGYIMDTLPGLVMAQDQRIRWYLLSMGSNENIHSIHFSGHVFTVRKKEEYKMALYNLYPGVFETVEMLPSKAGIWRVECLIGEHLHAGMSTLFLVYSNKCQRPLGMASGHIRDFQITASGQYGQWAPKLARLHYSGSINAWSTKEPFSWIKVDLLAPMIIHGIKTQGARQKFSSLYISQFIIMYSLDGKKWQTYRGNSTGTLMVFFGNVDSSGIKHNIFNPPIIARYIRLHPTHYSIRSTLRMELMGCDLNSCSMPLGMESKAISDAQITASSYFTNMFATWSPSKARLHLQGRSNAWRPQVNNPKEWLQVDFQKTMKVTGVTTQGVKSLLTSMYVKEFLISSSQDGHQWTLFFQNGKVKVFQGNQDSFTPVVNSLDPPLLTRYLRIHPQSWVHQIALRMEVLGCEAQDLY

SEQ ID NO: 307 - DNA, 4371 bp, synthetic construct
  misc_feature 1..4371: note = Variant of human B-domain deleted Factor VIII
  source 1..4371: mol_type = other DNA
atgcagattgaactgtctacctgcttcttcctctgtttgctgaggttctgctttagcgccactagacggtactaccttggcgctgtggagctgtcctgggactatatgcagagtgatttgggagagcttcccgtcgacgcacgatttcctcctcgcgttccaaagtcatcgcccttcaacacaagcgtggtgtacaagaagacgctcttcgtcgaattcaccgatcacctgttcaatatcgccaaacccagaccaccatggatgggtcttttggggcctaccatacaagcggaggtgtatgacacagttgttatcactctcaagaacatggcttctcatccggtaagtcttcacgcagtgggcgtgtcctactggaaagcttcagaaggagccgagtatgatgatcagacatcccagagggagaaagaagacgacaaggtatttccaggtgggtctcatacctatgtgtggcaagtgctcaaagagaatggccctatggcaagcgatccgctctgtttgacttacagctacctttcacacgttgacctcgtcaaggacctcaactccgggttgattggagccttgttggtatgcagggaaggatctcttgccaaagagaagacacagaccctccacaagtttatccttctctttgctgtgttcgatgagggcaaaagttggcatagcgaaacgaagaattccctcatgcaggatcgcgacgcagccagcgccagagcttggcccaagatgcacactgtgaacggatatgtcaataggtcacttcctggcttgattgggtgtcatcggaaaagtgtctactggcacgtgatcggaatggggacaacaccagaggtccactccatatttctcgaaggccataccttccttgttcgaaaccacagacaggcatccttggagatctctcccattacctttctcactgcccaaacgctccttatggacttgggtcagttccttctcttctgccatatcagctcacaccagcatgatggtatggaagcttatgtgaaagtcgacagttgtcctgaggagccacagttgcgcatgaagaataatgaagaagccgaggattacgacgacgatctcaccgattctgagatggacgtggtgaggtttgatgacgacaactctccctccttcattcaaatccggagcgtggcgaagaaacaccccaagacttgggtccactatatagcggcggaagaggaggattgggattacgctcctcttgtattggcaccagatgaccgctcatacaaaagccagtacctcaacaacggaccgcagagaattggccggaagtataagaaagtgcgatttatggcctatacagacgaaacctttaagacaagggaggccatccagcatgagagtgggattttgggacctcttctttacggcgaagttggtgataccctcctcatcatcttcaagaatcaagcttctcgcccctataacatttacccacacgggatcactgacgttaggcctttgtatagcagaagacttcccaaaggcgtgaagcatctcaaagacttccccattttgccaggcgagatctttaagtacaaatggaccgtcacagtggaagatggaccgactaaatcagaccctcgatgccttacgcggtactattcctccttcgtgaatatggagagagatttggcaagcggactcataggaccactcctcatctgttacaaggaatctgtagaccagaggggtaaccagattatgagtgataaacgcaatgtgatcctttttagcgtcttcgacgagaaccggtcctggtacttgaccgagaatatacaaaggttccttcccaaccccgcaggcgttcagttggaagaccctgagtttcaggccagcaatattatgcactcaatcaacggctatgtgtttgatagtctccagctttctgtttgcctccatgaagtagcctattggtacatcttgtcaattggtgctcaaacagacttcctctccgtcttcttctccggctacacctttaagcacaagatggtgtatgaggacactctcacactctttccattttctggagaaaccgtgttcatgagcatggagaatccaggcctttggatcttgggttgccacaacagtgattttcgcaatcggggaatgactgctctcctcaaagtcagcagctgtgataagaacacaggcgactattacgaagattcttacgaggacataagtgcctacttgttgtccaagaataacgccattgagcccagatcattctcccagaatcctcccgtgcttaaaaggcatcagcgcgaaatcaccagaactactcttcagtctgatcaagaggagattgactatgacgacaccataagcgtggaaatgaagaaggaggatttcgatatctatgacgaagatgagaaccagtctccgcggagctttcagaagaagacgcgacactacttcattgcagcagtcgaaaggctttgggactacggtatgtcatcatcccctcatgtgttgcgcaatagagctcagagtggaagtgttccacagttcaagaaagtcgtctttcaagagtttacagatggcagcttcacacagcctctctatcggggcgagcttaacgaacatttgggactccttggtccctatatccgagccgaagtggaggacaacattatggttacctttaggaatcaagcctctcgcccctacagcttctactcctccctcatcagttatgaggaggatcagagacaaggcgctgaaccacggaagaactttgtgaaaccgaatgagacgaagacctacttctggaaagtacagcaccacatggcccccacaaaagacgaattcgattgcaaagcatgggcgtatttttcagacgttgacttggagaaagatgtacattcaggacttattggtcctttgttggtgtgtcacactaacactctcaatccagcccatggcaggcaggtgacagtccaggaattcgctcttttctttaccatctttgatgagaccaagtcctggtacttcacggaaaacatggagcgcaattgcagagccccctgtaacatacagatggaggaccctacctttaaggaaaattatcggttccacgcaatcaacggatacattatggatacactccctggccttgtgatggctcaggaccaacgaatcaggtggtacctcctcagcatgggttctaatgagaacatacactccattcacttttcaggacatgtgttcactgtccggaagaaagaagagtataagatggccctctacaatttgtatccaggcgtgtttgagaccgttgaaatgcttccctctaaagctggcatctggagagtagagtgcttgatcggagaacatcttcacgcaggtatgagcaccttgttcctcgtgtacagcaacaaatgtcagaccccacttggcatggccagtggacacattcgcgactttcagatcacagcatctggccagtatggacaatgggccccaaagttggctcgcctccattactccggtagcataaatgcgtggtccactaaagaacctttcagctggattaaggtcgatcttcttgcccccatgatcatccacggcattaagacacagggagcgaggcagaaattctcctccctctacatctcacagttcattattatgtatagtttggacggcaagaagtggcaaacttatagaggtaacagtactggaacactcatggtgttcttcggcaacgttgatagctctggcatcaaacacaacatctttaatcctcccataatagctcggtacatcagattgcatccgacccactacagcattaggagtacactccgaatggagcttatgggttgcgacttgaattcctgttcaatgccactcggaatggagtctaaagccatctctgatgcacagataaccgccagtagctactttacgaacatgtttgctacgtggtcaccctctaaggcaaggcttcatttgcaaggccggtctaatgcctggagacctcaggtgaacaacccgaaagaatggctccaggtggactttcagaagaccatgaaagtaacaggtgtcactactcagggagttaagtccttgctcaccagcatgtatgtgaaggagttccttatttcctcatcacaagatggccaccagtggaccctcttctttcagaatggtaaggtcaaagtgtttcagggcaatcaagacagcttcacacccgtggtgaacagtcttgatcctccactcttgacacgataccttcgaatccatccacagtcttgggttcaccagattgcattgcgcatggaagtacttggatgcgaggctcaggacctctac

SEQ ID NO: 308 - protein, 1457 aa, synthetic construct
  REGION 1..1457: note = Variant of human B-domain deleted Factor VIII
MQIELSTCFFLCLLRFCFSATRRYYLGAVELSWDYMQSDLGELPVDARFPPRVPKSSPFNTSVVYKKTLFVEFTDHLFNIAKPRPPWMGLLGPTIQAEVYDTVVITLKNMASHPVSLHAVGVSYWKASEGAEYDDQTSQREKEDDKVFPGGSHTYVWQVLKENGPMASDPLCLTYSYLSHVDLVKDLNSGLIGALLVCREGSLAKEKTQTLHKFILLFAVFDEGKSWHSETKNSLMQDRDAASARAWPKMHTVNGYVNRSLPGLIGCHRKSVYWHVIGMGTTPEVHSIFLEGHTFLVRNHRQASLEISPITFLTAQTLLMDLGQFLLFCHISSHQHDGMEAYVKVDSCPEEPQLRMKNNEEAEDYDDDLTDSEMDVVRFDDDNSPSFIQIRSVAKKHPKTWVHYIAAEEEDWDYAPLVLAPDDRSYKSQYLNNGPQRIGRKYKKVRFMAYTDETFKTREAIQHESGILGPLLYGEVGDTLLIIFKNQASRPYNIYPHGITDVRPLYSRRLPKGVKHLKDFPILPGEIFKYKWTVTVEDGPTKSDPRCLTRYYSSFVNMERDLASGLIGPLLICYKESVDQRGNQIMSDKRNVILFSVFDENRSWYLTENIQRFLPNPAGVQLEDPEFQASNIMHSINGYVFDSLQLSVCLHEVAYWYILSIGAQTDFLSVFFSGYTFKHKMVYEDTLTLFPFSGETVFMSMENPGLWILGCHNSDFRNRGMTALLKVSSCDKNTGDYYEDSYEDISAYLLSKNNAIEPRSFSQNPPVLKRHQREITRTTLQSDQEEIDYDDTISVEMKKEDFDIYDEDENQSPRSFQKKTRHYFIAAVERLWDYGMSSSPHVLRNRAQSGSVPQFKKVVFQEFTDGSFTQPLYRGELNEHLGLLGPYIRAEVEDNIMVTFRNQASRPYSFYSSLISYEEDQRQGAEPRKNFVKPNETKTYFWKVQHHMAPTKDEFDCKAWAYFSDVDLEKDVHSGLIGPLLVCHTNTLNPAHGRQVTVQEFALFFTIFDETKSWYFTENMERNCRAPCNIQMEDPTFKENYRFHAINGYIMDTLPGLVMAQDQRIRWYLLSMGSNENIHSIHFSGHVFTVRKKEEYKMALYNLYPGVFETVEMLPSKAGIWRVECLIGEHLHAGMSTLFLVYSNKCQTPLGMASGHIRDFQITASGQYGQWAPKLARLHYSGSINAWSTKEPFSWIKVDLLAPMIIHGIKTQGARQKFSSLYISQFIIMYSLDGKKWQTYRGNSTGTLMVFFGNVDSSGIKHNIFNPPIIARYIRLHPTHYSIRSTLRMELMGCDLNSCSMPLGMESKAISDAQITASSYFTNMFATWSPSKARLHLQGRSNAWRPQVNNPKEWLQVDFQKTMKVTGVTTQGVKSLLTSMYVKEFLISSSQDGHQWTLFFQNGKVKVFQGNQDSFTPVVNSLDPPLLTRYLRIHPQSWVHQIALRMEVLGCEAQDLY

SEQ ID NO: 309 - DNA, 4371 bp, synthetic construct
  misc_feature 1..4371: note = Variant of human B-domain deleted Factor VIII
  source 1..4371: mol_type = other DNA
atgcagattgaactgtctacctgcttcttcctctgtttgctgaggttctgctttagcgccactagacggtactaccttggcgctgtggagctgtcctgggactatatgcagagtgatttgggagagcttcccgtcgacgcacgatttcctcctcgcgttccaaagtcatttcccgataacacaagcgtggtgtacaagaagacgctcttcgtcgaattcaccgatcacctgttcaatatcgccaaacccagaccaccatggatgggtcttttggggcctaccatacaagcggaggtgtatgacacagttgttatcactctcaagaacatggcttctcatccggtaagtcttcacgcagtgggcgtgtcctactggaaagcttcagaaggagccgagtatgatgatcagacatcccagagggagaaagaagacgacaaggtatttccaggtgggtctcatacctatgtgtggcaagtgctcaaagagaatggccctatggcaagcgatccgctctgtttgacttacagctacctttcacacgttgacctcgtcaaggacctcaactccgggttgattggagccttgttggtatgcagggaaggatctcttgccaaagagaagacacagaccctccacaagtttatccttctctttgctgtgttcgatgagggcaaaagttggcatagcgaaacgaagaattccctcatgcaggatcgcgacgcagccagcgccagagcttggcccaagatgcacactgtgaacggatatgtcaataggtcacttcctggcttgattgggtgtcatcggaaaagtgtctactggcacgtgatcggaatggggacaacaccagaggtccactccatatttctcgaaggccataccttccttgttcgaaaccacagacaggcatccttggagatctctcccattacctttctcactgcccaaacgctccttatggacttgggtcagttccttctcttctgccatatcagctcacaccagcatgatggtatggaagcttatgtgaaagtcgacagttgtcctgaggagccacagttgcgcatgaagaataatgaagaagccgaggattacgacgacgatctcaccgattctgagatggacgtggtgaggtttgatgacgacaactctccctccttcattcaaatccggagcgtggcgaagaaacaccccaagacttgggtccactatatagcggcggaagaggaggattgggattacgctcctcttgtattggcaccagatgaccgctcatacaaaagccagtacctcaacaacggaccgcagagaattggccggaagtataagaaagtgcgatttatggcctatacagacgaaacctttaagacaagggaggccatccagcatgagagtgggattttgggacctcttctttacggcgaagttggtgataccctcctcatcatcttcaagaatcaagcttctcgcccctataacatttacccacacgggatcactgacgttaggcctttgtatagcagaagacttcccaaaggcgtgaagcatctcaaagacttccccattttgccaggcgagatctttaagtacaaatggaccgtcacagtggaagatggaccgactaaatcagaccctcgatgccttacgcggtactattcctccttcgtgaatatggagagagatttggcaagcggactcataggaccactcctcatctgttacaaggaatctgtagaccagaggggtaaccagattatgagtgataaacgcaatgtgatcctttttagcgtcttcgacgagaaccggtcctggtacttgaccgagaatatacaaaggttccttcccaaccccgcaggcgttcagttggaagaccctgagtttcaggccagcaatattatgcactcaatcaacggctatgtgtttgatagtctccagctttctgtttgcctccatgaagtagcctattggtacatcttgtcaattggtgctcaaacagacttcctctccgtcttcttctccggctacacctttaagcacaagatggtgtatgaggacactctcacactctttccattttctggagaaaccgtgttcatgagcatggagaatccaggcctttggatcttgggttgccacaacagtgattttcgcaatcggggaatgactgctctcctcaaagtcagcagctgtgataagaacacaggcgactattacgaagattcttacgaggacataagtgcctacttgttgtccaagaataacgccattgagcccagatcattctcccagaatcctcccgtgcttaaaaggcatcagcgcgaaatcaccagaactactcttcagtctgatcaagaggagattgactatgacgacaccataagcgtggaaatgaagaaggaggatttcgatatctatgacgaagatgagaaccagtctccgcggagctttcagaagaagacgcgacactacttcattgcagcagtcgaaaggctttgggactacggtatgtcatcatcccctcatgtgttgcgcaatagagctcagagtggaagtgttccacagttcaagaaagtcgtctttcaagagtttacagatggcagcttcacacagcctctctatcggggcgagcttaacgaacatttgggactccttggtccctatatccgagccgaagtggaggacaacattatggttacctttaggaatcaagcctctcgcccctacagcttctactcctccctcatcagttatgaggaggatcagagacaaggcgctgaaccacggaagaactttgtgaaaccgaatgagacgaagacctacttctggaaagtacagcaccacatggcccccacaaaagacgaattcgattgcaaagcatgggcgtatttttcagacgttgacttggagaaagatgtacattcaggacttattggtcctttgttggtgtgtcacactaacactctcaatccagcccatggcaggcaggtgacagtccaggaattcgctcttttctttaccatctttgatgagaccaagtcctggtacttcacggaaaacatggagcgcaattgcagagccccctgtaacatacagatggaggaccctacctttaaggaaaattatcggttccacgcaatcaacggatacattatggatacactccctggccttgtgatggctcaggaccaacgaatcaggtggtacctcctcagcatgggttctaatgagaacatacactccattcacttttcaggacatgtgttcactgtccggaagaaagaagagtataagatggccctctacaatttgtatccaggcgtgtttgagaccgttgaaatgcttccctctaaagctggcatctggagagtagagtgcttgatcggagaacatcttcacgcaggtatgagcaccttgttcctcgtgtacagcaacaaatgtcagaccccacttggcatggccagtggacacattcgcgactttcagatcacagcatctggccagtatggacaatgggccccaaagttggctcgcctccattactccggtagcataaatgcgtggtccactaaagaacctttcagctggattaaggtcgatcttcttgcccccatgatcatccacggcattaagacacagggagcgaggcagaaattctcctccctctacatctcacagttcattattatgtatagtttggacggcaagaagtggcaaacttatagaggtaacagtactggaacactcatggtgttcttcggcaacgttgatagctctggcatcaaacacaacatctttaatcctcccataatagctcggtacatcagattgcatccgacccactacagcattaggagtacactccgaatggagcttatgggttgcgacttgaattcctgttcaatgccactcggaatggagtctaaagccatctctgatgcacagataaccgccagtagctactttacgaacatgtttgctacgtggtcaccctctaaggcaaggcttcatttgcaaggccggtctaatgcctggagacctcaggtgaacaacccgaaagaatggctccaggtggactttcagaagaccatgaaagtaacaggtgtcactactcagggagttaagtccttgctcaccagcatgtatgtgaaggagttccttatttcctcatcacaagatggccaccagtggaccctcttctttcagaatggtaaggtcaaagtgtttcagggcaatcaagacagcttcacacccgtggtgaacagtcttgatcctccactcttgacacgataccttcgaatccatccacagtcttgggttcaccagattgcattgcgcatggaagtacttggatgcgaggctcaggacctctac

SEQ ID NO: 310 - protein, 1457 aa, synthetic construct
  REGION 1..1457: note = Variant of human B-domain deleted Factor VIII
MQIELSTCFFLCLLRFCFSATRRYYLGAVELSWDYMQSDLGELPVDARFPPRVPKSFPDNTSVVYKKTLFVEFTDHLFNIAKPRPPWMGLLGPTIQAEVYDTVVITLKNMASHPVSLHAVGVSYWKASEGAEYDDQTSQREKEDDKVFPGGSHTYVWQVLKENGPMASDPLCLTYSYLSHVDLVKDLNSGLIGALLVCREGSLAKEKTQTLHKFILLFAVFDEGKSWHSETKNSLMQDRDAASARAWPKMHTVNGYVNRSLPGLIGCHRKSVYWHVIGMGTTPEVHSIFLEGHTFLVRNHRQASLEISPITFLTAQTLLMDLGQFLLFCHISSHQHDGMEAYVKVDSCPEEPQLRMKNNEEAEDYDDDLTDSEMDVVRFDDDNSPSFIQIRSVAKKHPKTWVHYIAAEEEDWDYAPLVLAPDDRSYKSQYLNNGPQRIGRKYKKVRFMAYTDETFKTREAIQHESGILGPLLYGEVGDTLLIIFKNQASRPYNIYPHGITDVRPLYSRRLPKGVKHLKDFPILPGEIFKYKWTVTVEDGPTKSDPRCLTRYYSSFVNMERDLASGLIGPLLICYKESVDQRGNQIMSDKRNVILFSVFDENRSWYLTENIQRFLPNPAGVQLEDPEFQASNIMHSINGYVFDSLQLSVCLHEVAYWYILSIGAQTDFLSVFFSGYTFKHKMVYEDTLTLFPFSGETVFMSMENPGLWILGCHNSDFRNRGMTALLKVSSCDKNTGDYYEDSYEDISAYLLSKNNAIEPRSFSQNPPVLKRHQREITRTTLQSDQEEIDYDDTISVEMKKEDFDIYDEDENQSPRSFQKKTRHYFIAAVERLWDYGMSSSPHVLRNRAQSGSVPQFKKVVFQEFTDGSFTQPLYRGELNEHLGLLGPYIRAEVEDNIMVTFRNQASRPYSFYSSLISYEEDQRQGAEPRKNFVKPNETKTYFWKVQHHMAPTKDEFDCKAWAYFSDVDLEKDVHSGLIGPLLVCHTNTLNPAHGRQVTVQEFALFFTIFDETKSWYFTENMERNCRAPCNIQMEDPTFKENYRFHAINGYIMDTLPGLVMAQDQRIRWYLLSMGSNENIHSIHFSGHVFTVRKKEEYKMALYNLYPGVFETVEMLPSKAGIWRVECLIGEHLHAGMSTLFLVYSNKCQTPLGMASGHIRDFQITASGQYGQWAPKLARLHYSGSINAWSTKEPFSWIKVDLLAPMIIHGIKTQGARQKFSSLYISQFIIMYSLDGKKWQTYRGNSTGTLMVFFGNVDSSGIKHNIFNPPIIARYIRLHPTHYSIRSTLRMELMGCDLNSCSMPLGMESKAISDAQITASSYFTNMFATWSPSKARLHLQGRSNAWRPQVNNPKEWLQVDFQKTMKVTGVTTQGVKSLLTSMYVKEFLISSSQDGHQWTLFFQNGKVKVFQGNQDSFTPVVNSLDPPLLTRYLRIHPQSWVHQIALRMEVLGCEAQDLY

SEQ ID NO: 311 - DNA, 4371 bp, synthetic construct
  misc_feature 1..4371: note = Variant of human B-domain deleted Factor VIII
  source 1..4371: mol_type = other DNA
atgcagattgaactgtctacctgcttcttcctctgtttgctgaggttctgctttagcgccactagacggtactaccttggcgctgtggagctgtcctgggactatatgcagagtgatttgggagagcttcccgtcgacgcacgatttcctcctcgcgttccaaagtcatttcccttcaacacaagcgtggtgtacaagaagacgctcttcgtcgaattcaccgatcacctgttcaatatcgccaaacccagaccaccatggatgggtcttttggggcctaccatacaagcggaggtgtatgacacagttgttatcactctcaagaacatggcttctcatccggtaagtcttcacgcagtgggcgtgtcctactggaaagcttcagaaggagccgagtatgatgatcagacatcccagagggagaaagaagacgacaaggtatttccaggtgggtctcatacctatgtgtggcaagtgctcaaagagaatggccctatggcaagcgatccgctctgtttgacttacagctacctttcacacgttgacctcgtcaaggacctcaactccgggttgattggagccttgttggtatgcagggaaggatctcttgccaaagagaagacacagaccctccacaagtttatccttctctttgctgtgttcgatgagggcaaaagttggcatagcgaaacgaagaattccctcatgcaggatcgcgacgcagccagcgccagagcttggcccaagatgcacactgtgaacggatatgtcaataggtcacttcctggcttgattgggtgtcatcggaaaagtgtctactggcacgtgatcggaatggggacaacaccagaggtccactccatatttctcgaaggccataccttccttgttcgaaaccacagacaggcatccttggagatctctcccattacctttctcactgcccaaacgctccttatggacttgggtcagttccttctcttctgccatatcagctcacaccagcatgatggtatggaagcttatgtggaggtcgacagttgtcctgaggagccacagttgcgcatgaagaataatgaagaagccgaggattacgacgacgatctcaccgattctgagatggacgtggtgaggtttgatgacgacaactctccctccttcattcaaatccggagcgtggcgaagaaacaccccaagacttgggtccactatatagcggcggaagaggaggattgggattacgctcctcttgtattggcaccagatgaccgctcatacaaaagccagtacctcaacaacggaccgcagagaattggccggaagtataagaaagtgcgatttatggcctatacagacgaaacctttaagacaagggaggccatccagcatgagagtgggattttgggacctcttctttacggcgaagttggtgataccctcctcatcatcttcaagaatcaagcttctcgcccctataacatttacccacacgggatcactgacgttaggcctttgtatagcagaagacttcccaaaggcgtgaagcatctcaaagacttccccattttgccaggcgagatctttaagtacaaatggaccgtcacagtggaagatggaccgactaaatcagaccctcgatgccttacgcggtactattcctccttcgtgaatatggagagagatttggcaagcggactcataggaccactcctcatctgttacaaggaatctgtagaccagaggggtaaccagattatgagtgataaacgcaatgtgatcctttttagcgtcttcgacgagaaccggtcctggtacttgaccgagaatatacaaaggttccttcccaaccccgcaggcgttcagttggaagaccctgagtttcaggccagcaatattatgcactcaatcaacggctatgtgtttgatagtctccagctttctgtttgcctccatgaagtagcctattggtacatcttgtcaattggtgctcaaacagacttcctctccgtcttcttctccggctacacctttaagcacaagatggtgtatgaggacactctcacactctttccattttctggagaaaccgtgttcatgagcatggagaatccaggcctttggatcttgggttgccacaacagtgattttcgcaatcggggaatgactgctctcctcaaagtcagcagctgtgataagaacacaggcgactattacgaagattcttacgaggacataagtgcctacttgttgtccaagaataacgccattgagcccagatcattctcccagaatcctcccgtgcttaaaaggcatcagcgcgaaatcaccagaactactcttcagtctgatcaagaggagattgactatgacgacaccataagcgtggaaatgaagaaggaggatttcgatatctatgacgaagatgagaaccagtctccgcggagctttcagaagaagacgcgacactacttcattgcagcagtcgaaaggctttgggactacggtatgtcatcatcccctcatgtgttgcgcaatagagctcagagtggaagtgttccacagttcaagaaagtcgtctttcaagagtttacagatggcagcttcacacagcctctctatcggggcgagcttaacgaacatttgggactccttggtccctatatccgagccgaagtggaggacaacattatggttacctttaggaatcaagcctctcgcccctacagcttctactcctccctcatcagttatgaggaggatcagagacaaggcgctgaaccacggaagaactttgtgaaaccgaatgagacgaagacctacttctggaaagtacagcaccacatggcccccacaaaagacgaattcgattgcaaagcatgggcgtatttttcagacgttgacttggagaaagatgtacattcaggacttattggtcctttgttggtgtgtcacactaacactctcaatccagcccatggcaggcaggtgacagtccaggaattcgctcttttctttaccatctttgatgagaccaagtcctggtacttcacggaaaacatggagcgcaattgcagagccccctgtaacatacagatggaggaccctacctttaaggaaaattatcggttccacgcaatcaacggatacattatggatacactccctggccttgtgatggctcaggaccaacgaatcaggtggtacctcctcagcatgggttctaatgagaacatacactccattcacttttcaggacatgtgttcactgtccggaagaaagaagagtataagatggccctctacaatttgtatccaggcgtgtttgagaccgttgaaatgcttccctctaaagctggcatctggagagtagagtgcttgatcggagaacatcttcacgcaggtatgagcaccttgttcctcgtgtacagcaacaaatgtcagaccccacttggcatggccagtggacacattcgcgactttcagatcacagcatctggccagtatggacaatgggccccaaagttggctcgcctccattactccggtagcataaatgcgtggtccactaaagaacctttcagctggattaaggtcgatcttcttgcccccatgatcatccacggcattaagacacagggagcgaggcagaaattctcctccctctacatctcacagttcattattatgtatagtttggacggcaagaagtggcaaacttatagaggtaacagtactggaacactcatggtgttcttcggcaacgttgatagctctggcatcaaacacaacatctttaatcctcccataatagctcggtacatcagattgcatccgacccactacagcattaggagtacactccgaatggagcttatgggttgcgacttgaattcctgttcaatgccactcggaatggagtctaaagccatctctgatgcacagataaccgccagtagctactttacgaacatgtttgctacgtggtcaccctctaaggcaaggcttcatttgcaaggccggtctaatgcctggagacctcaggtgaacaacccgaaagaatggctccaggtggactttcagaagaccatgaaagtaacaggtgtcactactcagggagttaagtccttgctcaccagcatgtatgtgaaggagttccttatttcctcatcacaagatggccaccagtggaccctcttctttcagaatggtaaggtcaaagtgtttcagggcaatcaagacagcttcacacccgtggtgaacagtcttgatcctccactcttgacacgataccttcgaatccatccacagtcttgggttcaccagattgcattgcgcatggaagtacttggatgcgaggctcaggacctctac

SEQ ID NO: 312 - protein, 1457 aa, synthetic construct
  REGION 1..1457: note = Variant of human B-domain deleted Factor VIII
MQIELSTCFFLCLLRFCFSATRRYYLGAVELSWDYMQSDLGELPVDARFPPRVPKSFPFNTSVVYKKTLFVEFTDHLFNIAKPRPPWMGLLGPTIQAEVYDTVVITLKNMASHPVSLHAVGVSYWKASEGAEYDDQTSQREKEDDKVFPGGSHTYVWQVLKENGPMASDPLCLTYSYLSHVDLVKDLNSGLIGALLVCREGSLAKEKTQTLHKFILLFAVFDEGKSWHSETKNSLMQDRDAASARAWPKMHTVNGYVNRSLPGLIGCHRKSVYWHVIGMGTTPEVHSIFLEGHTFLVRNHRQASLEISPITFLTAQTLLMDLGQFLLFCHISSHQHDGMEAYVEVDSCPEEPQLRMKNNEEAEDYDDDLTDSEMDVVRFDDDNSPSFIQIRSVAKKHPKTWVHYIAAEEEDWDYAPLVLAPDDRSYKSQYLNNGPQRIGRKYKKVRFMAYTDETFKTREAIQHESGILGPLLYGEVGDTLLIIFKNQASRPYNIYPHGITDVRPLYSRRLPKGVKHLKDFPILPGEIFKYKWTVTVEDGPTKSDPRCLTRYYSSFVNMERDLASGLIGPLLICYKESVDQRGNQIMSDKRNVILFSVFDENRSWYLTENIQRFLPNPAGVQLEDPEFQASNIMHSINGYVFDSLQLSVCLHEVAYWYILSIGAQTDFLSVFFSGYTFKHKMVYEDTLTLFPFSGETVFMSMENPGLWILGCHNSDFRNRGMTALLKVSSCDKNTGDYYEDSYEDISAYLLSKNNAIEPRSFSQNPPVLKRHQREITRTTLQSDQEEIDYDDTISVEMKKEDFDIYDEDENQSPRSFQKKTRHYFIAAVERLWDYGMSSSPHVLRNRAQSGSVPQFKKVVFQEFTDGSFTQPLYRGELNEHLGLLGPYIRAEVEDNIMVTFRNQASRPYSFYSSLISYEEDQRQGAEPRKNFVKPNETKTYFWKVQHHMAPTKDEFDCKAWAYFSDVDLEKDVHSGLIGPLLVCHTNTLNPAHGRQVTVQEFALFFTIFDETKSWYFTENMERNCRAPCNIQMEDPTFKENYRFHAINGYIMDTLPGLVMAQDQRIRWYLLSMGSNENIHSIHFSGHVFTVRKKEEYKMALYNLYPGVFETVEMLPSKAGIWRVECLIGEHLHAGMSTLFLVYSNKCQTPLGMASGHIRDFQITASGQYGQWAPKLARLHYSGSINAWSTKEPFSWIKVDLLAPMIIHGIKTQGARQKFSSLYISQFIIMYSLDGKKWQTYRGNSTGTLMVFFGNVDSSGIKHNIFNPPIIARYIRLHPTHYSIRSTLRMELMGCDLNSCSMPLGMESKAISDAQITASSYFTNMFATWSPSKARLHLQGRSNAWRPQVNNPKEWLQVDFQKTMKVTGVTTQGVKSLLTSMYVKEFLISSSQDGHQWTLFFQNGKVKVFQGNQDSFTPVVNSLDPPLLTRYLRIHPQSWVHQIALRMEVLGCEAQDLY

SEQ ID NO: 313 - DNA, 4371 bp, synthetic construct
  misc_feature 1..4371: note = Variant of human B-domain deleted Factor VIII
  source 1..4371: mol_type = other DNA
atgcagattgaactgtctacctgcttcttcctctgtttgctgaggttctgctttagcgccactagacggtactaccttggcgctgtggagctgtcctgggactatatgcagagtgatttgggagagcttcccgtcgacgcacgatttcctcctcgcgttccaaagtcatttcccttcaacacaagcgtggtgtacaagaagacgctcttcgtcgaattcaccgatcacctgttcaatatcgccaaacccagaccaccatggatgggtcttttggggcctaccatacaagcggaggtgtatgacacagttgttatcactctcaagaacatggcttctcatccggtaagtcttcacgcagtgggcgtgtcctactggaaagcttcagaaggagccgagtatgatgatcagacatcccagagggagaaagaagacgacaaggtatttccaggtgggtctcatacctatgtgtggcaagtgctcaaagagaatggccctatggcaagcgatccgctctgtttgacttacagctacctttcacacgttgacctcgtcaaggacctcaactccgggttgattggagccttgttggtatgcagggaaggatctcttgccaaagagaagacacagaccctccacaagtttatccttctctttgctgtgttcgatgagggcaaaagttggcatagcgaaacgaagaattccctcatgcaggatcgcgacgcagccagcgccagagcttggcccaagatgcacactgtgaacggatatgtcaataggtcacttcctggcttgattgggtgtcatcggaaaagtgtctactggcacgtgatcggaatggggacaacaccagaggtccactccatatttctcgaaggccataccttccttgttcgaaaccacagacaggcatccttggagatctctcccattacctttctcactgcccaaacgctccttatggacttgggtcagttccttctcttctgccatatcagctcacaccagcatgatggtatggaagcttatgtgaaagtcgacagttgtcctgaggagccacagttgcgcatgaagaataatgaagaaggggaggattacgacgacgatctcaccgattctgagatggacgtggtgaggtttgatgacgacaactctccctccttcattcaaatccggagcgtggcgaagaaacaccccaagacttgggtccactatatagcggcggaagaggaggattgggattacgctcctcttgtattggcaccagatgaccgctcatacaaaagccagtacctcaacaacggaccgcagagaattggccggaagtataagaaagtgcgatttatggcctatacagacgaaacctttaagacaagggaggccatccagcatgagagtgggattttgggacctcttctttacggcgaagttggtgataccctcctcatcatcttcaagaatcaagcttctcgcccctataacatttacccacacgggatcactgacgttaggcctttgtatagcagaagacttcccaaaggcgtgaagcatctcaaagacttccccattttgccaggcgagatctttaagtacaaatggaccgtcacagtggaagatggaccgactaaatcagaccctcgatgccttacgcggtactattcctccttcgtgaatatggagagagatttggcaagcggactcataggaccactcctcatctgttacaaggaatctgtagaccagaggggtaaccagattatgagtgataaacgcaatgtgatcctttttagcgtcttcgacgagaaccggtcctggtacttgaccgagaatatacaaaggttccttcccaaccccgcaggcgttcagttggaagaccctgagtttcaggccagcaatattatgcactcaatcaacggctatgtgtttgatagtctccagctttctgtttgcctccatgaagtagcctattggtacatcttgtcaattggtgctcaaacagacttcctctccgtcttcttctccggctacacctttaagcacaagatggtgtatgaggacactctcacactctttccattttctggagaaaccgtgttcatgagcatggagaatccaggcctttggatcttgggttgccacaacagtgattttcgcaatcggggaatgactgctctcctcaaagtcagcagctgtgataagaacacaggcgactattacgaagattcttacgaggacataagtgcctacttgttgtccaagaataacgccattgagcccagatcattctcccagaatcctcccgtgcttaaaaggcatcagcgcgaaatcaccagaactactcttcagtctgatcaagaggagattgactatgacgacaccataagcgtggaaatgaagaaggaggatttcgatatctatgacgaagatgagaaccagtctccgcggagctttcagaagaagacgcgacactacttcattgcagcagtcgaaaggctttgggactacggtatgtcatcatcccctcatgtgttgcgcaatagagctcagagtggaagtgttccacagttcaagaaagtcgtctttcaagagtttacagatggcagcttcacacagcctctctatcggggcgagcttaacgaacatttgggactccttggtccctatatccgagccgaagtggaggacaacattatggttacctttaggaatcaagcctctcgcccctacagcttctactcctccctcatcagttatgaggaggatcagagacaaggcgctgaaccacggaagaactttgtgaaaccgaatgagacgaagacctacttctggaaagtacagcaccacatggcccccacaaaagacgaattcgattgcaaagcatgggcgtatttttcagacgttgacttggagaaagatgtacattcaggacttattggtcctttgttggtgtgtcacactaacactctcaatccagcccatggcaggcaggtgacagtccaggaattcgctcttttctttaccatctttgatgagaccaagtcctggtacttcacggaaaacatggagcgcaattgcagagccccctgtaacatacagatggaggaccctacctttaaggaaaattatcggttccacgcaatcaacggatacattatggatacactccctggccttgtgatggctcaggaccaacgaatcaggtggtacctcctcagcatgggttctaatgagaacatacactccattcacttttcaggacatgtgttcactgtccggaagaaagaagagtataagatggccctctacaatttgtatccaggcgtgtttgagaccgttgaaatgcttccctctaaagctggcatctggagagtagagtgcttgatcggagaacatcttcacgcaggtatgagcaccttgttcctcgtgtacagcaacaaatgtcagaccccacttggcatggccagtggacacattcgcgactttcagatcacagcatctggccagtatggacaatgggccccaaagttggctcgcctccattactccggtagcataaatgcgtggtccactaaagaacctttcagctggattaaggtcgatcttcttgcccccatgatcatccacggcattaagacacagggagcgaggcagaaattctcctccctctacatctcacagttcattattatgtatagtttggacggcaagaagtggcaaacttatagaggtaacagtactggaacactcatggtgttcttcggcaacgttgatagctctggcatcaaacacaacatctttaatcctcccataatagctcggtacatcagattgcatccgacccactacagcattaggagtacactccgaatggagcttatgggttgcgacttgaattcctgttcaatgccactcggaatggagtctaaagccatctctgatgcacagataaccgccagtagctactttacgaacatgtttgctacgtggtcaccctctaaggcaaggcttcatttgcaaggccggtctaatgcctggagacctcaggtgaacaacccgaaagaatggctccaggtggactttcagaagaccatgaaagtaacaggtgtcactactcagggagttaagtccttgctcaccagcatgtatgtgaaggagttccttatttcctcatcacaagatggccaccagtggaccctcttctttcagaatggtaaggtcaaagtgtttcagggcaatcaagacagcttcacacccgtggtgaacagtcttgatcctccactcttgacacgataccttcgaatccatccacagtcttgggttcaccagattgcattgcgcatggaagtacttggatgcgaggctcaggacctctac

SEQ ID NO: 314 - protein, 1457 aa, synthetic construct
  REGION 1..1457: note = Variant of human B-domain deleted Factor VIII
MQIELSTCFFLCLLRFCFSATRRYYLGAVELSWDYMQSDLGELPVDARFPPRVPKSFPFNTSVVYKKTLFVEFTDHLFNIAKPRPPWMGLLGPTIQAEVYDTVVITLKNMASHPVSLHAVGVSYWKASEGAEYDDQTSQREKEDDKVFPGGSHTYVWQVLKENGPMASDPLCLTYSYLSHVDLVKDLNSGLIGALLVCREGSLAKEKTQTLHKFILLFAVFDEGKSWHSETKNSLMQDRDAASARAWPKMHTVNGYVNRSLPGLIGCHRKSVYWHVIGMGTTPEVHSIFLEGHTFLVRNHRQASLEISPITFLTAQTLLMDLGQFLLFCHISSHQHDGMEAYVKVDSCPEEPQLRMKNNEEGEDYDDDLTDSEMDVVRFDDDNSPSFIQIRSVAKKHPKTWVHYIAAEEEDWDYAPLVLAPDDRSYKSQYLNNGPQRIGRKYKKVRFMAYTDETFKTREAIQHESGILGPLLYGEVGDTLLIIFKNQASRPYNIYPHGITDVRPLYSRRLPKGVKHLKDFPILPGEIFKYKWTVTVEDGPTKSDPRCLTRYYSSFVNMERDLASGLIGPLLICYKESVDQRGNQIMSDKRNVILFSVFDENRSWYLTENIQRFLPNPAGVQLEDPEFQASNIMHSINGYVFDSLQLSVCLHEVAYWYILSIGAQTDFLSVFFSGYTFKHKMVYEDTLTLFPFSGETVFMSMENPGLWILGCHNSDFRNRGMTALLKVSSCDKNTGDYYEDSYEDISAYLLSKNNAIEPRSFSQNPPVLKRHQREITRTTLQSDQEEIDYDDTISVEMKKEDFDIYDEDENQSPRSFQKKTRHYFIAAVERLWDYGMSSSPHVLRNRAQSGSVPQFKKVVFQEFTDGSFTQPLYRGELNEHLGLLGPYIRAEVEDNIMVTFRNQASRPYSFYSSLISYEEDQRQGAEPRKNFVKPNETKTYFWKVQHHMAPTKDEFDCKAWAYFSDVDLEKDVHSGLIGPLLVCHTNTLNPAHGRQVTVQEFALFFTIFDETKSWYFTENMERNCRAPCNIQMEDPTFKENYRFHAINGYIMDTLPGLVMAQDQRIRWYLLSMGSNENIHSIHFSGHVFTVRKKEEYKMALYNLYPGVFETVEMLPSKAGIWRVECLIGEHLHAGMSTLFLVYSNKCQTPLGMASGHIRDFQITASGQYGQWAPKLARLHYSGSINAWSTKEPFSWIKVDLLAPMIIHGIKTQGARQKFSSLYISQFIIMYSLDGKKWQTYRGNSTGTLMVFFGNVDSSGIKHNIFNPPIIARYIRLHPTHYSIRSTLRMELMGCDLNSCSMPLGMESKAISDAQITASSYFTNMFATWSPSKARLHLQGRSNAWRPQVNNPKEWLQVDFQKTMKVTGVTTQGVKSLLTSMYVKEFLISSSQDGHQWTLFFQNGKVKVFQGNQDSFTPVVNSLDPPLLTRYLRIHPQSWVHQIALRMEVLGCEAQDLY

SEQ ID NO: 315 - DNA, 4371 bp, synthetic construct
  misc_feature 1..4371: note = Variant of human B-domain deleted Factor VIII
  source 1..4371: mol_type = other DNA
atgcagattgaactgtctacctgcttcttcctctgtttgctgaggttctgctttagcgccactagacggtactaccttggcgctgtggagctgtcctgggactatatgcagagtgatttgggagagcttcccgtcgacgcacgatttcctcctcgcgttccaaagtcatttaagttcaacacaagcgtggtgtacaagaagacgctcttcgtcgaattcaccgatcacctgttcaatatcgccaaacccagaccaccatggatgggtcttttggggcctaccatacaagcggaggtgtatgacacagttgttatcactctcaagaacatggcttctcatccggtaagtcttcacgcagtgggcgtgtcctactggaaagcttcagaaggagccgagtatgatgatcagacatcccagagggagaaagaagacgacaaggtatttccaggtgggtctcatacctatgtgtggcaagtgctcaaagagaatggccctatggcaagcgatccgctctgtttgacttacagctacctttcacacgttgacctcgtcaaggacctcaactccgggttgattggagccttgttggtatgcagggaaggatctcttgccaaagagaagacacagaccctccacaagtttatccttctctttgctgtgttcgatgagggcaaaagttggcatagcgaaacgaagaattccctcatgcaggatcgcgacgcagccagcgccagagcttggcccaagatgcacactgtgaacggatatgtcaataggtcacttcctggcttgattgggtgtcatcggaaaagtgtctactggcacgtgatcggaatggggacaacaccagaggtccactccatatttctcgaaggccataccttccttgttcgaaaccacagacaggcatccttggagatctctcccattacctttctcactgcccaaacgctccttatggacttgggtcagttccttctcttctgccatatcagctcacaccagcatgatggtatggaagcttatgtgaaagtcgacagttgtcctgaggagccacagttgcgcatgaagaataatgaagaagccgaggattacgacgacgatctcaccgattctgagatggacgtggtgaggtttgatgacgacaactctccctccttcattcaaatccggagcgtggcgaagaaacaccccaagacttgggtccactatatagcggcggaagaggaggattgggattacgctcctcttgtattggcaccagatgaccgctcatacaaaagccagtacctcaacaacggaccgcagagaattggccggaagtataagaaagtgcgatttatggcctatacagacgaaacctttaagacaagggaggccatccagcatgagagtgggattttgggacctcttctttacggcgaagttggtgataccctcctcatcatcttcaagaatcaagcttctcgcccctataacatttacccacacgggatcactgacgttaggcctttgtatagcagaagacttcccaaaggcgtgaagcatctcaaagacttccccattttgccaggcgagatctttaagtacaaatggaccgtcacagtggaagatggaccgactaaatcagaccctcgatgccttacgcggtactattcctccttcgtgaatatggagagagatttggcaagcggactcataggaccactcctcatctgttacaaggaatctgtagaccagaggggtaaccagattatgagtgataaacgcaatgtgatcctttttagcgtcttcgacgagaaccggtcctggtacttgaccgagaatatacaaaggttccttcccaaccccgcaggcgttcagttggaagaccctgagtttcaggccagcaatattatgcactcaatcaacggctatgtgtttgatagtctccagctttctgtttgcctccatgaagtagcctattggtacatcttgtcaattggtgctcaaacagacttcctctccgtcttcttctccggctacacctttaagcacaagatggtgtatgaggacactctcacactctttccattttctggagaaaccgtgttcatgagcatggagaatccaggcctttggatcttgggttgccacaacagtgattttcgcaatcggggaatgactgctctcctcaaagtcagcagctgtgataagaacacaggcgactattacgaagattcttacgaggacataagtgcctacttgttgtccaagaataacgccattgagcccagatcattctcccagaatcctcccgtgcttaaaaggcatcagcgcgaaatcaccagaactactcttcagtctgatcaagaggagattgactatgacgacaccataagcgtggaaatgaagaaggaggatttcgatatctatgacgaagatgagaaccagtctccgcggagctttcagaagaagacgcgacactacttcattgcagcagtcgaaaggctttgggactacggtatgtcatcatcccctcatgtgttgcgcaatagagctcagagtggaagtgttccacagttcaagaaagtcgtctttcaagagtttacagatggcagcttcacacagcctctctatcggggcgagcttaacgaacatttgggactccttggtccctatatccgagccgaagtggaggacaacattatggttacctttaggaatcaagcctctcgcccctacagcttctactcctccctcatcagttatgaggaggatcagagacaaggcgctgaaccacggaagaactttgtgaaaccgaatgagacgaagacctacttctggaaagtacagcaccacatggcccccacaaaagacgaattcgattgcaaagcatgggcgtatttttcagacgttgacttggagaaagatgtacattcaggacttattggtcctttgttggtgtgtcacactaacactctcaatccagcccatggcaggcaggtgacagtccaggaattcgctcttttctttaccatctttgatgagaccaagtcctggtacttcacggaaaacatggagcgcaattgcagagccccctgtaacatacagatggaggaccctacctttaaggaaaattatcggttccacgcaatcaacggatacattatggatacactccctggccttgtgatggctcaggaccaacgaatcaggtggtacctcctcagcatgggttctaatgagaacatacactccattcacttttcaggacatgtgttcactgtccggaagaaagaagagtataagatggccctctacaatttgtatccaggcgtgtttgagaccgttgaaatgcttccctctaaagctggcatctggagagtagagtgcttgatcggagaacatcttcacgcaggtatgagcaccttgttcctcgtgtacagcaacaaatgtcagaccccacttggcatggccagtggacacattcgcgactttcagatcacagcatctggccagtatggacaatgggccccaaagttggctcgcctccattactccggtagcataaatgcgtggtccactaaagaacctttcagctggattaaggtcgatcttcttgcccccatgatcatccacggcattaagacacagggagcgaggcagaaattctcctccctctacatctcacagttcattattatgtatagtttggacggcaagaagtggcaaacttatagaggtaacagtactggaacactcatggtgttcttcggcaacgttgatagctctggcatcaaacacaacatctttaatcctcccataatagctcggtacatcagattgcatccgacccactacagcattaggagtacactccgaatggagcttatgggttgcgacttgaattcctgttcaatgccactcggaatggagtctaaagccatctctgatgcacagataaccgccagtagctactttacgaacatgtttgctacgtggtcaccctctaaggcaaggcttcatttgcaaggccggtctaatgcctggagacctcaggtgaacaacccgaaagaatggctccaggtggactttcagaagaccatgaaagtaacaggtgtcactactcagggagttaagtccttgctcaccagcatgtatgtgaaggagttccttatttcctcatcacaagatggccaccagtggaccctcttctttcagaatggtaaggtcaaagtgtttcagggcaatcaagacagcttcacacccgtggtgaacagtcttgatcctccactcttgacacgataccttcgaatccatccacagtcttgggttcaccagattgcattgcgcatggaagtacttggatgcgaggctcaggacctctac

SEQ ID NO: 316 - protein, 1457 aa, synthetic construct
  REGION 1..1457: note = Variant of human B-domain deleted Factor VIII
MQIELSTCFFLCLLRFCFSATRRYYLGAVELSWDYMQSDLGELPVDARFPPRVPKSFKFNTSVVYKKTLFVEFTDHLFNIAKPRPPWMGLLGPTIQAEVYDTVVITLKNMASHPVSLHAVGVSYWKASEGAEYDDQTSQREKEDDKVFPGGSHTYVWQVLKENGPMASDPLCLTYSYLSHVDLVKDLNSGLIGALLVCREGSLAKEKTQTLHKFILLFAVFDEGKSWHSETKNSLMQDRDAASARAWPKMHTVNGYVNRSLPGLIGCHRKSVYWHVIGMGTTPEVHSIFLEGHTFLVRNHRQASLEISPITFLTAQTLLMDLGQFLLFCHISSHQHDGMEAYVKVDSCPEEPQLRMKNNEEAEDYDDDLTDSEMDVVRFDDDNSPSFIQIRSVAKKHPKTWVHYIAAEEEDWDYAPLVLAPDDRSYKSQYLNNGPQRIGRKYKKVRFMAYTDETFKTREAIQHESGILGPLLYGEVGDTLLIIFKNQASRPYNIYPHGITDVRPLYSRRLPKGVKHLKDFPILPGEIFKYKWTVTVEDGPTKSDPRCLTRYYSSFVNMERDLASGLIGPLLICYKESVDQRGNQIMSDKRNVILFSVFDENRSWYLTENIQRFLPNPAGVQLEDPEFQASNIMHSINGYVFDSLQLSVCLHEVAYWYILSIGAQTDFLSVFFSGYTFKHKMVYEDTLTLFPFSGETVFMSMENPGLWILGCHNSDFRNRGMTALLKVSSCDKNTGDYYEDSYEDISAYLLSKNNAIEPRSFSQNPPVLKRHQREITRTTLQSDQEEIDYDDTISVEMKKEDFDIYDEDENQSPRSFQKKTRHYFIAAVERLWDYGMSSSPHVLRNRAQSGSVPQFKKVVFQEFTDGSFTQPLYRGELNEHLGLLGPYIRAEVEDNIMVTFRNQASRPYSFYSSLISYEEDQRQGAEPRKNFVKPNETKTYFWKVQHHMAPTKDEFDCKAWAYFSDVDLEKDVHSGLIGPLLVCHTNTLNPAHGRQVTVQEFALFFTIFDETKSWYFTENMERNCRAPCNIQMEDPTFKENYRFHAINGYIMDTLPGLVMAQDQRIRWYLLSMGSNENIHSIHFSGHVFTVRKKEEYKMALYNLYPGVFETVEMLPSKAGIWRVECLIGEHLHAGMSTLFLVYSNKCQTPLGMASGHIRDFQITASGQYGQWAPKLARLHYSGSINAWSTKEPFSWIKVDLLAPMIIHGIKTQGARQKFSSLYISQFIIMYSLDGKKWQTYRGNSTGTLMVFFGNVDSSGIKHNIFNPPIIARYIRLHPTHYSIRSTLRMELMGCDLNSCSMPLGMESKAISDAQITASSYFTNMFATWSPSKARLHLQGRSNAWRPQVNNPKEWLQVDFQKTMKVTGVTTQGVKSLLTSMYVKEFLISSSQDGHQWTLFFQNGKVKVFQGNQDSFTPVVNSLDPPLLTRYLRIHPQSWVHQIALRMEVLGCEAQDLY

SEQ ID NO: 317 - DNA, 4371 bp, synthetic construct
  misc_feature 1..4371: note = Variant of human B-domain deleted Factor VIII
  source 1..4371: mol_type = other DNA
atgcagattgaactgtctacctgcttcttcctctgtttgctgaggttctgctttagcgccactagacggtactaccttggcgctgtggagctgtcctgggactatatgcagagtgatttgggagagcttcccgtcgacgcacgatttcctcctcgcgttccaaagtcatttcccttcaacacaagcgtggtgtacaagaagacgctcttcgtcgaattcaccgatcacctgttcaatatcgccaaacccagaccaccatggatgggtcttttggggcctaccatacaagcggaggtgtatgacacagttgttatcactctcaagaacatggcttctcatccggtaagtcttcacgcagtgggcgtgtcctactggaaagcttcagaaggagccgagtatgatgatcagacatcccagagggagaaagaagacgacaaggtatttccaggtgggtctcatacctatgtgtggcaagtgctcaaagagaatggccctatggcaagcgatccgctctgtttgacttacagctacctttcacacgttgacctcgtcaaggacctcaactccgggttgattggagccttgttggtatgcagggaaggatctcttgccaaagagaagacacagaccctccacaagtttatccttctctttgctgtgttcgatgagggcaaaagttggcatagcgaaacgaagaattccctcatgcaggatcgcgacgcagccagcgccagagcttggcccaagatgcacactgtgaacggatatgtcaataggtcacttcctggcttgattgggtgtcatcggaaaagtgtctactggcacgtgatcggaatggggacaacaccagaggtccactccatatttctcgaaggccataccttccttgttcgaaaccacagacaggcatccttggagatctctcccattacctttctcactgcccaaacgctccttatggacttgggtcagttccttctcttctgccatatcagctcacaccagcatgatggtatggaagcttatgtgaaagtcgacagttgtcctgaggagccacagttgcgcatgaagaataatgaagaagccgaggattacgacgacgatctcaccgattctgagatggacgtggtgaggtttgatgacgacaactctccctccttcattcaaatccggagcgtggcgaagaaacaccccaagacttgggtccactatatagcggcggaagaggaggattgggattacgctcctcttgtattggcaccagatgaccgctcatacaaaagccagtacctcaacaacggaccgcagagaattggccggaagtataagaaagtgcgatttatggcctatacagacgaaacctttaagacaagggaggccatccagcatgagagtgggattttgggacctcttctttacggcgaagttggtgataccctcctcatcatcttcaagaatcaagcttctcgcccctataacatttacccacacgggatcactgacgttaggcctttgtatagcagaagacttcccaaaggcgtgaagcatctcaaagacttccccattttgccaggcgagatctttaagtacaaatggaccgtcacagtggaagatggaccgactaaatcagaccctcgatgccttacgcggtactattcctccttcgtgaatatggagagagatttggcaagcggactcataggaccactcctcatctgttacaaggaatctgtagaccagaggggtaaccagattatgagtgataaacgcaatgtgatcctttttagcgtcttcgacgagaaccggtcctggtacttgaccgagaatatacaaaggttccttcccaaccccgcaggcgttcagttggaagaccctgagtttcaggccagcaatattatgcactcaatcaacggctatgtgtttgatagtctccagctttctgtttgcctccatgaagtagcctattggtacatcttgtcaattggtgctcaaacagacttcctctccgtcttcttctccggctacacctttaagcacaagatggtgtatgaggacactctcacactctttccattttctggagaaaccgtgttcatgagcatggagaatccaggcctttggatcttgggttgccacaacagtgattttcgcaatcggggaatgactgctctcctcaaagtcagcagctgtgataagaacacaggcgactattacgaagattcttacgaggacataagtgcctacttgttgtccaagaataacgccattgagcccagatcattctcccagaatcctcccgtgcttaaaaggcatcagcgcgaaatcaccagaactactcttcagtctgatcaagaggagattgactatgacgacaccataagcgtggaaatgaagaaggaggatttcgatatctatgacgaagatgagaaccagtctccgcggagctttcagaagaagacgcgacactacttcattgcagcagtcgaaaggctttgggactacggtatgtcatcatcccctcatgtgttgcgcaatagagctcagagtggaagtgttccacagttcaagaaagtcgtctttcaagagtttacagatggcagcttcacacagcctctctatcggggcgagcttaacgaacatttgggactccttggtccctatatccgagccgaagtggaggacaacattatggttacctttaggaatcaagcctctcgcccctacagcttctactcctccctcatcagttatgaggaggatcagagacaaggcgctgaaccacggaagaactttgtgaaaccgaatgagacgaagacctacttctggaaagtacagcaccacatggcccccacaaaagacgaattcgattgcaaagcatgggcgtatttttcagacgttgacttggagaaagatgtacattcaggacttattggtcctttgttggtgtgtcacactaacactctcaatccagcccatggcaggcaggtgacagtccaggaattcgctcttttctttaccatctttgatgagaccaagtcctggtacttcacggaaaacatggagcgcaattgcagagccccctgtaacatacagatggaggaccctacctttaaggaaaattatcggttccacgcaatcaacggatacattatggatacactccctggccttgtgatggctcaggaccaacgaatcaggtggtacctcctcagcatgggttctaatgagaacatacactccattcacttttcaggacatgtgttcactgtccggaagaaagaagagtataagatggccctctacaatttgtatccaggcgtgtttgagaccgttgaaatgcttccctctaaagctggcatctggagagtagagtgcttgatcggagaacatcttcacgcaggtatgagcaccttgttcctcgtgtacagcaacaaatgtcagaccccacttggcatggccagtggacacattcgcgactttcagatcacagcatctggccagtatggacaatgggccccaaagttggctcgcctccattactccggtagcataaatgcgtggtccactaaagaacctttcagctggattaaggtcgatcttcttgcccccatgatcatccacggcattaagacacagggagcgaggcagaaattctcctccctctacatctcacagttcattattatgtatagtttggacggcaagaagtggcaaacttatagaggtaacagtactggaacactcatggtgttcttcggcaacgttgatagctctggcatcaaacacaacatctttaatcctcccataatagctcggtacatcagattgcatccgacccactacagcattaggagtacactccgaatggagcttatgggttgcgacttgaattcctgttcaatgccactcggaatggagtctaaagccatctctgatgcacagataaccgccagtagctactttacgaacatgtttgctacgtggtcaccctctaaggcaaggcttcatttgcaaggccggtctaatgcctggagacctcaggtgaacaacccgaaagaatggctccaggtggactttcagaagaccatgaaagtaacaggtgtcactactcagggagttaagtccttggataccagctggtatgtgaaggagttccttatttcctcatcacaagatggccaccagtggaccctcttctttcagaatggtaaggtcaaagtgtttcagggcaatcaagacagcttcacacccgtggtgaacagtcttgatcctccactcttgacacgataccttcgaatccatccacagtcttgggttcaccagattgcattgcgcatggaagtacttggatgcgaggctcaggacctctac

SEQ ID NO: 318 - protein, 1457 aa, synthetic construct
  REGION 1..1457: note = Variant of human B-domain deleted Factor VIII
MQIELSTCFFLCLLRFCFSATRRYYLGAVELSWDYMQSDLGELPVDARFPPRVPKSFPFNTSVVYKKTLFVEFTDHLFNIAKPRPPWMGLLGPTIQAEVYDTVVITLKNMASHPVSLHAVGVSYWKASEGAEYDDQTSQREKEDDKVFPGGSHTYVWQVLKENGPMASDPLCLTYSYLSHVDLVKDLNSGLIGALLVCREGSLAKEKTQTLHKFILLFAVFDEGKSWHSETKNSLMQDRDAASARAWPKMHTVNGYVNRSLPGLIGCHRKSVYWHVIGMGTTPEVHSIFLEGHTFLVRNHRQASLEISPITFLTAQTLLMDLGQFLLFCHISSHQHDGMEAYVKVDSCPEEPQLRMKNNEEAEDYDDDLTDSEMDVVRFDDDNSPSFIQIRSVAKKHPKTWVHYIAAEEEDWDYAPLVLAPDDRSYKSQYLNNGPQRIGRKYKKVRFMAYTDETFKTREAIQHESGILGPLLYGEVGDTLLIIFKNQASRPYNIYPHGITDVRPLYSRRLPKGVKHLKDFPILPGEIFKYKWTVTVEDGPTKSDPRCLTRYYSSFVNMERDLASGLIGPLLICYKESVDQRGNQIMSDKRNVILFSVFDENRSWYLTENIQRFLPNPAGVQLEDPEFQASNIMHSINGYVFDSLQLSVCLHEVAYWYILSIGAQTDFLSVFFSGYTFKHKMVYEDTLTLFPFSGETVFMSMENPGLWILGCHNSDFRNRGMTALLKVSSCDKNTGDYYEDSYEDISAYLLSKNNAIEPRSFSQNPPVLKRHQREITRTTLQSDQEEIDYDDTISVEMKKEDFDIYDEDENQSPRSFQKKTRHYFIAAVERLWDYGMSSSPHVLRNRAQSGSVPQFKKVVFQEFTDGSFTQPLYRGELNEHLGLLGPYIRAEVEDNIMVTFRNQASRPYSFYSSLISYEEDQRQGAEPRKNFVKPNETKTYFWKVQHHMAPTKDEFDCKAWAYFSDVDLEKDVHSGLIGPLLVCHTNTLNPAHGRQVTVQEFALFFTIFDETKSWYFTENMERNCRAPCNIQMEDPTFKENYRFHAINGYIMDTLPGLVMAQDQRIRWYLLSMGSNENIHSIHFSGHVFTVRKKEEYKMALYNLYPGVFETVEMLPSKAGIWRVECLIGEHLHAGMSTLFLVYSNKCQTPLGMASGHIRDFQITASGQYGQWAPKLARLHYSGSINAWSTKEPFSWIKVDLLAPMIIHGIKTQGARQKFSSLYISQFIIMYSLDGKKWQTYRGNSTGTLMVFFGNVDSSGIKHNIFNPPIIARYIRLHPTHYSIRSTLRMELMGCDLNSCSMPLGMESKAISDAQITASSYFTNMFATWSPSKARLHLQGRSNAWRPQVNNPKEWLQVDFQKTMKVTGVTTQGVKSLDTSWYVKEFLISSSQDGHQWTLFFQNGKVKVFQGNQDSFTPVVNSLDPPLLTRYLRIHPQSWVHQIALRMEVLGCEAQDLY

SEQ ID NO: 319 - DNA, 4371 bp, synthetic construct
  misc_feature 1..4371: note = Variant of human B-domain deleted Factor VIII
  source 1..4371: mol_type = other DNA
atgcagattgaactgtctacctgcttcttcctctgtttgctgaggttctgctttagcgccactagacggtactaccttggcgctgtggagctgtcctgggactatatgcagagtgatttgggagagcttcccgtcgacgcacgatttcctcctcgcgttccaaagtcatttcccttcaacacaagcgtggtgtacaagaagacgctcttcgtcgaattcaccgatcacctgttcaatatcgccaaacccagaccaccatggatgggtcttttggggcctaccatacaagcggaggtgtatgacacagttgttatcactctcaagaacatggcttctcatccggtaagtcttcacgcagtgggcgtgtcctactggaaagcttcagaaggagccgagtatgatgatcagacatcccagagggagaaagaagacgacaaggtatttccaggtgggtctcatacctatgtgtggcaagtgctcaaagagaatggccctatggcaagcgatccgctctgtttgacttacagctacctttcacacgttgacctcgtcaaggacctcaactccgggttgattggagccttgttggtatgcagggaaggatctcttgccaaagagaagacacagaccctccacaagtttatccttctctttgctgtgttcgatgagggcaaaagttggcatagcgaaacgaagaattccctcatgcaggatcgcgacgcagccagcgccagagcttggcccaagatgcacactgtgaacggatatgtcaataggtcacttcctggcttgattgggtgtcatcggaaaagtgtctactggcacgtgatcggaatggggacaacaccagaggtccactccatatttctcgaaggccataccttccttgttcgaaaccacagacaggcatccttggagatctctcccattacctttctcactgcccaaacgctccttatggacttgggtcagttccttctcttctgccatatcagctcacaccagcatgatggtatggaagcttatgtgaaagtcgacagttgtcctgaggagccacagttgcgcatgaagaataatgaagaagccgaggattacgacgacgatctcaccgattctgagatggacgtggtgaggtttgatgacgacaactctccctccttcgcgcaaatccggagcgtggcgaagaaacaccccaagacttgggtccactatatagcggcggaagaggaggattgggattacgctcctcttgtattggcaccagatgaccgctcatacaaaagccagtacctcaacaacggaccgcagagaattggccggaagtataagaaagtgcgatttatggcctatacagacgaaacctttaagacaagggaggccatccagcatgagagtgggattttgggacctcttctttacggcgaagttggtgataccctcctcatcatcttcaagaatcaagcttctcgcccctataacatttacccacacgggatcactgacgttaggcctttgtatagcagaagacttcccaaaggcgtgaagcatctcaaagacttccccattttgccaggcgagatctttaagtacaaatggaccgtcacagtggaagatggaccgactaaatcagaccctcgatgccttacgcggtactattcctccttcgtgaatatggagagagatttggcaagcggactcataggaccactcctcatctgttacaaggaatctgtagaccagaggggtaaccagattatgagtgataaacgcaatgtgatcctttttagcgtcttcgacgagaaccggtcctggtacttgaccgagaatatacaaaggttccttcccaaccccgcaggcgttcagttggaagaccctgagtttcaggccagcaatattatgcactcaatcaacggctatgtgtttgatagtctccagctttctgtttgcctccatgaagtagcctattggtacatcttgtcaattggtgctcaaacagacttcctctccgtcttcttctccggctacacctttaagcacaagatggtgtatgaggacactctcacactctttccattttctggagaaaccgtgttcatgagcatggagaatccaggcctttggatcttgggttgccacaacagtgattttcgcaatcggggaatgactgctctcctcaaagtcagcagctgtgataagaacacaggcgactattacgaagattcttacgaggacataagtgcctacttgttgtccaagaataacgccattgagcccagatcattctcccagaatcctcccgtgcttaaaaggcatcagcgcgaaatcaccagaactactcttcagtctgatcaagaggagattgactatgacgacaccataagcgtggaaatgaagaaggaggatttcgatatctatgacgaagatgagaaccagtctccgcggagctttcagaagaagacgcgacactacttcattgcagcagtcgaaaggctttgggactacggtatgtcatcatcccctcatgtgttgcgcaatagagctcagagtggaagtgttccacagttcaagaaagtcgtctttcaagagtttacagatggcagcttcacacagcctctctatcggggcgagcttaacgaacatttgggactccttggtccctatatccgagccgaagtggaggacaacattatggttacctttaggaatcaagcctctcgcccctacagcttctactcctccctcatcagttatgaggaggatcagagacaaggcgctgaaccacggaagaactttgtgaaaccgaatgagacgaagacctacttctggaaagtacagcaccacatggcccccacaaaagacgaattcgattgcaaagcatgggcgtatttttcagacgttgacttggagaaagatgtacattcaggacttattggtcctttgttggtgtgtcacactaacactctcaatccagcccatggcaggcaggtgacagtccaggaattcgctcttttctttaccatctttgatgagaccaagtcctggtacttcacggaaaacatggagcgcaattgcagagccccctgtaacatacagatggaggaccctacctttaaggaaaattatcggttccacgcaatcaacggatacattatggatacactccctggccttgtgatggctcaggaccaacgaatcaggtggtacctcctcagcatgggttctaatgagaacatacactccattcacttttcaggacatgtgttcactgtccggaagaaagaagagtataagatggccctctacaatttgtatccaggcgtgtttgagaccgttgaaatgcttccctctaaagctggcatctggagagtagagtgcttgatcggagaacatcttcacgcaggtatgagcaccttgttcctcgtgtacagcaacaaatgtcagaccccacttggcatggccagtggacacattcgcgactttcagatcacagcatctggccagtatggacaatgggccccaaagttggctcgcctccattactccggtagcataaatgcgtggtccactaaagaacctttcagctggattaaggtcgatcttcttgcccccatgatcatccacggcattaagacacagggagcgaggcagaaattctcctccctctacatctcacagttcattattatgtatagtttggacggcaagaagtggcaaacttatagaggtaacagtactggaacactcatggtgttcttcggcaacgttgatagctctggcatcaaacacaacatctttaatcctcccataatagctcggtacatcagattgcatccgacccactacagcattaggagtacactccgaatggagcttatgggttgcgacttgaattcctgttcaatgccactcggaatggagtctaaagccatctctgatgcacagataaccgccagtagctactttacgaacatgtttgctacgtggtcaccctctaaggcaaggcttcatttgcaaggccggtctaatgcctggagacctcaggtgaacaacccgaaagaatggctccaggtggactttcagaagaccatgaaagtaacaggtgtcactactcagggagttaagtccttggataccagcatgtatgtgaaggagttccttatttcctcatcacaagatggccaccagtggaccctcttctttcagaatggtaaggtcaaagtgtttcagggcaatcaagacagcttcacacccgtggtgaacagtcttgatcctccactcttgacacgataccttcgaatccatccacagtcttgggttcaccagattgcattgcgcatggaagtacttggatgcgaggctcaggacctctac

SEQ ID NO: 320 - protein, 1457 aa, synthetic construct
  REGION 1..1457: note = Variant of human B-domain deleted Factor VIII
MQIELSTCFFLCLLRFCFSATRRYYLGAVELSWDYMQSDLGELPVDARFPPRVPKSFPFNTSVVYKKTLFVEFTDHLFNIAKPRPPWMGLLGPTIQAEVYDTVVITLKNMASHPVSLHAVGVSYWKASEGAEYDDQTSQREKEDDKVFPGGSHTYVWQVLKENGPMASDPLCLTYSYLSHVDLVKDLNSGLIGALLVCREGSLAKEKTQTLHKFILLFAVFDEGKSWHSETKNSLMQDRDAASARAWPKMHTVNGYVNRSLPGLIGCHRKSVYWHVIGMGTTPEVHSIFLEGHTFLVRNHRQASLEISPITFLTAQTLLMDLGQFLLFCHISSHQHDGMEAYVKVDSCPEEPQLRMKNNEEAEDYDDDLTDSEMDVVRFDDDNSPSFAQIRSVAKKHPKTWVHYIAAEEEDWDYAPLVLAPDDRSYKSQYLNNGPQRIGRKYKKVRFMAYTDETFKTREAIQHESGILGPLLYGEVGDTLLIIFKNQASRPYNIYPHGITDVRPLYSRRLPKGVKHLKDFPILPGEIFKYKWTVTVEDGPTKSDPRCLTRYYSSFVNMERDLASGLIGPLLICYKESVDQRGNQIMSDKRNVILFSVFDENRSWYLTENIQRFLPNPAGVQLEDPEFQASNIMHSINGYVFDSLQLSVCLHEVAYWYILSIGAQTDFLSVFFSGYTFKHKMVYEDTLTLFPFSGETVFMSMENPGLWILGCHNSDFRNRGMTALLKVSSCDKNTGDYYEDSYEDISAYLLSKNNAIEPRSFSQNPPVLKRHQREITRTTLQSDQEEIDYDDTISVEMKKEDFDIYDEDENQSPRSFQKKTRHYFIAAVERLWDYGMSSSPHVLRNRAQSGSVPQFKKVVFQEFTDGSFTQPLYRGELNEHLGLLGPYIRAEVEDNIMVTFRNQASRPYSFYSSLISYEEDQRQGAEPRKNFVKPNETKTYFWKVQHHMAPTKDEFDCKAWAYFSDVDLEKDVHSGLIGPLLVCHTNTLNPAHGRQVTVQEFALFFTIFDETKSWYFTENMERNCRAPCNIQMEDPTFKENYRFHAINGYIMDTLPGLVMAQDQRIRWYLLSMGSNENIHSIHFSGHVFTVRKKEEYKMALYNLYPGVFETVEMLPSKAGIWRVECLIGEHLHAGMSTLFLVYSNKCQTPLGMASGHIRDFQITASGQYGQWAPKLARLHYSGSINAWSTKEPFSWIKVDLLAPMIIHGIKTQGARQKFSSLYISQFIIMYSLDGKKWQTYRGNSTGTLMVFFGNVDSSGIKHNIFNPPIIARYIRLHPTHYSIRSTLRMELMGCDLNSCSMPLGMESKAISDAQITASSYFTNMFATWSPSKARLHLQGRSNAWRPQVNNPKEWLQVDFQKTMKVTGVTTQGVKSLDTSMYVKEFLISSSQDGHQWTLFFQNGKVKVFQGNQDSFTPVVNSLDPPLLTRYLRIHPQSWVHQIALRMEVLGCEAQDLY

SEQ ID NO: 321 - DNA, 4371 bp, synthetic construct
  misc_feature 1..4371: note = Variant of human B-domain deleted Factor VIII
  source 1..4371: mol_type = other DNA
atgcagattgaactgtctacctgcttcttcctctgtttgctgaggttctgctttagcgccactagacggtactaccttggcgctgtggagctgtcctgggactatatgcagagtgatttgggagagcttcccgtcgacgcacgatttcctcctcgcgttccaaagtcatttcccttcaacacaagcgtggtgtacaagaagacgctcttcgtcgaattcaccgatcacctgttcaatatcgccaaacccagaccaccatggatgggtcttttggggcctaccatacaagcggaggtgtatgacacagttgttatcactctcaagaacatggcttctcatccggtaagtcttcacgcagtgggcgtgtcctactggaaagcttcagaaggagccgagtatgatgatcagacatcccagagggagaaagaagacgacaaggtatttccaggtgggtctcatacctatgtgtggcaagtgctcaaagagaatggccctatggcaagcgatccgctctgtttgacttacagctacctttcacacgttgacctcgtcaaggacctcaactccgggttgattggagccttgttggtatgcagggaaggatctcttgccaaagagaagacacagaccctccacaagtttatccttctctttgctgtgttcgatgagggcaaaagttggcatagcgaaacgaagaattccctcatgcaggatcgcgacgcagccagcgccagagcttggcccaagatgcacactgtgaacggatatgtcaataggtcacttcctggcttgattgggtgtcatcggaaaagtgtctactggcacgtgatcggaatggggacaacaccagaggtccactccatatttctcgaaggccataccttccttgttcgaaaccacagacaggcatccttggagatctctcccattacctttctcactgcccaaacgctccttatggacttgggtcagttccttctcttctgccatatcagctcacaccagcatgatggtatggaagcttatgtgaaagtcgacagttgtcctgaggagccacagttgcgcatgaagaataatgaagaagccgaggattacgacgacgatctcaccgattctgagatggacgtggtgaggtttgatgacgacaactctccctccttcattcaaatccggagcgtggcgaagaaacaccccaagacttgggtccactatatagcggcggaagaggaggattgggattacgctcctcttgtattggcaccagatgaccgctcatacaaaagccagtacctcaacaacggaccgcagagaattggccggaagtataagaaagtgcgatttatggcctatacagacgaaacctttaagacaagggaggccatccagcatgagagtgggattttgggacctcttctttacggcgaagttggtgataccctcctcatcatcttcaagaatcaagcttctcgcccctataacatttacccacacgggatcactgacgttaggcctttgtatagcagaagacttcccaaaggcgtgaagcatctcaaagacttccccattttgccaggcgagatctttaagtacaaatggaccgtcacagtggaagatggaccgactaaatcagaccctcgatgccttacgcggtactattcctccttcgtgaatatggagagagatttggcaagcggactcataggaccactcctcatctgttacaaggaatctgtagaccagaggggtaaccagattatgagtgataaacgcaatgtgatcctttttagcgtcttcgacgagaaccggtcctggtacttgaccgagaatatacaaaggttccttcccaaccccgcaggcgttcagttggaagaccctgagtttcaggccagcaatattatgcactcaatcaacggctatgtgtttgatagtctccagctttctgtttgcctccatgaagtagcctattggtacatcttgtcaattggtgctcaaacagacttcctctccgtcttcttctccggctacacctttaagcacaagatggtgtatgaggacactctcacactctttccattttctggagaaaccgtgttcatgagcatggagaatccaggcctttggatcttgggttgccacaacagtgattttcgcaatcggggaatgactgctctcctcaaagtcagcagctgtgataagaacacaggcgactattacgaagattcttacgaggacataagtgcctacttgttgtccaagaataacgccattgagcccagatcattctcccagaatcctcccgtgcttaaaaggcatcagcgcgaaatcaccagaactactcttcagtctgatcaagaggagattgactatgacgacaccataagcgtggaaatgaagaaggaggatttcgatatctatgacgaagatgagaaccagtctccgcggagctttcagaagaagacgcgacactacttcattgcagcagtcgaaaggctttgggactacggtatgtcatcatcccctcatgtgttgcgcaatagagctcagagtggaagtgttccacagttcaagaaagtcgtctttcaagagtttacagatggcagcttcacacagcctctctatcggggcgagcttaacgaacatttgggactccttggtccctatatccgagccgaagtggaggacaacattatggttacctttaggaatcaagcctctcgcccctacagcttctactcctccctcatcagttatgaggaggatcagagacaaggcgctgaaccacggaagaactttgtgaaaccgaatgagacgaagacctacttctggaaagtacagcaccacatggcccccacaaaagacgaattcgattgcaaagcatgggcgtatttttcagacgttgacttggagaaagatgtacattcaggacttattggtcctttgttggtgtgtcacactaacactctcaatccagcccatggcaggcaggtgacagtccaggaattcgctcttttctttaccatctttgatgagaccaagtcctggtacttcacggaaaacatggagcgcaattgcagagccccctgtaacatacagatggaggaccctacctttaaggaaaattatcgggagcacgcaatcaacggatacattatggatacactccctggccttgtgatggctcaggaccaacgaatcaggtggtacctcctcagcatgggttctaatgagaacatacactccattcacttttcaggacatgtgttcactgtccggaagaaagaagagtataagatggccctctacaatttgtatccaggcgtgtttgagaccgttgaaatgcttccctctaaagctggcatctggagagtagagtgcttgatcggagaacatcttcacgcaggtatgagcaccttgttcctcgtgtacagcaacaaatgtcagaccccacttggcatggccagtggacacattcgcgactttcagatcacagcatctggccagtatggacaatgggccccaaagttggctcgcctccattactccggtagcataaatgcgtggtccactaaagaacctttcagctggattaaggtcgatcttcttgcccccatgatcatccacggcattaagacacagggagcgaggcagaaattctcctccctctacatctcacagttcattattatgtatagtttggacggcaagaagtggcaaacttatagaggtaacagtactggaacactcatggtgttcttcggcaacgttgatagctctggcatcaaacacaacatctttaatcctcccataatagctcggtacatcagattgcatccgacccactacagcattaggagtacactccgaatggagcttatgggttgcgacttgaattcctgttcaatgccactcggaatggagtctaaagccatctctgatgcacagataaccgccagtagctactttacgaacatgtttgctacgtggtcaccctctaaggcaaggcttcatttgcaaggccggtctaatgcctggagacctcaggtgaacaacccgaaagaatggctccaggtggactttcagaagaccatgaaagtaacaggtgtcactactcagggagttaagtccttggataccagcatgtatgtgaaggagttccttatttcctcatcacaagatggccaccagtggaccctcttctttcagaatggtaaggtcaaagtgtttcagggcaatcaagacagcttcacacccgtggtgaacagtcttgatcctccactcttgacacgataccttcgaatccatccacagtcttgggttcaccagattgcattgcgcatggaagtacttggatgcgaggctcaggacctctac

SEQ ID NO: 322 - protein, 1457 aa, synthetic construct
  REGION 1..1457: note = Variant of human B-domain deleted Factor VIII
MQIELSTCFFLCLLRFCFSATRRYYLGAVELSWDYMQSDLGELPVDARFPPRVPKSFPFNTSVVYKKTLFVEFTDHLFNIAKPRPPWMGLLGPTIQAEVYDTVVITLKNMASHPVSLHAVGVSYWKASEGAEYDDQTSQREKEDDKVFPGGSHTYVWQVLKENGPMASDPLCLTYSYLSHVDLVKDLNSGLIGALLVCREGSLAKEKTQTLHKFILLFAVFDEGKSWHSETKNSLMQDRDAASARAWPKMHTVNGYVNRSLPGLIGCHRKSVYWHVIGMGTTPEVHSIFLEGHTFLVRNHRQASLEISPITFLTAQTLLMDLGQFLLFCHISSHQHDGMEAYVKVDSCPEEPQLRMKNNEEAEDYDDDLTDSEMDVVRFDDDNSPSFIQIRSVAKKHPKTWVHYIAAEEEDWDYAPLVLAPDDRSYKSQYLNNGPQRIGRKYKKVRFMAYTDETFKTREAIQHESGILGPLLYGEVGDTLLIIFKNQASRPYNIYPHGITDVRPLYSRRLPKGVKHLKDFPILPGEIFKYKWTVTVEDGPTKSDPRCLTRYYSSFVNMERDLASGLIGPLLICYKESVDQRGNQIMSDKRNVILFSVFDENRSWYLTENIQRFLPNPAGVQLEDPEFQASNIMHSINGYVFDSLQLSVCLHEVAYWYILSIGAQTDFLSVFFSGYTFKHKMVYEDTLTLFPFSGETVFMSMENPGLWILGCHNSDFRNRGMTALLKVSSCDKNTGDYYEDSYEDISAYLLSKNNAIEPRSFSQNPPVLKRHQREITRTTLQSDQEEIDYDDTISVEMKKEDFDIYDEDENQSPRSFQKKTRHYFIAAVERLWDYGMSSSPHVLRNRAQSGSVPQFKKVVFQEFTDGSFTQPLYRGELNEHLGLLGPYIRAEVEDNIMVTFRNQASRPYSFYSSLISYEEDQRQGAEPRKNFVKPNETKTYFWKVQHHMAPTKDEFDCKAWAYFSDVDLEKDVHSGLIGPLLVCHTNTLNPAHGRQVTVQEFALFFTIFDETKSWYFTENMERNCRAPCNIQMEDPTFKENYREHAINGYIMDTLPGLVMAQDQRIRWYLLSMGSNENIHSIHFSGHVFTVRKKEEYKMALYNLYPGVFETVEMLPSKAGIWRVECLIGEHLHAGMSTLFLVYSNKCQTPLGMASGHIRDFQITASGQYGQWAPKLARLHYSGSINAWSTKEPFSWIKVDLLAPMIIHGIKTQGARQKFSSLYISQFIIMYSLDGKKWQTYRGNSTGTLMVFFGNVDSSGIKHNIFNPPIIARYIRLHPTHYSIRSTLRMELMGCDLNSCSMPLGMESKAISDAQITASSYFTNMFATWSPSKARLHLQGRSNAWRPQVNNPKEWLQVDFQKTMKVTGVTTQGVKSLDTSMYVKEFLISSSQDGHQWTLFFQNGKVKVFQGNQDSFTPVVNSLDPPLLTRYLRIHPQSWVHQIALRMEVLGCEAQDLY

SEQ ID NO: 323 - DNA, 4371 bp, synthetic construct
  misc_feature 1..4371: note = Variant of human B-domain deleted Factor VIII
  source 1..4371: mol_type = other DNA
atgcagattgaactgtctacctgcttcttcctctgtttgctgaggttctgctttagcgccactagacggtactaccttggcgctgtggagctgtcctgggactatatgcagagtgatttgggagagcttcccgtcgacgcacgatttcctcctcgcgttccaaagtcatttcccttcaacacaagcgtggtgtacaagaagacgctcttcgtcgaattcaccgatcacctgttcaatatcgccaaacccagaccaccatggatgggtcttttggggcctaccatacaagcggaggtgtatgacacagttgttatcactctcaagaacatggcttctcatccggtaagtcttcacgcagtgggcgtgtcctactggaaagcttcagaaggagccgagtatgatgatcagacatcccagagggagaaagaagacgacaaggtatttccaggtgggtctcatacctatgtgtggcaagtgctcaaagagaatggccctatggcaagcgatccgctctgtttgacttacagctacctttcacacgttgacctcgtcaaggacctcaactccgggttgattggagccttgttggtatgcagggaaggatctcttgccaaagagaagacacagaccctccacaagtttatccttctctttgctgtgttcgatgagggcaaaagttggcatagcgaaacgaagaattccctcatgcaggatcgcgacgcagccagcgccagagcttggcccaagatgcacactgtgaacggatatgtcaataggtcacttcctggcttgattgggtgtcatcggaaaagtgtctactggcacgtgatcggaatggggacaacaccagaggtccactccatatttctcgaaggccataccttccttgttcgaaaccacagacaggcatccttggagatctctcccattacctttctcactgcccaaacgctccttatggacttgggtcagttccttctcttctgccatatcagctcacaccagcatgatggtatggaagcttatgtgaaagtcgacagttgtcctgaggagccacagttgcgcatgaagaataatgaagaagccgaggattacgacgacgatctcaccgattctgagatggacgtggtgaggtttgatgacgacaactctccctccttcattcaaatccggagcgtggcgaagaaacaccccaagacttgggtccactatatagcggcggaagaggaggattgggattacgctcctcttgtattggcaccagatgaccgctcatacaaaagccagtacctcaacaacggaccgcagagaattggccggaagtataagaaagtgcgatttatggcctatacagacgaaacctttaagacaagggaggccatccagcatgagagtgggattttgggacctcttctttacggcgaagttggtgataccctcctcatcatcttcaagaatcaagcttctcgcccctataacatttacccacacgggatcactgacgttaggcctttgtatagcagaagacttcccaaaggcgtgaagcatctcaaagacttccccattttgccaggcgagatctttaagtacaaatggaccgtcacagtggaagatggaccgactaaatcagaccctcgatgccttacgcggtactattcctccttcgtgaatatggagagagatttggcaagcggactcataggaccactcctcatctgttacaaggaatctgtagaccagaggggtaaccagattatgagtgataaacgcaatgtgatcctttttagcgtcttcgacgagaaccggtcctggtacttgaccgagaatatacaaaggttccttcccaaccccgcaggcgttcagttggaagaccctgagtttcaggccagcaatattatgcactcaatcaacggctatgtgtttgatagtctccagctttctgtttgcctccatgaagtagcctattggtacatcttgtcaattggtgctcaaacagacttcctctccgtcttcttctccggctacacctttaagcacaagatggtgtatgaggacactctcacactctttccattttctggagaaaccgtgttcatgagcatggagaatccaggcctttggatcttgggttgccacaacagtgattttcgcaatcggggaatgactgctctcctcaaagtcagcagctgtgataagaacacaggcgactattacgaagattcttacgaggacataagtgcctacttgttgtccaagaataacgccattgagcccagatcattctcccagaatcctcccgtgcttaaaaggcatcagcgcgaaatcaccagaactactcttcagtctgatcaagaggagattgactatgacgacaccataagcgtggaaatgaagaaggaggatttcgatatctatgacgaagatgagaaccagtctccgcggagctttcagaagaagacgcgacactacttcattgcagcagtcgaaaggctttgggactacggtatgtcatcatcccctcatgtgttgcgcaatagagctcagagtggaagtgttccacagttcaagaaagtcgtctttcaagagtttacagatggcagcttcacacagcctctctatcggggcgagcttaacgaacatttgggactccttggtccctatatccgagccgaagtggaggacaacattatggttacctttaggaatcaagcctctcgcccctacagcttctactcctccctcatcagttatgaggaggatcagagacaaggcgctgaaccacggaagaactttgtgaaaccgaatgagacgaagacctacttctggaaagtacagcaccacatggcccccacaaaagacgaattcgattgcaaagcatgggcgtatttttcagacgttgacttggagaaagatgtacattcaggacttattggtcctttgttggtgtgtcacactaacactctcaatccagcccatggcaggcaggtgacagtccaggaattcgctcttttctttaccatctttgatgagaccaagtcctggtacttcacggaaaacatggagcgcaattgcagagccccctgtaacatacagatggaggaccctacctttaaggaaaattatcggaggcacgcaatcaacggatacattatggatacactccctggccttgtgatggctcaggaccaacgaatcaggtggtacctcctcagcatgggttctaatgagaacatacactccattcacttttcaggacatgtgttcactgtccggaagaaagaagagtataagatggccctctacaatttgtatccaggcgtgtttgagaccgttgaaatgcttccctctaaagctggcatctggagagtagagtgcttgatcggagaacatcttcacgcaggtatgagcaccttgttcctcgtgtacagcaacaaatgtcagaccccacttggcatggccagtggacacattcgcgactttcagatcacagcatctggccagtatggacaatgggccccaaagttggctcgcctccattactccggtagcataaatgcgtggtccactaaagaacctttcagctggattaaggtcgatcttcttgcccccatgatcatccacggcattaagacacagggagcgaggcagaaattctcctccctctacatctcacagttcattattatgtatagtttggacggcaagaagtggcaaacttatagaggtaacagtactggaacactcatggtgttcttcggcaacgttgatagctctggcatcaaacacaacatctttaatcctcccataatagctcggtacatcagattgcatccgacccactacagcattaggagtacactccgaatggagcttatgggttgcgacttgaattcctgttcaatgccactcggaatggagtctaaagccatctctgatgcacagataaccgccagtagctactttacgaacatgtttgctacgtggtcaccctctaaggcaaggcttcatttgcaaggccggtctaatgcctggagacctcaggtgaacaacccgaaagaatggctccaggtggactttcagaagaccatgaaagtaacaggtgtcactactcagggagttaagtccttggataccagcatgtatgtgaaggagttccttatttcctcatcacaagatggccaccagtggaccctcttctttcagaatggtaaggtcaaagtgtttcagggcaatcaagacagcttcacacccgtggtgaacagtcttgatcctccactcttgacacgataccttcgaatccatccacagtcttgggttcaccagattgcattgcgcatggaagtacttggatgcgaggctcaggacctctac

SEQ ID NO: 324 - protein, 1457 aa, synthetic construct
  REGION 1..1457: note = Variant of human B-domain deleted Factor VIII
MQIELSTCFFLCLLRFCFSATRRYYLGAVELSWDYMQSDLGELPVDARFPPRVPKSFPFNTSVVYKKTLFVEFTDHLFNIAKPRPPWMGLLGPTIQAEVYDTVVITLKNMASHPVSLHAVGVSYWKASEGAEYDDQTSQREKEDDKVFPGGSHTYVWQVLKENGPMASDPLCLTYSYLSHVDLVKDLNSGLIGALLVCREGSLAKEKTQTLHKFILLFAVFDEGKSWHSETKNSLMQDRDAASARAWPKMHTVNGYVNRSLPGLIGCHRKSVYWHVIGMGTTPEVHSIFLEGHTFLVRNHRQASLEISPITFLTAQTLLMDLGQFLLFCHISSHQHDGMEAYVKVDSCPEEPQLRMKNNEEAEDYDDDLTDSEMDVVRFDDDNSPSFIQIRSVAKKHPKTWVHYIAAEEEDWDYAPLVLAPDDRSYKSQYLNNGPQRIGRKYKKVRFMAYTDETFKTREAIQHESGILGPLLYGEVGDTLLIIFKNQASRPYNIYPHGITDVRPLYSRRLPKGVKHLKDFPILPGEIFKYKWTVTVEDGPTKSDPRCLTRYYSSFVNMERDLASGLIGPLLICYKESVDQRGNQIMSDKRNVILFSVFDENRSWYLTENIQRFLPNPAGVQLEDPEFQASNIMHSINGYVFDSLQLSVCLHEVAYWYILSIGAQTDFLSVFFSGYTFKHKMVYEDTLTLFPFSGETVFMSMENPGLWILGCHNSDFRNRGMTALLKVSSCDKNTGDYYEDSYEDISAYLLSKNNAIEPRSFSQNPPVLKRHQREITRTTLQSDQEEIDYDDTISVEMKKEDFDIYDEDENQSPRSFQKKTRHYFIAAVERLWDYGMSSSPHVLRNRAQSGSVPQFKKVVFQEFTDGSFTQPLYRGELNEHLGLLGPYIRAEVEDNIMVTFRNQASRPYSFYSSLISYEEDQRQGAEPRKNFVKPNETKTYFWKVQHHMAPTKDEFDCKAWAYFSDVDLEKDVHSGLIGPLLVCHTNTLNPAHGRQVTVQEFALFFTIFDETKSWYFTENMERNCRAPCNIQMEDPTFKENYRRHAINGYIMDTLPGLVMAQDQRIRWYLLSMGSNENIHSIHFSGHVFTVRKKEEYKMALYNLYPGVFETVEMLPSKAGIWRVECLIGEHLHAGMSTLFLVYSNKCQTPLGMASGHIRDFQITASGQYGQWAPKLARLHYSGSINAWSTKEPFSWIKVDLLAPMIIHGIKTQGARQKFSSLYISQFIIMYSLDGKKWQTYRGNSTGTLMVFFGNVDSSGIKHNIFNPPIIARYIRLHPTHYSIRSTLRMELMGCDLNSCSMPLGMESKAISDAQITASSYFTNMFATWSPSKARLHLQGRSNAWRPQVNNPKEWLQVDFQKTMKVTGVTTQGVKSLDTSMYVKEFLISSSQDGHQWTLFFQNGKVKVFQGNQDSFTPVVNSLDPPLLTRYLRIHPQSWVHQIALRMEVLGCEAQDLY

SEQ ID NO: 325 - DNA, 4371 bp, synthetic construct
  misc_feature 1..4371: note = Variant of human B-domain deleted Factor VIII
  source 1..4371: mol_type = other DNA
atgcagattgaactgtctacctgcttcttcctctgtttgctgaggttctgctttagcgccactagacggtactaccttggcgctgtggagctgtcctgggactatatgcagagtgatttgggagagcttcccgtcgacgcacgatttcctcctcgcgttccaaagtcatttcccttcaacacaagcgtggtgtacaagaagacgctcttcgtcgaattcaccgatcacctgttcaatatcgccaaacccagaccaccatggatgggtcttttggggcctaccatacaagcggaggtgtatgacacagttgttatcactctcaagaacatggcttctcatccggtaagtcttcacgcagtgggcgtgtcctactggaaagcttcagaaggagccgagtatgatgatcagacatcccagagggagaaagaagacgacaaggtatttccaggtgggtctcatacctatgtgtggcaagtgctcaaagagaatggccctatggcaagcgatccgctctgtttgacttacagctacctttcacacgttgacctcgtcaaggacctcaactccgggttgattggagccttgttggtatgcagggaaggatctcttgccaaagagaagacacagaccctccacaagtttatccttctctttgctgtgttcgatgagggcaaaagttggcatagcgaaacgaagaattccctcatgcaggatcgcgacgcagccagcgccagagcttggcccaagatgcacactgtgaacggatatgtcaataggtcacttcctggcttgattgggtgtcatcggaaaagtgtctactggcacgtgatcggaatggggacaacaccagaggtccactccatatttctcgaaggccataccttccttgttcgaaaccacagacaggcatccttggagatctctcccattacctttctcactgcccaaacgctccttatggacttgggtcagttccttctcttctgccatatcagctcacaccagcatgatggtatggaagcttatgtgaaagtcgacagttgtcctgaggagccacagttgcgcatgaagaataatgaagaagccgaggattacgacgacgatctcaccgattctgagatggacgtggtgaggtttgatgacgacaactctccctccttcattcaaatccggagcgtggcgaagaaacaccccaagacttgggtccactatatagcggcggaagaggaggattgggattacgctcctcttgtattggcaccagatgaccgctcatacaaaagccagtacctcaacaacggaccgcagagaattggccggaagtataagaaagtgcgatttatggcctatacagacgaaacctttaagacaagggaggccatccagcatgagagtgggattttgggacctcttctttacggcgaagttggtgataccctcctcatcatcttcaagaatcaagcttctcgcccctataacatttacccacacgggatcactgacgttaggcctttgtatagcagaagacttcccaaaggcgtgaagcatctcaaagacttccccattttgccaggcgagatctttaagtacaaatggaccgtcacagtggaagatggaccgactaaatcagaccctcgatgccttacgcggtactattcctccttcgtgaatatggagagagatttggcaagcggactcataggaccactcctcatctgttacaaggaatctgtagaccagaggggtaaccagattatgagtgataaacgcaatgtgatcctttttagcgtcttcgacgagaaccggtcctggtacttgaccgagaataggcaaaggttccttcccaaccccgcaggcgttcagttggaagaccctgagtttcaggccagcaatattatgcactcaatcaacggctatgtgtttgatagtctccagctttctgtttgcctccatgaagtagcctattggtacatcttgtcaattggtgctcaaacagacttcctctccgtcttcttctccggctacacctttaagcacaagatggtgtatgaggacactctcacactctttccattttctggagaaaccgtgttcatgagcatggagaatccaggcctttggatcttgggttgccacaacagtgattttcgcaatcggggaatgactgctctcctcaaagtcagcagctgtgataagaacacaggcgactattacgaagattcttacgaggacataagtgcctacttgttgtccaagaataacgccattgagcccagatcattctcccagaatcctcccgtgcttaaaaggcatcagcgcgaaatcaccagaactactcttcagtctgatcaagaggagattgactatgacgacaccataagcgtggaaatgaagaaggaggatttcgatatctatgacgaagatgagaaccagtctccgcggagctttcagaagaagacgcgacactacttcattgcagcagtcgaaaggctttgggactacggtatgtcatcatcccctcatgtgttgcgcaatagagctcagagtggaagtgttccacagttcaagaaagtcgtctttcaagagtttacagatggcagcttcacacagcctctctatcggggcgagcttaacgaacatttgggactccttggtccctatatccgagccgaagtggaggacaacattatggttacctttaggaatcaagcctctcgcccctacagcttctactcctccctcatcagttatgaggaggatcagagacaaggcgctgaaccacggaagaactttgtgaaaccgaatgagacgaagacctacttctggaaagtacagcaccacatggcccccacaaaagacgaattcgattgcaaagcatgggcgtatttttcagacgttgacttggagaaagatgtacattcaggacttattggtcctttgttggtgtgtcacactaacactctcaatccagcccatggcaggcaggtgacagtccaggaattcgctcttttctttaccatctttgatgagaccaagtcctggtacttcacggaaaacatggagcgcaattgcagagccccctgtaacatacagatggaggaccctacctttaaggaaaattatcggttccacgcaatcaacggatacattatggatacactccctggccttgtgatggctcaggaccaacgaatcaggtggtacctcctcagcatgggttctaatgagaacatacactccattcacttttcaggacatgtgttcactgtccggaagaaagaagagtataagatggccctctacaatttgtatccaggcgtgtttgagaccgttgaaatgcttccctctaaagctggcatctggagagtagagtgcttgatcggagaacatcttcacgcaggtatgagcaccttgttcctcgtgtacagcaacaaatgtcagaccccacttggcatggccagtggacacattcgcgactttcagatcacagcatctggccagtatggacaatgggccccaaagttggctcgcctccattactccggtagcataaatgcgtggtccactaaagaacctttcagctggattaaggtcgatcttcttgcccccatgatcatccacggcattaagacacagggagcgaggcagaaattctcctccctctacatctcacagttcattattatgtatagtttggacggcaagaagtggcaaacttatagaggtaacagtactggaacactcatggtgttcttcggcaacgttgatagctctggcatcaaacacaacatctttaatcctcccataatagctcggtacatcagattgcatccgacccactacagcattaggagtacactccgaatggagcttatgggttgcgacttgaattcctgttcaatgccactcggaatggagtctaaagccatctctgatgcacagataaccgccagtagctactttacgaacatgtttgctacgtggtcaccctctaaggcaaggcttcatttgcaaggccggtctaatgcctggagacctcaggtgaacaacccgaaagaatggctccaggtggactttcagaagaccatgaaagtaacaggtgtcactactcagggagttaagtccttggataccagcatgtatgtgaaggagttccttatttcctcatcacaagatggccaccagtggaccctcttctttcagaatggtaaggtcaaagtgtttcagggcaatcaagacagcttcacacccgtggtgaacagtcttgatcctccactcttgacacgataccttcgaatccatccacagtcttgggttcaccagattgcattgcgcatggaagtacttggatgcgaggctcaggacctctac

SEQ ID NO: 326 - protein, 1457 aa, synthetic construct
  REGION 1..1457: note = Variant of human B-domain deleted Factor VIII
MQIELSTCFFLCLLRFCFSATRRYYLGAVELSWDYMQSDLGELPVDARFPPRVPKSFPFNTSVVYKKTLFVEFTDHLFNIAKPRPPWMGLLGPTIQAEVYDTVVITLKNMASHPVSLHAVGVSYWKASEGAEYDDQTSQREKEDDKVFPGGSHTYVWQVLKENGPMASDPLCLTYSYLSHVDLVKDLNSGLIGALLVCREGSLAKEKTQTLHKFILLFAVFDEGKSWHSETKNSLMQDRDAASARAWPKMHTVNGYVNRSLPGLIGCHRKSVYWHVIGMGTTPEVHSIFLEGHTFLVRNHRQASLEISPITFLTAQTLLMDLGQFLLFCHISSHQHDGMEAYVKVDSCPEEPQLRMKNNEEAEDYDDDLTDSEMDVVRFDDDNSPSFIQIRSVAKKHPKTWVHYIAAEEEDWDYAPLVLAPDDRSYKSQYLNNGPQRIGRKYKKVRFMAYTDETFKTREAIQHESGILGPLLYGEVGDTLLIIFKNQASRPYNIYPHGITDVRPLYSRRLPKGVKHLKDFPILPGEIFKYKWTVTVEDGPTKSDPRCLTRYYSSFVNMERDLASGLIGPLLICYKESVDQRGNQIMSDKRNVILFSVFDENRSWYLTENRQRFLPNPAGVQLEDPEFQASNIMHSINGYVFDSLQLSVCLHEVAYWYILSIGAQTDFLSVFFSGYTFKHKMVYEDTLTLFPFSGETVFMSMENPGLWILGCHNSDFRNRGMTALLKVSSCDKNTGDYYEDSYEDISAYLLSKNNAIEPRSFSQNPPVLKRHQREITRTTLQSDQEEIDYDDTISVEMKKEDFDIYDEDENQSPRSFQKKTRHYFIAAVERLWDYGMSSSPHVLRNRAQSGSVPQFKKVVFQEFTDGSFTQPLYRGELNEHLGLLGPYIRAEVEDNIMVTFRNQASRPYSFYSSLISYEEDQRQGAEPRKNFVKPNETKTYFWKVQHHMAPTKDEFDCKAWAYFSDVDLEKDVHSGLIGPLLVCHTNTLNPAHGRQVTVQEFALFFTIFDETKSWYFTENMERNCRAPCNIQMEDPTFKENYRFHAINGYIMDTLPGLVMAQDQRIRWYLLSMGSNENIHSIHFSGHVFTVRKKEEYKMALYNLYPGVFETVEMLPSKAGIWRVECLIGEHLHAGMSTLFLVYSNKCQTPLGMASGHIRDFQITASGQYGQWAPKLARLHYSGSINAWSTKEPFSWIKVDLLAPMIIHGIKTQGARQKFSSLYISQFIIMYSLDGKKWQTYRGNSTGTLMVFFGNVDSSGIKHNIFNPPIIARYIRLHPTHYSIRSTLRMELMGCDLNSCSMPLGMESKAISDAQITASSYFTNMFATWSPSKARLHLQGRSNAWRPQVNNPKEWLQVDFQKTMKVTGVTTQGVKSLDTSMYVKEFLISSSQDGHQWTLFFQNGKVKVFQGNQDSFTPVVNSLDPPLLTRYLRIHPQSWVHQIALRMEVLGCEAQDLY

SEQ ID NO: 327 - DNA, 4371 bp, synthetic construct
  misc_feature 1..4371: note = Variant of human B-domain deleted Factor VIII
  source 1..4371: mol_type = other DNA
atgcagattgaactgtctacctgcttcttcctctgtttgctgaggttctgctttagcgccactagacggtactaccttggcgctgtggagctgtcctgggactatatgcagagtgatttgggagagcttcccgtcgacgcacgatttcctcctcgcgttccaaagtcatttcccttcaacacaagcgtggtgtacaagaagacgctcttcgtcgaattcaccgatcacctgttcaatatcgccaaacccagaccaccatggatgggtcttttggggcctaccatacaagcggaggtgtatgacacagttgttatcactctcaagaacatggcttctcatccggtaagtcttcacgcagtgggcgtgtcctactggaaagcttcagaaggagccgagtatgatgatcagacatcccagagggagaaagaagacgacaaggtatttccaggtgggtctcatacctatgtgtggcaagtgctcaaagagaatggccctatggcaagcgatccgctctgtttgacttacagctacctttcacacgttgacctcgtcaaggacctcaactccgggttgattggagccttgttggtatgcagggaaggatctcttgccaaagagaagacacagaccctccacaagtttatccttctctttgctgtgttcgatgagggcaaaagttggcatagcgaaacgaagaattccctcatgcaggatcgcgacgcagccagcgccagagcttggcccaagatgcacactgtgaacggatatgtcaataggtcacttcctggcttgattgggtgtcatcggaaaagtgtctactggcacgtgatcggaatggggacaacaccagaggtccactccatatttctcgaaggccataccttccttgttcgaaaccacagacaggcatccttggagatctctcccattacctttctcactgcccaaacgctccttatggacttgggtcagttccttctcttctgccatatcagctcacaccagcatgatggtatggaagcttatgtgaaagtcgacagttgtcctgaggagccacagttgcgcatgaagaataatgaagaagccgaggattacgacgacgatctcaccgattctgagatggacgtggtgaggtttgatgacgacaactctccctccttcattcaaatccggagcgtggcgaagaaacaccccaagacttgggtccactatatagcggcggaagaggaggattgggattacgctcctcttgtattggcaccagatgaccgctcatacaaaagccagtacctcaacaacggaccgcagagaattggccggaagtataagaaagtgcgatttatggcctatacagacgaaacctttaagacaagggaggccatccagcatgagagtgggattttgggacctcttctttacggcgaagttggtgataccctcctcatcatcttcaagaatcaagcttctcgcccctataacatttacccacacgggatcactgacgttaggcctttgtatagcagaagacttcccaaaggcgtgaagcatctcaaagacttccccattttgccaggcgagatctttaagtacaaatggaccgtcacagtggaagatggaccgactaaatcagaccctcgatgccttacgcggtactattcctccttcgtgaatatggagagagatttggcaagcggactcataggaccactcctcatctgttacaaggaatctgtagaccagaggggtaaccagattatgagtgataaacgcaatgtgatcctttttagcgtcttcgacgagaaccggtcctggtacttgaccgagaatatacaaaggttccttcccaaccccgcaggcgttcagttggaagaccctgagtttcaggccagcaatattatgcactcaatcaacggctatgtgtttgatagtctccagctttctgtttgcctccatgaagtagcctattggtacatcttgtcaattggtgctcaaacagacttcctctccgtcttcttctccggctacacctttaagcacaagatggtgtatgaggacactctcacactctttccattttctggagaaaccgtgttcatgagcatggagaatccaggcctttggatcttgggttgccacaacagtgattttcgcaatcggggaatgactgctctcctcaaagtcagcagctgtgataagaacacaggcgactattacgaagattcttacgaggacataagtgcctacttgttgtccaagaataacgccattgagcccagatcattctcccagaatcctcccgtgcttaaaaggcatcagcgcgaaatcaccagaactactcttcagtctgatcaagaggagattgactatgacgacaccataagcgtggaaatgaagaaggaggatttcgatatctatgacgaagatgagaaccagtctccgcggagctttcagaagaagacgcgacactacttcattgcagcagtcgaaaggctttgggactacggtatgtcatcatcccctcatgtgttgcgcaatagagctcagagtggaagtgttccacagttcaagaaagtcgtctttcaagagtttacagatggcagcttcacacagcctctctatcggggcgagcttaacgaacatttgggactccttggtccctatatccgagccgaagtggaggacaacattatggttacctttaggaatcaagcctctcgcccctacagcttctactcctccctcatcagttatgaggaggatcagagacaaggcgctgaaccacggaagaactttgtgaaaccgaatgagacgaagacctacttctggaaagtacagcaccacatggcccccacaaaagacgaattcgattgcaaagcatgggcgtatttttcagacgttgacttggagaaagatgtacattcaggacttattggtcctttgttggtgtgtcacactaacactctcaatccagcccatggcaggcaggtgacagtccaggaattcgctcttttctttaccatctttgatgagaccaagtcctggtacttcacggaaaacatggagcgcaattgcagagccccctgtaacatacagatggaggaccctacctttaaggaaaattatcggttccacgcaatcaacggatacattatggatacactccctggccttgtgatggctcaggaccaacgaatcaggtggtacctcctcagcatgggttctaatgagaacatacactccattcacttttcaggacatgtgttcactgtccggaagaaagaagagtataagatggccctctacaatttgtatccaggcgtgtttgagaccgttgaaatgcttccctctaaagctggcatctggagagtagagtgcttgatcggagaacatcttcacgcaggtatgagcaccttgttcctcgtgtacagcaacaaatgtcagaccccacttggcatggccagtggacacattcgcgactttcagatcacagcatctggccagtatggacaatgggccccaaagttggctcgcctccattactccggtagcataaatgcgtggtccactaaagaacctttcagctggattaaggtcgatcttcttgcccccatgatcatccacggcattaagacacagggagcgaggcagaaattctcctccctctacatctcacagttcattattatgtatagtttggacggcaagaagtggcaaacttatagaggtaacagtactggaacactcatggtgttcttcggcaacgttgatagctctggcatcaaacacaacatctttaatcctcccataatagctcggtacaatagattgcatccgacccactacagcattaggagtacactccgaatggagcttatgggttgcgacttgaattcctgttcaatgccactcggaatggagtctaaagccatctctgatgcacagataaccgccagtagctactttacgaacatgtttgctacgtggtcaccctctaaggcaaggcttcatttgcaaggccggtctaatgcctggagacctcaggtgaacaacccgaaagaatggctccaggtggactttcagaagaccatgaaagtaacaggtgtcactactcagggagttaagtccttggataccagcatgtatgtgaaggagttccttatttcctcatcacaagatggccaccagtggaccctcttctttcagaatggtaaggtcaaagtgtttcagggcaatcaagacagcttcacacccgtggtgaacagtcttgatcctccactcttgacacgataccttcgaatccatccacagtcttgggttcaccagattgcattgcgcatggaagtacttggatgcgaggctcaggacctctac

SEQ ID NO: 328 - protein, 1457 aa, synthetic construct
  REGION 1..1457: note = Variant of human B-domain deleted Factor VIII
MQIELSTCFFLCLLRFCFSATRRYYLGAVELSWDYMQSDLGELPVDARFPPRVPKSFPFNTSVVYKKTLFVEFTDHLFNIAKPRPPWMGLLGPTIQAEVYDTVVITLKNMASHPVSLHAVGVSYWKASEGAEYDDQTSQREKEDDKVFPGGSHTYVWQVLKENGPMASDPLCLTYSYLSHVDLVKDLNSGLIGALLVCREGSLAKEKTQTLHKFILLFAVFDEGKSWHSETKNSLMQDRDAASARAWPKMHTVNGYVNRSLPGLIGCHRKSVYWHVIGMGTTPEVHSIFLEGHTFLVRNHRQASLEISPITFLTAQTLLMDLGQFLLFCHISSHQHDGMEAYVKVDSCPEEPQLRMKNNEEAEDYDDDLTDSEMDVVRFDDDNSPSFIQIRSVAKKHPKTWVHYIAAEEEDWDYAPLVLAPDDRSYKSQYLNNGPQRIGRKYKKVRFMAYTDETFKTREAIQHESGILGPLLYGEVGDTLLIIFKNQASRPYNIYPHGITDVRPLYSRRLPKGVKHLKDFPILPGEIFKYKWTVTVEDGPTKSDPRCLTRYYSSFVNMERDLASGLIGPLLICYKESVDQRGNQIMSDKRNVILFSVFDENRSWYLTENIQRFLPNPAGVQLEDPEFQASNIMHSINGYVFDSLQLSVCLHEVAYWYILSIGAQTDFLSVFFSGYTFKHKMVYEDTLTLFPFSGETVFMSMENPGLWILGCHNSDFRNRGMTALLKVSSCDKNTGDYYEDSYEDISAYLLSKNNAIEPRSFSQNPPVLKRHQREITRTTLQSDQEEIDYDDTISVEMKKEDFDIYDEDENQSPRSFQKKTRHYFIAAVERLWDYGMSSSPHVLRNRAQSGSVPQFKKVVFQEFTDGSFTQPLYRGELNEHLGLLGPYIRAEVEDNIMVTFRNQASRPYSFYSSLISYEEDQRQGAEPRKNFVKPNETKTYFWKVQHHMAPTKDEFDCKAWAYFSDVDLEKDVHSGLIGPLLVCHTNTLNPAHGRQVTVQEFALFFTIFDETKSWYFTENMERNCRAPCNIQMEDPTFKENYRFHAINGYIMDTLPGLVMAQDQRIRWYLLSMGSNENIHSIHFSGHVFTVRKKEEYKMALYNLYPGVFETVEMLPSKAGIWRVECLIGEHLHAGMSTLFLVYSNKCQTPLGMASGHIRDFQITASGQYGQWAPKLARLHYSGSINAWSTKEPFSWIKVDLLAPMIIHGIKTQGARQKFSSLYISQFIIMYSLDGKKWQTYRGNSTGTLMVFFGNVDSSGIKHNIFNPPIIARYNRLHPTHYSIRSTLRMELMGCDLNSCSMPLGMESKAISDAQITASSYFTNMFATWSPSKARLHLQGRSNAWRPQVNNPKEWLQVDFQKTMKVTGVTTQGVKSLDTSMYVKEFLISSSQDGHQWTLFFQNGKVKVFQGNQDSFTPVVNSLDPPLLTRYLRIHPQSWVHQIALRMEVLGCEAQDLY

SEQ ID NO: 329 - DNA, 4371 bp, synthetic construct
  misc_feature 1..4371: note = Variant of human B-domain deleted Factor VIII
  source 1..4371: mol_type = other DNA
atgcagattgaactgtctacctgcttcttcctctgtttgctgaggttctgctttagcgccactagacggtactaccttggcgctgtggagctgtcctgggactatatgcagagtgatttgggagagcttcccgtcgacgcacgatttcctcctcgcgttccaaagtcatttcccttcaacacaagcgtggtgtacaagaagacgctcttcgtcgaattcaccgatcacctgttcaatatcgccaaacccagaccaccatggatgggtcttttggggcctaccatacaagcggaggtgtatgacacagttgttatcactctcaagaacatggcttctcatccggtaagtcttcacgcagtgggcgtgtcctactggaaagcttcagaaggagccgagtatgatgatcagacatcccagagggagaaagaagacgacaaggtatttccaggtgggtctcatacctatgtgtggcaagtgctcaaagagaatggccctatggcaagcgatccgctctgtttgacttacagctacctttcacacgttgacctcgtcaaggacctcaactccgggttgattggagccttgttggtatgcagggaaggatctcttgccaaagagaagacacagaccctccacaagtttatccttctctttgctgtgttcgatgagggcaaaagttggcatagcgaaacgaagaattccctcatgcaggatcgcgacgcagccagcgccagagcttggcccaagatgcacactgtgaacggatatgtcaataggtcacttcctggcttgattgggtgtcatcggaaaagtgtctactggcacgtgatcggaatggggacaacaccagaggtccactccatatttctcgaaggccataccttccttgttcgaaaccacagacaggcatccttggagatctctcccattacctttctcactgcccaaacgctccttatggacttgggtcagttccttctcttctgccatatcagctcacaccagcatgatggtatggaagcttatgtgaaagtcgacagttgtcctgaggagccacagttgcgcatgaagaataatgaagaagccgaggattacgacgacgatctcaccgattctgagatggacgtggtgaggtttgatgacgacaactctccctccttcattcaaatccggagcgtggcgaagaaacaccccaagacttgggtccactatatagcggcggaagaggaggattgggattacgctcctcttgtattggcaccagatgaccgctcatacaaaagccagtacctcaacaacggaccgcagagaattggccggaagtataagaaagtgcgatttatggcctatacagacgaaacctttaagacaagggaggccatccagcatgagagtgggattttgggacctcttctttacggcgaagttggtgataccctcctcatcatcttcaagaatcaagcttctcgcccctataacatttacccacacgggatcactgacgttaggcctttgtatagcagaagacttcccaaaggcgtgaagcatctcaaagacttccccattttgccaggcgagatctttaagtacaaatggaccgtcacagtggaagatggaccgactaaatcagaccctcgatgccttacgcggtactattcctccttcgtgaatatggagagagatttggcaagcggactcataggaccactcctcatctgttacaaggaatctgtagaccagaggggtaaccagattatgagtgataaacgcaatgtgatcctttttagcgtcttcgacgagaaccggtcctggtacttgaccgagaatatacaaaggttccttcccaaccccgcaggcgttcagttggaagaccctgagtttcaggccagcaatattatgcactcaatcaacggctatgtgtttgatagtctccagctttctgtttgcctccatgaagtagcctattggtacatcttgtcaattggtgctcaaacagacttcctctccgtcttcttctccggctacacctttaagcacaagatggtgtatgaggacactctcacactctttccattttctggagaaaccgtgttcatgagcatggagaatccaggcctttggatcttgggttgccacaacagtgattttcgcaatcggggaatgactgctctcctcaaagtcagcagctgtgataagaacacaggcgactattacgaagattcttacgaggacataagtgcctacttgttgtccaagaataacgccattgagcccagatcattctcccagaatcctcccgtgcttaaaaggcatcagcgcgaaatcaccagaactactcttcagtctgatcaagaggagattgactatgacgacaccataagcgtggaaatgaagaaggaggatttcgatatctatgacgaagatgagaaccagtctccgcggagctttcagaagaagacgcgacactacttcattgcagcagtcgaaaggctttgggactacggtatgtcatcatcccctcatgtgttgcgcaatagagctcagagtggaagtgttccacagttcaagaaagtcgtctttcaagagtttacagatggcagcttcacacagcctctctatcggggcgagcttaacgaacatttgggactccttggtccctatatccgagccgaagtggaggacaacattatggttacctttaggaatcaagcctctcgcccctacagcttctactcctccctcatcagttatgaggaggatcagagacaaggcgctgaaccacggaagaactttgtgaaaccgaatgagacgaagacctacttctggaaagtacagcaccacatggcccccacaaaagacgaattcgattgcaaagcatgggcgtatttttcagacgttgacttggagaaagatgtacattcaggacttattggtcctttgttggtgtgtcacactaacactctcaatccagcccatggcaggcaggtgacagtccaggaattcgctcttttctttaccatctttgatgagaccaagtcctggtacttcacggaaaacatggagcgcaattgcagagccccctgtaacatacagatggaggaccctacctttaaggaaaattatcggttccacgcaatcaacggatacattatggatacactccctggccttgtgatggctcaggaccaacgaatcaggtggtacctcctcagcatgggttctaatgagaacatacactccattcacttttcaggacatgtgttcactgtccggaagaaagaagagtataagatggccctctacaatttgtatccaggcgtgtttgagaccgttgaaatgcttccctctaaagctggcatctggagagtagagtgcttgatcggagaacatcttcacgcaggtatgagcaccttgttcctcgtgtacagcaacaaatgtcagaccccacttggcatggccagtggacacattcgcgactttcagatcacagcatctggccagtatggacaatgggccccaaagttggctcgcctccattactccggtagcataaatgcgtggtccactaaagaacctttcagctggattaaggtcgatcttcttgcccccatgatcatccacggcattaagacacagggagcgaggcagaaattctccacgctctacatctcacagttcattattatgtatagtttggacggcaagaagtggcaaacttatagaggtaacagtactggaacactcatggtgttcttcggcaacgttgatagctctggcatcaaacacaacatctttaatcctcccataatagctcggtacatcagattgcatccgacccactacagcattaggagtacactccgaatggagcttatgggttgcgacttgaattcctgttcaatgccactcggaatggagtctaaagccatctctgatgcacagataaccgccagtagctactttacgaacatgtttgctacgtggtcaccctctaaggcaaggcttcatttgcaaggccggtctaatgcctggagacctcaggtgaacaacccgaaagaatggctccaggtggactttcagaagaccatgaaagtaacaggtgtcactactcagggagttaagtccttggataccagcatgtatgtgaaggagttccttatttcctcatcacaagatggccaccagtggaccctcttctttcagaatggtaaggtcaaagtgtttcagggcaatcaagacagcttcacacccgtggtgaacagtcttgatcctccactcttgacacgataccttcgaatccatccacagtcttgggttcaccagattgcattgcgcatggaagtacttggatgcgaggctcaggacctctac

SEQ ID NO: 330 - protein, 1457 aa, synthetic construct
  REGION 1..1457: note = Variant of human B-domain deleted Factor VIII
MQIELSTCFFLCLLRFCFSATRRYYLGAVELSWDYMQSDLGELPVDARFPPRVPKSFPFNTSVVYKKTLFVEFTDHLFNIAKPRPPWMGLLGPTIQAEVYDTVVITLKNMASHPVSLHAVGVSYWKASEGAEYDDQTSQREKEDDKVFPGGSHTYVWQVLKENGPMASDPLCLTYSYLSHVDLVKDLNSGLIGALLVCREGSLAKEKTQTLHKFILLFAVFDEGKSWHSETKNSLMQDRDAASARAWPKMHTVNGYVNRSLPGLIGCHRKSVYWHVIGMGTTPEVHSIFLEGHTFLVRNHRQASLEISPITFLTAQTLLMDLGQFLLFCHISSHQHDGMEAYVKVDSCPEEPQLRMKNNEEAEDYDDDLTDSEMDVVRFDDDNSPSFIQIRSVAKKHPKTWVHYIAAEEEDWDYAPLVLAPDDRSYKSQYLNNGPQRIGRKYKKVRFMAYTDETFKTREAIQHESGILGPLLYGEVGDTLLIIFKNQASRPYNIYPHGITDVRPLYSRRLPKGVKHLKDFPILPGEIFKYKWTVTVEDGPTKSDPRCLTRYYSSFVNMERDLASGLIGPLLICYKESVDQRGNQIMSDKRNVILFSVFDENRSWYLTENIQRFLPNPAGVQLEDPEFQASNIMHSINGYVFDSLQLSVCLHEVAYWYILSIGAQTDFLSVFFSGYTFKHKMVYEDTLTLFPFSGETVFMSMENPGLWILGCHNSDFRNRGMTALLKVSSCDKNTGDYYEDSYEDISAYLLSKNNAIEPRSFSQNPPVLKRHQREITRTTLQSDQEEIDYDDTISVEMKKEDFDIYDEDENQSPRSFQKKTRHYFIAAVERLWDYGMSSSPHVLRNRAQSGSVPQFKKVVFQEFTDGSFTQPLYRGELNEHLGLLGPYIRAEVEDNIMVTFRNQASRPYSFYSSLISYEEDQRQGAEPRKNFVKPNETKTYFWKVQHHMAPTKDEFDCKAWAYFSDVDLEKDVHSGLIGPLLVCHTNTLNPAHGRQVTVQEFALFFTIFDETKSWYFTENMERNCRAPCNIQMEDPTFKENYRFHAINGYIMDTLPGLVMAQDQRIRWYLLSMGSNENIHSIHFSGHVFTVRKKEEYKMALYNLYPGVFETVEMLPSKAGIWRVECLIGEHLHAGMSTLFLVYSNKCQTPLGMASGHIRDFQITASGQYGQWAPKLARLHYSGSINAWSTKEPFSWIKVDLLAPMIIHGIKTQGARQKFSTLYISQFIIMYSLDGKKWQTYRGNSTGTLMVFFGNVDSSGIKHNIFNPPIIARYIRLHPTHYSIRSTLRMELMGCDLNSCSMPLGMESKAISDAQITASSYFTNMFATWSPSKARLHLQGRSNAWRPQVNNPKEWLQVDFQKTMKVTGVTTQGVKSLDTSMYVKEFLISSSQDGHQWTLFFQNGKVKVFQGNQDSFTPVVNSLDPPLLTRYLRIHPQSWVHQIALRMEVLGCEAQDLY

SEQ ID NO: 331 - DNA, 4371 bp, synthetic construct
  misc_feature 1..4371: note = Variant of human B-domain deleted Factor VIII
  source 1..4371: mol_type = other DNA
atgcagattgaactgtctacctgcttcttcctctgtttgctgaggttctgctttagcgccactagacggtactaccttggcgctgtggagctgtcctgggactatatgcagagtgatttgggagagcttcccgtcgacgcacgatttcctcctcgcgttccaaagtcatttcccttcaacacaagcgtggtgtacaagaagacgctcttcgtcgaattcaccgatcacctgttcaatatcgccaaacccagaccaccatggatgggtcttttggggcctaccatacaagcggaggtgtatgacacagttgttatcactctcaagaacatggcttctcatccggtaagtcttcacgcagtgggcgtgtcctactggaaagcttcagaaggagccgagtatgatgatcagacatcccagagggagaaagaagacgacaaggtatttccaggtgggtctcatacctatgtgtggcaagtgctcaaagagaatggccctatggcaagcgatccgctctgtttgacttacagctacctttcacacgttgacctcgtcaaggacctcaactccgggttgattggagccttgttggtatgcagggaaggatctcttgccaaagagaagacacagaccctccacaagtttatccttctctttgctgtgttcgatgagggcaaaagttggcatagcgaaacgaagaattccctcatgcaggatcgcgacgcagccagcgccagagcttggcccaagatgcacactgtgaacggatatgtcaataggtcacttcctggcttgattgggtgtcatcggaaaagtgtctactggcacgtgatcggaatggggacaacaccagaggtccactccatatttctcgaaggccataccttccttgttcgaaaccacagacaggcatccttggagatctctcccattacctttctcactgcccaaacgctccttatggacttgggtcagttccttctcttctgccatatcagctcacaccagcatgatggtatggaagcttatgtgaaagtcgacagttgtcctgaggagccacagttgcgcatgaagaataatgaagaagccgaggattacgacgacgatctcaccgattctgagatggacgtggtgaggtttgatgacgacaactctccctccttcattcaaatccggagcgtggcgaagaaacaccccaagacttgggtccactatatagcggcggaagaggaggattgggattacgctcctcttgtattggcaccagatgaccgctcatacaaaagccagtacctcaacaacggaccgcagagaattggccggaagtataagaaagtgcgatttatggcctatacagacgaaacctttaagacaagggaggccatccagcatgagagtgggattttgggacctcttctttacggcgaagttggtgataccctcctcatcatcttcaagaatcaagcttctcgcccctataacatttacccacacgggatcactgacgttaggcctttgtatagcagaagacttcccaaaggcgtgaagcatctcaaagacttccccattttgccaggcgagatctttaagtacaaatggaccgtcacagtggaagatggaccgactaaatcagaccctcgatgccttacgcggtactattcctccttcgtgaatatggagagagatttggcaagcggactcataggaccactcctcatctgttacaaggaatctgtagaccagaggggtaaccagattatgagtgataaacgcaatgtgatcctttttagcgtcttcgacgagaaccggtcctggtacttgaccgagaatatacaaaggttccttcccaaccccgcaggcgttcagttggaagaccctgagtttcaggccagcaatattatgcactcaatcaacggctatgtgtttgatagtctccagctttctgtttgcctccatgaagtagcctattggtacatcttgtcaattggtgctcaaacagacttcctctccgtcttcttctccggctacacctttaagcacaagatggtgtatgaggacactctcacactctttccattttctggagaaaccgtgttcatgagcatggagaatccaggcctttggatcttgggttgccacaacagtgattttcgcaatcggggaatgactgctctcctcaaagtcagcagctgtgataagaacacaggcgactattacgaagattcttacgaggacataagtgcctacttgttgtccaagaataacgccattgagcccagatcattctcccagaatcctcccgtgcttaaaaggcatcagcgcgaaatcaccagaactactcttcagtctgatcaagaggagattgactatgacgacaccataagcgtggaaatgaagaaggaggatttcgatatctatgacgaagatgagaaccagtctccgcggagctttcagaagaagacgcgacactacttcattgcagcagtcgaaaggctttgggactacggtatgtcatcatcccctcatgtgttgcgcaatagagctcagagtggaagtgttccacagttcaagaaagtcgtctttcaagagtttacagatggcagcttcacacagcctctctatcggggcgagcttaacgaacatttgggactccttggtccctatatccgagccgaagtggaggacaacattatggttacctttaggaatcaagcctctcgcccctacagcttctactcctccctcatcagttatgaggaggatcagagacaaggcgctgaaccacggaagaactttgtgaaaccgaatgagacgaagacctacttctggaaagtacagcaccacatggcccccacaaaagacgaattcgattgcaaagcatgggcgtatttttcagacgttgacttggagaaagatgtacattcaggacttattggtcctttgttggtgtgtcacactaacactctcaatccagcccatggcaggcaggtgacagtccaggaattcgctcttttctttaccatctttgatgagaccaagtcctggtacttcacggaaaacatggagcgcaattgcagagccccctgtaacatacagatggaggaccctacctttaaggaaaattatcggttccacgcaatcaacggatacattatggatacactccctggccttgtgatggctcaggaccaacgaatcaggtggtacctcctcagcatgggttctaatgagaacatacactccattcacttttcaggacatgtgttcactgtccggaagaaagaagagtataagatggccctctacaatttgtatccaggcgtgtttgagaccgttgaaatgcttccctctaaagctggcatctggagagtagagtgcttgatcggagaacatcttcacgcaggtatgagcaccttgttcctcgtgtacagcaacaaatgtcagaccccacttggcatggccagtggacacattcgcgactttcagatcacagcatctggccagtatggacaatgggccccaaagttggctcgcctccattactccggtagcataaatgcgtggtccactaaagaacctttcagctggattaaggtcgatcttcttgcccccatgatcatccacggcattaagacacagggagcgaggcagaaattctcctccctctacatctcacagttcattattatgtatagtttggacggcaagaagtggcaaacttatagaggtaacagtactggaacactcatggtgttcttcggcaacgttgatagctctggcatcaaacacaacatctttaatcctcccataatagctcggtacatcagattgcatccgacccactacagcattaggagtacactccgaatggagcttatgggttgcgacttgaattcctgttcaatgccactcggaatggagtctaaagccatctctgatgcacagataaccgccagtagctactttacgaacatgtttgctacgtggtcaccctctaaggcaaggcttcatttgcaaggccggtctaatgcctggagacctcaggtgaacaacccgaaagaatggctccaggtggactttcagaagaccatgaaagtaacaggtgtcactactcagggagttaagtccttggataccagcatgtatgtgaaggagttccttatttcctcatcacaagatggccaccagtggaccctcttctttcagaatggtaaggtcaaagtgtttcagggcaatcaagacagcttcacacccgtggtgaacagtcttgatcctccactcttgacacgataccttcgaatccatccacagtcttgggttcaccagacggcattgcgcatggaagtacttggatgcgaggctcaggacctctac

SEQ ID NO: 332 - protein, 1457 aa, synthetic construct
  REGION 1..1457: note = Variant of human B-domain deleted Factor VIII
MQIELSTCFFLCLLRFCFSATRRYYLGAVELSWDYMQSDLGELPVDARFPPRVPKSFPFNTSVVYKKTLFVEFTDHLFNIAKPRPPWMGLLGPTIQAEVYDTVVITLKNMASHPVSLHAVGVSYWKASEGAEYDDQTSQREKEDDKVFPGGSHTYVWQVLKENGPMASDPLCLTYSYLSHVDLVKDLNSGLIGALLVCREGSLAKEKTQTLHKFILLFAVFDEGKSWHSETKNSLMQDRDAASARAWPKMHTVNGYVNRSLPGLIGCHRKSVYWHVIGMGTTPEVHSIFLEGHTFLVRNHRQASLEISPITFLTAQTLLMDLGQFLLFCHISSHQHDGMEAYVKVDSCPEEPQLRMKNNEEAEDYDDDLTDSEMDVVRFDDDNSPSFIQIRSVAKKHPKTWVHYIAAEEEDWDYAPLVLAPDDRSYKSQYLNNGPQRIGRKYKKVRFMAYTDETFKTREAIQHESGILGPLLYGEVGDTLLIIFKNQASRPYNIYPHGITDVRPLYSRRLPKGVKHLKDFPILPGEIFKYKWTVTVEDGPTKSDPRCLTRYYSSFVNMERDLASGLIGPLLICYKESVDQRGNQIMSDKRNVILFSVFDENRSWYLTENIQRFLPNPAGVQLEDPEFQASNIMHSINGYVFDSLQLSVCLHEVAYWYILSIGAQTDFLSVFFSGYTFKHKMVYEDTLTLFPFSGETVFMSMENPGLWILGCHNSDFRNRGMTALLKVSSCDKNTGDYYEDSYEDISAYLLSKNNAIEPRSFSQNPPVLKRHQREITRTTLQSDQEEIDYDDTISVEMKKEDFDIYDEDENQSPRSFQKKTRHYFIAAVERLWDYGMSSSPHVLRNRAQSGSVPQFKKVVFQEFTDGSFTQPLYRGELNEHLGLLGPYIRAEVEDNIMVTFRNQASRPYSFYSSLISYEEDQRQGAEPRKNFVKPNETKTYFWKVQHHMAPTKDEFDCKAWAYFSDVDLEKDVHSGLIGPLLVCHTNTLNPAHGRQVTVQEFALFFTIFDETKSWYFTENMERNCRAPCNIQMEDPTFKENYRFHAINGYIMDTLPGLVMAQDQRIRWYLLSMGSNENIHSIHFSGHVFTVRKKEEYKMALYNLYPGVFETVEMLPSKAGIWRVECLIGEHLHAGMSTLFLVYSNKCQTPLGMASGHIRDFQITASGQYGQWAPKLARLHYSGSINAWSTKEPFSWIKVDLLAPMIIHGIKTQGARQKFSSLYISQFIIMYSLDGKKWQTYRGNSTGTLMVFFGNVDSSGIKHNIFNPPIIARYIRLHPTHYSIRSTLRMELMGCDLNSCSMPLGMESKAISDAQITASSYFTNMFATWSPSKARLHLQGRSNAWRPQVNNPKEWLQVDFQKTMKVTGVTTQGVKSLDTSMYVKEFLISSSQDGHQWTLFFQNGKVKVFQGNQDSFTPVVNSLDPPLLTRYLRIHPQSWVHQTALRMEVLGCEAQDLY

SEQ ID NO: 333 - DNA, 4371 bp, synthetic construct
  misc_feature 1..4371: note = Variant of human B-domain deleted Factor VIII
  source 1..4371: mol_type = other DNA
atgcagattgaactgtctacctgcttcttcctctgtttgctgaggttctgctttagcgccactagacggtactaccttggcgctgtggagctgtcctgggactatatgcagagtgatttgggagagcttcccgtcgacgcacgatttcctcctcgcgttccaaagtcatttcccttcaacacaagcgtggtgtacaagaagacgctcttcgtcgaattcaccgatcacctgttcaatatcgccaaacccagaccaccatggatgggtcttttggggcctaccatacaagcggaggtgtatgacacagttgttatcactctcaagaacatggcttctcatccggtaagtcttcacgcagtgggcgtgtcctactggaaagcttcagaaggagccgagtatgatgatcagacatcccagagggagaaagaagacgacaaggtatttccaggtgggtctcatacctatgtgtggcaagtgctcaaagagaatggccctatggcaagcgatccgctctgtttgacttacagctacctttcacacgttgacctcgtcaaggacctcaactccgggttgattggagccttgttggtatgcagggaaggatctcttgccaaagagaagacacagaccctccacaagtttatccttctctttgctgtgttcgatgagggcaaaagttggcatagcgaaacgaagaattccctcatgcaggatcgcgacgcagccagcgccagagcttggcccaagatgcacactgtgaacggatatgtcaataggtcacttcctggcttgattgggtgtcatcggaaaagtgtctactggcacgtgatcggaatggggacaacaccagaggtccactccatatttctcgaaggccataccttccttgttcgaaaccacagacaggcatccttggagatctctcccattacctttctcactgcccaaacgctccttatggacttgggtcagttccttctcttctgccatatcagctcacaccagcatgatggtatggaagcttatgtgaaagtcgacagttgtcctgaggagccacagttgcgcatgaagaataatgaagaagccgaggattacgacgacgatctcaccgattctgagatggacgtggtgaggtttgatgacgacaactctccctccttcattcaaatccggagcgtggcgaagaaacaccccaagacttgggtccactatatagcggcggaagaggaggattgggattacgctcctcttgtattggcaccagatgaccgctcatacaaaagccagtacctcaacaacggaccgcagagaattggccggaagtataagaaagtgcgatttatggcctatacagacgaaacctttaagacaagggaggccatccagcatgagagtgggattttgggacctcttctttacggcgaagttggtgataccctcctcatcatcttcaagaatcaagcttctcgcccctataacatttacccacacgggatcactgacgttaggcctttgtatagcagaagacttcccaaaggcgtgaagcatctcaaagacttccccattttgccaggcgagatctttaagtacaaatggaccgtcacagtggaagatggaccgactaaatcagaccctcgatgccttacgcggtactattcctccttcgtgaatatggagagagatttggcaagcggactcataggaccactcctcatctgttacaaggaatctgtagaccagaggggtaaccagattatgagtgataaacgcaatgtgatcctttttagcgtcttcgacgagaaccggtcctggtacttgaccgagaatatacaaaggttccttcccaaccccgcaggcgttcagttggaagaccctgagtttcaggccagcaatattatgcactcaatcaacggctatgtgtttgatagtctccagctttctgtttgcctccatgaagtagcctattggtacatcttgtcaattggtgctcaaacagacttcctctccgtcttcttctccggctacacctttaagcacaagatggtgtatgaggacactctcacactctttccattttctggagaaaccgtgttcatgagcatggagaatccaggcctttggatcttgggttgccacaacagtgattttcgcaatcggggaatgactgctctcctcaaagtcagcagctgtgataagaacacaggcgactattacgaagattcttacgaggacataagtgcctacttgttgtccaagaataacgccattgagcccagatcattctcccagaatcctcccgtgcttaaaaggcatcagcgcgaaatcaccagaactactcttcagtctgatcaagaggagattgactatgacgacaccataagcgtggaaatgaagaaggaggatttcgatatctatgacgaagatgagaaccagtctccgcggagctttcagaagaagacgcgacactacttcattgcagcagtcgaaaggctttgggactacggtatgtcatcatcccctcatgtgttgcgcaatagagctcagagtggaagtgttccacagttcaagaaagtcgtctttcaagagtttacagatggcagcttcacacagcctctctatcggggcgagcttaacgaacatttgggactccttggtccctatatccgagccgaagtggaggacaacattatggttacctttaggaatcaagcctctcgcccctacagcttctactcctccctcatcagttatgaggaggatcagagacaaggcgctgaaccacggaagaactttgtgaaaccgaatgagacgaagacctacttctggaaagtacagcaccacatggcccccacaaaagacgaattcgattgcaaagcatgggcgtatttttcagacgttgacttggagaaagatgtacattcaggacttattggtcctttgttggtgtgtcacactaacactctcaatccagcccatggcaggcaggtgacagtccaggaattcgctcttttctttaccatctttgatgagaccaagtcctggtacttcacggaaaacatggagcgcaattgcagagccccctgtaacatacagatggaggaccctacctttaaggaaaattatcggttccacgcaatcaacggatacattatggatacactccctggccttgtgatggctcaggaccaacgaatcaggtggtacctcctcagcatgggttctaatgagaacatacactccattcacttttcaggacatgtgttcactgtccggaagaaagaagagtataagatggccctctacaatttgtatccaggcgtgtttgagaccgttgaaatgcttccctctaaagctggcatctggagagtagagtgcttgatcggagaacatcttcacgcaggtatgagcaccttgttcctcgtgtacagcaacaaatgtcagaccccacttggcatggccagtggacacattcgcgactttcagatcacagcatctggccagtatggacaatgggccccaaagttggctcgcctccattactccggtagcataaatgcgtggtccactaaagaacctcttagctggattaaggtcgatcttcttgcccccatgatcatccacggcattaagacacagggagcgaggcagaaattctcctccctctacatctcacagttcattattatgtatagtttggacggcaagaagtggcaaacttatagaggtaacagtactggaacactcatggtgttcttcggcaacgttgatagctctggcatcaaacacaacatctttaatcctcccataatagctcggtacatcagattgcatccgacccactacagcattaggagtacactccgaatggagcttatgggttgcgacttgaattcctgttcaatgccactcggaatggagtctaaagccatctctgatgcacagataaccgccagtagctactttacgaacatgtttgctacgtggtcaccctctaaggcaaggcttcatttgcaaggccggtctaatgcctggagacctcaggtgaacaacccgaaagaatggctccaggtggactttcagaagaccatgaaagtaacaggtgtcactactcagggagttaagtccttggataccagcatgtatgtgaaggagttccttatttcctcatcacaagatggccaccagtggaccctcttctttcagaatggtaaggtcaaagtgtttcagggcaatcaagacagcttcacacccgtggtgaacagtcttgatcctccactcttgacacgataccttcgaatccatccacagtcttgggttcaccagattgcattgcgcatggaagtacttggatgcgaggctcaggacctctac

SEQ ID NO: 334 - protein, 1457 aa, synthetic construct
  REGION 1..1457: note = Variant of human B-domain deleted Factor VIII
MQIELSTCFFLCLLRFCFSATRRYYLGAVELSWDYMQSDLGELPVDARFPPRVPKSFPFNTSVVYKKTLFVEFTDHLFNIAKPRPPWMGLLGPTIQAEVYDTVVITLKNMASHPVSLHAVGVSYWKASEGAEYDDQTSQREKEDDKVFPGGSHTYVWQVLKENGPMASDPLCLTYSYLSHVDLVKDLNSGLIGALLVCREGSLAKEKTQTLHKFILLFAVFDEGKSWHSETKNSLMQDRDAASARAWPKMHTVNGYVNRSLPGLIGCHRKSVYWHVIGMGTTPEVHSIFLEGHTFLVRNHRQASLEISPITFLTAQTLLMDLGQFLLFCHISSHQHDGMEAYVKVDSCPEEPQLRMKNNEEAEDYDDDLTDSEMDVVRFDDDNSPSFIQIRSVAKKHPKTWVHYIAAEEEDWDYAPLVLAPDDRSYKSQYLNNGPQRIGRKYKKVRFMAYTDETFKTREAIQHESGILGPLLYGEVGDTLLIIFKNQASRPYNIYPHGITDVRPLYSRRLPKGVKHLKDFPILPGEIFKYKWTVTVEDGPTKSDPRCLTRYYSSFVNMERDLASGLIGPLLICYKESVDQRGNQIMSDKRNVILFSVFDENRSWYLTENIQRFLPNPAGVQLEDPEFQASNIMHSINGYVFDSLQLSVCLHEVAYWYILSIGAQTDFLSVFFSGYTFKHKMVYEDTLTLFPFSGETVFMSMENPGLWILGCHNSDFRNRGMTALLKVSSCDKNTGDYYEDSYEDISAYLLSKNNAIEPRSFSQNPPVLKRHQREITRTTLQSDQEEIDYDDTISVEMKKEDFDIYDEDENQSPRSFQKKTRHYFIAAVERLWDYGMSSSPHVLRNRAQSGSVPQFKKVVFQEFTDGSFTQPLYRGELNEHLGLLGPYIRAEVEDNIMVTFRNQASRPYSFYSSLISYEEDQRQGAEPRKNFVKPNETKTYFWKVQHHMAPTKDEFDCKAWAYFSDVDLEKDVHSGLIGPLLVCHTNTLNPAHGRQVTVQEFALFFTIFDETKSWYFTENMERNCRAPCNIQMEDPTFKENYRFHAINGYIMDTLPGLVMAQDQRIRWYLLSMGSNENIHSIHFSGHVFTVRKKEEYKMALYNLYPGVFETVEMLPSKAGIWRVECLIGEHLHAGMSTLFLVYSNKCQTPLGMASGHIRDFQITASGQYGQWAPKLARLHYSGSINAWSTKEPLSWIKVDLLAPMIIHGIKTQGARQKFSSLYISQFIIMYSLDGKKWQTYRGNSTGTLMVFFGNVDSSGIKHNIFNPPIIARYIRLHPTHYSIRSTLRMELMGCDLNSCSMPLGMESKAISDAQITASSYFTNMFATWSPSKARLHLQGRSNAWRPQVNNPKEWLQVDFQKTMKVTGVTTQGVKSLDTSMYVKEFLISSSQDGHQWTLFFQNGKVKVFQGNQDSFTPVVNSLDPPLLTRYLRIHPQSWVHQIALRMEVLGCEAQDLY

SEQ ID NO: 335 - DNA, 4371 bp, synthetic construct
  misc_feature 1..4371: note = Variant of human B-domain deleted Factor VIII
  source 1..4371: mol_type = other DNA
atgcagattgaactgtctacctgcttcttcctctgtttgctgaggttctgctttagcgccactagacggtactaccttggcgctgtggagctgtcctgggactatatgcagagtgatttgggagagcttcccgtcgacgcacgatttcctcctcgcgttccaaagtcatttcccttcaacacaagcgtggtgtacaagaagacgctcttcgtcgaattcaccgatcacctgttcaatatcgccaaacccagaccaccatggatgggtcttttggggcctaccatacaagcggaggtgtatgacacagttgttatcactctcaagaacatggcttctcatccggtaagtcttcacgcagtgggcgtgtcctactggaaagcttcagaaggagccgagtatgatgatcagacatcccagagggagaaagaagacgacaaggtatttccaggtgggtctcatacctatgtgtggcaagtgctcaaagagaatggccctatggcaagcgatccgctctgtttgacttacagctacctttcacacgttgacctcgtcaaggacctcaactccgggttgattggagccttgttggtatgcagggaaggatctcttgccaaagagaagacacagaccctccacaagtttatccttctctttgctgtgttcgatgagggcaaaagttggcatagcgaaacgaagaattccctcatgcaggatcgcgacgcagccagcgccagagcttggcccaagatgcacactgtgaacggatatgtcaataggtcacttcctggcttgattgggtgtcatcggaaaagtgtctactggcacgtgatcggaatggggacaacaccagaggtccactccatatttctcgaaggccataccttccttgttcgaaaccacagacaggcatccttggagatctctcccattacctttctcactgcccaaacgctccttatggacttgggtcagttccttctcttctgccatatcagctcacaccagcatgatggtatggaagcttatgtgaaagtcgacagttgtcctgaggagccacagttgcgcatgaagaataatgaagaagccgaggattacgacgacgatctcaccgattctgagatggacgtggtgaggtttgatgacgacaactctccctccttcattcaaatccggagcgtggcgaagaaacaccccaagacttgggtccactatatagcggcggaagaggaggattgggattacgctcctcttgtattggcaccagatgaccgctcatacaaaagccagtacctcaacaacggaccgcagagaattggccggaagtataagaaagtgcgatttatggcctatacagacgaaacctttaagacaagggaggccatccagcatgagagtgggattttgggacctcttctttacggcgaagttggtgataccctcctcatcatcttcaagaatcaagcttctcgcccctataacatttacccacacgggatcactgacgttaggcctttgtatagcagaagacttcccaaaggcgtgaagcatctcaaagacttccccattttgccaggcgagatctttaagtacaaatggaccgtcacagtggaagatggaccgactaaatcagaccctcgatgccttacgcggtactattcctccttcgtgaatatggagagagatttggcaagcggactcataggaccactcctcatctgttacaaggaatctgtagaccagaggggtaaccagattatgagtgataaacgcaatgtgatcctttttagcgtcttcgacgagaaccggtcctggtacttgaccgagaatatacaaaggttccttcccaaccccgcaggcgttactttggaagaccctgagtttcaggccagcaatattatgcactcaatcaacggctatgtgtttgatagtctccagctttctgtttgcctccatgaagtagcctattggtacatcttgtcaattggtgctcaaacagacttcctctccgtcttcttctccggctacacctttaagcacaagatggtgtatgaggacactctcacactctttccattttctggagaaaccgtgttcatgagcatggagaatccaggcctttggatcttgggttgccacaacagtgattttcgcaatcggggaatgactgctctcctcaaagtcagcagctgtgataagaacacaggcgactattacgaagattcttacgaggacataagtgcctacttgttgtccaagaataacgccattgagcccagatcattctcccagaatcctcccgtgcttaaaaggcatcagcgcgaaatcaccagaactactcttcagtctgatcaagaggagattgactatgacgacaccataagcgtggaaatgaagaaggaggatttcgatatctatgacgaagatgagaaccagtctccgcggagctttcagaagaagacgcgacactacttcattgcagcagtcgaaaggctttgggactacggtatgtcatcatcccctcatgtgttgcgcaatagagctcagagtggaagtgttccacagttcaagaaagtcgtctttcaagagtttacagatggcagcttcacacagcctctctatcggggcgagcttaacgaacatttgggactccttggtccctatatccgagccgaagtggaggacaacattatggttacctttaggaatcaagcctctcgcccctacagcttctactcctccctcatcagttatgaggaggatcagagacaaggcgctgaaccacggaagaactttgtgaaaccgaatgagacgaagacctacttctggaaagtacagcaccacatggcccccacaaaagacgaattcgattgcaaagcatgggcgtatttttcagacgttgacttggagaaagatgtacattcaggacttattggtcctttgttggtgtgtcacactaacactctcaatccagcccatggcaggcaggtgacagtccaggaattcgctcttttctttaccatctttgatgagaccaagtcctggtacttcacggaaaacatggagcgcaattgcagagccccctgtaacatacagatggaggaccctacctttaaggaaaattatcggttccacgcaatcaacggatacattatggatacactccctggccttgtgatggctcaggaccaacgaatcaggtggtacctcctcagcatgggttctaatgagaacatacactccattcacttttcaggacatgtgttcactgtccggaagaaagaagagtataagatggccctctacaatttgtatccaggcgtgtttgagaccgttgaaatgcttccctctaaagctggcatctggagagtagagtgcttgatcggagaacatcttcacgcaggtatgagcaccttgttcctcgtgtacagcaacaaatgtcagaccccacttggcatggccagtggacacattcgcgactttcagatcacagcatctggccagtatggacaatgggccccaaagttggctcgcctccattactccggtagcataaatgcgtggtccactaaagaacctttcagctggattaaggtcgatcttcttgcccccatgatcatccacggcattaagacacagggagcgaggcagaaattctcctccctctacatctcacagttcattattatgtatagtttggacggcaagaagtggcaaacttatagaggtaacagtactggaacactcatggtgttcttcggcaacgttgatagctctggcatcaaacacaacatctttaatcctcccataatagctcggtacatcagattgcatccgacccactacagcattaggagtacactccgaatggagcttatgggttgcgacttgaattcctgttcaatgccactcggaatggagtctaaagccatctctgatgcacagataaccgccagtagctactttacgaacatgtttgctacgtggtcaccctctaaggcaaggcttcatttgcaaggccggtctaatgcctggagacctcaggtgaacaacccgaaagaatggctccaggtggactttcagaagaccatgaaagtaacaggtgtcactactcagggagttaagtccttggataccagcatgtatgtgaaggagttccttatttcctcatcacaagatggccaccagtggaccctcttctttcagaatggtaaggtcaaagtgtttcagggcaatcaagacagcttcacacccgtggtgaacagtcttgatcctccactcttgacacgataccttcgaatccatccacagtcttgggttcaccagattgcattgcgcatggaagtacttggatgcgaggctcaggacctctac

SEQ ID NO: 336 - protein, 1457 aa, synthetic construct
  REGION 1..1457: note = Variant of human B-domain deleted Factor VIII
MQIELSTCFFLCLLRFCFSATRRYYLGAVELSWDYMQSDLGELPVDARFPPRVPKSFPFNTSVVYKKTLFVEFTDHLFNIAKPRPPWMGLLGPTIQAEVYDTVVITLKNMASHPVSLHAVGVSYWKASEGAEYDDQTSQREKEDDKVFPGGSHTYVWQVLKENGPMASDPLCLTYSYLSHVDLVKDLNSGLIGALLVCREGSLAKEKTQTLHKFILLFAVFDEGKSWHSETKNSLMQDRDAASARAWPKMHTVNGYVNRSLPGLIGCHRKSVYWHVIGMGTTPEVHSIFLEGHTFLVRNHRQASLEISPITFLTAQTLLMDLGQFLLFCHISSHQHDGMEAYVKVDSCPEEPQLRMKNNEEAEDYDDDLTDSEMDVVRFDDDNSPSFIQIRSVAKKHPKTWVHYIAAEEEDWDYAPLVLAPDDRSYKSQYLNNGPQRIGRKYKKVRFMAYTDETFKTREAIQHESGILGPLLYGEVGDTLLIIFKNQASRPYNIYPHGITDVRPLYSRRLPKGVKHLKDFPILPGEIFKYKWTVTVEDGPTKSDPRCLTRYYSSFVNMERDLASGLIGPLLICYKESVDQRGNQIMSDKRNVILFSVFDENRSWYLTENIQRFLPNPAGVTLEDPEFQASNIMHSINGYVFDSLQLSVCLHEVAYWYILSIGAQTDFLSVFFSGYTFKHKMVYEDTLTLFPFSGETVFMSMENPGLWILGCHNSDFRNRGMTALLKVSSCDKNTGDYYEDSYEDISAYLLSKNNAIEPRSFSQNPPVLKRHQREITRTTLQSDQEEIDYDDTISVEMKKEDFDIYDEDENQSPRSFQKKTRHYFIAAVERLWDYGMSSSPHVLRNRAQSGSVPQFKKVVFQEFTDGSFTQPLYRGELNEHLGLLGPYIRAEVEDNIMVTFRNQASRPYSFYSSLISYEEDQRQGAEPRKNFVKPNETKTYFWKVQHHMAPTKDEFDCKAWAYFSDVDLEKDVHSGLIGPLLVCHTNTLNPAHGRQVTVQEFALFFTIFDETKSWYFTENMERNCRAPCNIQMEDPTFKENYRFHAINGYIMDTLPGLVMAQDQRIRWYLLSMGSNENIHSIHFSGHVFTVRKKEEYKMALYNLYPGVFETVEMLPSKAGIWRVECLIGEHLHAGMSTLFLVYSNKCQTPLGMASGHIRDFQITASGQYGQWAPKLARLHYSGSINAWSTKEPFSWIKVDLLAPMIIHGIKTQGARQKFSSLYISQFIIMYSLDGKKWQTYRGNSTGTLMVFFGNVDSSGIKHNIFNPPIIARYIRLHPTHYSIRSTLRMELMGCDLNSCSMPLGMESKAISDAQITASSYFTNMFATWSPSKARLHLQGRSNAWRPQVNNPKEWLQVDFQKTMKVTGVTTQGVKSLDTSMYVKEFLISSSQDGHQWTLFFQNGKVKVFQGNQDSFTPVVNSLDPPLLTRYLRIHPQSWVHQIALRMEVLGCEAQDLY

SEQ ID NO: 337 - DNA, 4371 bp, synthetic construct
  misc_feature 1..4371: note = Variant of human B-domain deleted Factor VIII
  source 1..4371: mol_type = other DNA
atgcagattgaactgtctacctgcttcttcctctgtttgctgaggttctgctttagcgccactagacggtactaccttggcgctgtggagctgtcctgggactatatgcagagtgatttgggagagcttcccgtcgacgcacgatttcctcctcgcgttccaaagtcatttcccttcaacacaagcgtggtgtacaagaagacgctcttcgtcgaattcaccgatcacctgttcaatatcgccaaacccagaccaccatggatgggtcttttggggcctaccatacaagcggaggtgtatgacacagttgttatcactctcaagaacatggcttctcatccggtaagtcttcacgcagtgggcgtgtcctactggaaagcttcagaaggagccgagtatgatgatcagacatcccagagggagaaagaagacgacaaggtatttccaggtgggtctcatacctatgtgtggcaagtgctcaaagagaatggccctatggcaagcgatccgctctgtttgacttacagctacctttcacacgttgacctcgtcaaggacctcaactccgggttgattggagccttgttggtatgcagggaaggatctcttgccaaagagaagacacagaccctccacaagtttatccttctctttgctgtgttcgatgagggcaaaagttggcatagcgaaacgaagaattccctcatgcaggatcgcgacgcagccagcgccagagcttggcccaagatgcacactgtgaacggatatgtcaataggtcacttcctggcttgattgggtgtcatcggaaaagtgtctactggcacgtgatcggaatggggacaacaccagaggtccactccatatttctcgaaggccataccttccttgttcgaaaccacagacaggcatccttggagatctctcccattacctttctcactgcccaaacgctccttatggacttgggtcagttccttctcttctgccatatcagctcacaccagcatgatggtatggaagcttatgtgaaagtcgacagttgtcctgaggagccacagttgcgcatgaagaataatgaagaagccgaggattacgacgacgatctcaccgattctgagatggacgtggtgaggtttgatgacgacaactctccctccttcattcaaatccggagcgtggcgaagaaacaccccaagacttgggtccactatatagcggcggaagaggaggattgggattacgctcctcttgtattggcaccagatgaccgctcatacaaaagccagtacctcaacaacggaccgcagagaattggccggaagtataagaaagtgcgatttatggcctatacagacgaaacctttaagacaagggaggccatccagcatgagagtgggattttgggacctcttctttacggcgaagttggtgataccctcctcatcatcttcaagaatcaagcttctcgcccctataacatttacccacacgggatcactgacgttaggcctttgtatagcagaagacttcccaaaggcgtgaagcatctcaaagacttccccattttgccaggcgagatctttaagtacaaatggaccgtcacagtggaagatggaccgactaaatcagaccctcgatgccttacgcggtactattcctccttcgtgaatatggagagagatttggcaagcggactcataggaccactcctcatctgttacaaggaatctgtagaccagaggggtaaccagattatgagtgataaacgcaatgtgatcctttttagcgtcttcgacgagaaccggtcctggtacttgaccgagaatatacaaaggttccttcccaaccccgcaggcgttcagttggaagaccctgagtttcaggccagcaatattatgcactcaatcaacggctatgtgtttgatagtctccagctttctgtttgcctccatgaagtagcctattggtacatcttgtcaattggtgctcaaacagacttcctctccgtcttcttctccggctacacctttaagcacaagatggtgtatgaggacactctcacactctttccattttctggagaaaccgtgttcatgagcatggagaatccaggcctttggatcttgggttgccacaacagtgattttcgcaatcggggaatgactgctctcctcaaagtcagcagctgtgataagaacacaggcgactattacgaagattcttacgaggacataagtgcctacttgttgtccaagaataacgccattgagcccagatcattctcccagaatcctcccgtgcttaaaaggcatcagcgcgaaatcaccagaactactcttcagtctgatcaagaggagattgactatgacgacaccataagcgtggaaatgaagaaggaggatttcgatatctatgacgaagatgagaaccagtctccgcggagctttcagaagaagacgcgacactacttcattgcagcagtcgaaaggctttgggactacggtatgtcatcatcccctcatgtgttgcgcaatagagctcagagtggaagtgttccacagttcaagaaagtcgtctttcaagagtttacagatggcagcttcacacagcctctctatcggggcgagcttaacgaacatttgggactccttggtccctatatccgagccgaagtggaggacaacattatggttacctttaggaatcaagcctctcgcccctacagcttctactcctccctcatcagttatgaggaggatcagagacaaggcgctgaaccacggaagaactttgtgaaaccgaatgagacgaagacctacttctggaaagtacagcaccacatggcccccacaaaagacgaattcgattgcaaagcatgggcgtatttttcagacgttgacttggagaaagatgtacattcaggacttattggtcctttgttggtgtgtcacactaacactctcaatccagcccatggcaggcaggtgacagtccaggaattcgctcttttctttaccatctttgatgagaccaagtcctggtacttcacggaaaacatggagcgcaattgcagagccccctgtaacatacagatggaggaccctacctttaaggaaaattatcggttccacgcaatcaacggatacattatggatacatgtcctggccttgtgatggctcaggaccaacgaatcaggtggtacctcctcagcatgggttctaatgagaacatacactccattcacttttcaggacatgtgttcactgtccggaagaaagaagagtataagatggccctctacaatttgtatccaggcgtgtttgagaccgttgaaatgcttccctctaaagctggcatctggagagtagagtgcttgatcggagaacatcttcacgcaggtatgagcaccttgttcctcgtgtacagcaacaaatgtcagaccccacttggcatggccagtggacacattcgcgactttcagatcacagcatctggccagtatggacaatgggccccaaagttggctcgcctccattactccggtagcataaatgcatggtccactaaagaacctttcagctggattaaggtcgatcttcttgcccccatgatcatccacggcattaagacacagggagcgaggcagaaattctcctccctctacatctcacagttcattattatgtatagtttggacggcaagaagtggcaaacttatagaggtaacagtactggaacactcatggtgttcttcggcaacgttgatagctctggcatcaaacacaacatctttaatcctcccataatagctcggtacatcagattgcatccgacccactacagcattaggagtacactccgaatggagcttatgggttgcgacttgaattcctgttcaatgccactcggaatggagtctaaagccatctctgatgcacagataaccgccagtagctactttacgaacatgtttgctacgtggtcaccctctaaggcaaggcttcatttgcaaggccggtctaatgcctggagacctcaggtgaacaacccgaaagaatggctccaggtggactttcagaagaccatgaaagtaacaggtgtcactactcagggagttaagtccttggataccagcatgtatgtgaaggagttccttatttcctcatcacaagatggccaccagtggaccctcttctttcagaatggtaaggtcaaagtgtttcagggcaatcaagacagcttcacacccgtggtgaacagtcttgatcctccactcttgacacgataccttcgaatccatccacagtcttgggttcaccagattgcattgcgcatggaagtacttggatgcgaggctcaggacctctac

SEQ ID NO: 338 - protein, 1457 aa, synthetic construct
  REGION 1..1457: note = Variant of human B-domain deleted Factor VIII
MQIELSTCFFLCLLRFCFSATRRYYLGAVELSWDYMQSDLGELPVDARFPPRVPKSFPFNTSVVYKKTLFVEFTDHLFNIAKPRPPWMGLLGPTIQAEVYDTVVITLKNMASHPVSLHAVGVSYWKASEGAEYDDQTSQREKEDDKVFPGGSHTYVWQVLKENGPMASDPLCLTYSYLSHVDLVKDLNSGLIGALLVCREGSLAKEKTQTLHKFILLFAVFDEGKSWHSETKNSLMQDRDAASARAWPKMHTVNGYVNRSLPGLIGCHRKSVYWHVIGMGTTPEVHSIFLEGHTFLVRNHRQASLEISPITFLTAQTLLMDLGQFLLFCHISSHQHDGMEAYVKVDSCPEEPQLRMKNNEEAEDYDDDLTDSEMDVVRFDDDNSPSFIQIRSVAKKHPKTWVHYIAAEEEDWDYAPLVLAPDDRSYKSQYLNNGPQRIGRKYKKVRFMAYTDETFKTREAIQHESGILGPLLYGEVGDTLLIIFKNQASRPYNIYPHGITDVRPLYSRRLPKGVKHLKDFPILPGEIFKYKWTVTVEDGPTKSDPRCLTRYYSSFVNMERDLASGLIGPLLICYKESVDQRGNQIMSDKRNVILFSVFDENRSWYLTENIQRFLPNPAGVQLEDPEFQASNIMHSINGYVFDSLQLSVCLHEVAYWYILSIGAQTDFLSVFFSGYTFKHKMVYEDTLTLFPFSGETVFMSMENPGLWILGCHNSDFRNRGMTALLKVSSCDKNTGDYYEDSYEDISAYLLSKNNAIEPRSFSQNPPVLKRHQREITRTTLQSDQEEIDYDDTISVEMKKEDFDIYDEDENQSPRSFQKKTRHYFIAAVERLWDYGMSSSPHVLRNRAQSGSVPQFKKVVFQEFTDGSFTQPLYRGELNEHLGLLGPYIRAEVEDNIMVTFRNQASRPYSFYSSLISYEEDQRQGAEPRKNFVKPNETKTYFWKVQHHMAPTKDEFDCKAWAYFSDVDLEKDVHSGLIGPLLVCHTNTLNPAHGRQVTVQEFALFFTIFDETKSWYFTENMERNCRAPCNIQMEDPTFKENYRFHAINGYIMDTCPGLVMAQDQRIRWYLLSMGSNENIHSIHFSGHVFTVRKKEEYKMALYNLYPGVFETVEMLPSKAGIWRVECLIGEHLHAGMSTLFLVYSNKCQTPLGMASGHIRDFQITASGQYGQWAPKLARLHYSGSINAWSTKEPFSWIKVDLLAPMIIHGIKTQGARQKFSSLYISQFIIMYSLDGKKWQTYRGNSTGTLMVFFGNVDSSGIKHNIFNPPIIARYIRLHPTHYSIRSTLRMELMGCDLNSCSMPLGMESKAISDAQITASSYFTNMFATWSPSKARLHLQGRSNAWRPQVNNPKEWLQVDFQKTMKVTGVTTQGVKSLDTSMYVKEFLISSSQDGHQWTLFFQNGKVKVFQGNQDSFTPVVNSLDPPLLTRYLRIHPQSWVHQIALRMEVLGCEAQDLY

SEQ ID NO: 339 - DNA, 4371 bp, synthetic construct
  misc_feature 1..4371: note = Variant of human B-domain deleted Factor VIII
  source 1..4371: mol_type = other DNA
atgcagattgaactgtctacctgcttcttcctctgtttgctgaggttctgctttagcgccactagacggtactaccttggcgctgtggagctgtcctgggactatatgcagagtgatttgggagagcttcccgtcgacgcacgatttcctcctcgcgttccaaagtcatttcccttcaacacaagcgtggtgtacaagaagacgctcttcgtcgaattcaccgatcacctgttcaatatcgccaaacccagaccaccatggatgggtcttttggggcctaccatacaagcggaggtgtatgacacagttgttatcactctcaagaacatggcttctcatccggtaagtcttcacgcagtgggcgtgtcctactggaaagcttcagaaggagccgagtatgatgatcagacatcccagagggagaaagaagacgacaaggtatttccaggtgggtctcatacctatgtgtggcaagtgctcaaagagaatggccctatggcaagcgatccgctctgtttgacttacagctacctttcacacgttgacctcgtcaaggacctcaactccgggttgattggagccttgttggtatgcagggaaggatctcttgccaaagagaagacacagaccctccacaagtttatccttctctttgctgtgttcgatgagggcaaaagttggcatagcgaaacgaagaattccctcatgcaggatcgcgacgcagccagcgccagagcttggcccaagatgcacactgtgaacggatatgtcaataggtcacttcctggcttgattgggtgtcatcggaaaagtgtctactggcacgtgatcggaatggggacaacaccagaggtccactccatatttctcgaaggccataccttccttgttcgaaaccacagacaggcatccttggagatctctcccattacctttctcactgcccaaacgctccttatggacttgggtcagttccttctcttctgccatatcagctcacaccagcatgatggtatggaagcttatgtgaaagtcgacagttgtcctgaggagccacagttgcgcatgaagaataatgaagaagccgaggattacgacgacgatctcaccgattctgagatggacgtggtgaggtttgatgacgacaactctccctccttcattcaaatccggagcgtggcgaagaaacaccccaagacttgggtccactatatagcggcggaagaggaggattgggattacgctcctcttgtattggcaccagatgaccgctcatacaaaagccagtacctcaacaacggaccgcagagaattggccggaagtataagaaagtgcgatttatggcctatacagacgaaacctttaagacaagggaggccatccagcatgagagtgggattttgggacctcttctttacggcgaagttggtgataccctcctcatcatcttcaagaatcaagcttctcgcccctataacatttacccacacgggatcactgacgttaggcctttgtatagcagaagacttcccaaaggcgtgaagcatctcaaagacttccccattttgccaggcgagatctttaagtacaaatggaccgtcacagtggaagatggaccgactaaatcagaccctcgatgccttacgcggtactattcctccttcgtgaatatggagagagatttggcaagcggactcataggaccactcctcatctgttacaaggaatctgtagaccagaggggtaaccagattatgagtgataaacgcaatgtgatcctttttagcgtcttcgacgagaaccggtcctggtacttgaccgagaatatacaaaggttccttcccaaccccgcaggcgttcagttggaagaccctgagtttcaggccagcaatattatgcactcaatcaacggctatgtgtttgatagtctccagctttctgtttgcctccatgaagtagcctattggtacatcttgtcaattggtgctcaaacagacttcctctccgtcttcttctccggctacacctttaagcacaagatggtgtatgaggacactctcacactctttccattttctggagaaaccgtgttcatgagcatggagaatccaggcctttggatcttgggttgccacaacagtgattttcgcaatcggggaatgactgctctcctcaaagtcagcagctgtgataagaacacaggcgactattacgaagattcttacgaggacataagtgcctacttgttgtccaagaataaccagattgagcccagatcattctcccagaatcctcccgtgcttaaaaggcatcagcgcgaaatcaccagaactactcttcagtctgatcaagaggagattgactatgacgacaccataagcgtggaaatgaagaaggaggatttcgatatctatgacgaagatgagaaccagtctccgcggagctttcagaagaagacgcgacactacttcattgcagcagtcgaaaggctttgggactacggtatgtcatcatcccctcatgtgttgcgcaatagagctcagagtggaagtgttccacagttcaagaaagtcgtctttcaagagtttacagatggcagcttcacacagcctctctatcggggcgagcttaacgaacatttgggactccttggtccctatatccgagccgaagtggaggacaacattatggttacctttaggaatcaagcctctcgcccctacagcttctactcctccctcatcagttatgaggaggatcagagacaaggcgctgaaccacggaagaactttgtgaaaccgaatgagacgaagacctacttctggaaagtacagcaccacatggcccccacaaaagacgaattcgattgcaaagcatgggcgtatttttcagacgttgacttggagaaagatgtacattcaggacttattggtcctttgttggtgtgtcacactaacactctcaatccagcccatggcaggcaggtgacagtccaggaattcgctcttttctttaccatctttgatgagaccaagtcctggtacttcacggaaaacatggagcgcaattgcagagccccctgtaacatacagatggaggaccctacctttaaggaaaattatcggttccacgcaatcaacggatacattatggatacactccctggccttgtgatggctcaggaccaacgaatcaggtggtacctcctcagcatgggttctaatgagaacatacactccattcacttttcaggacatgtgttcactgtccggaagaaagaagagtataagatggccctctacaatttgtatccaggcgtgtttgagaccgttgaaatgcttccctctaaagctggcatctggagagtagagtgcttgatcggagaacatcttcacgcaggtatgagcaccttgttcctcgtgtacagcaacaaatgtcagaccccacttggcatggccagtggacacattcgcgactttcagatcacagcatctggccagtatggacaatgggccccaaagttggctcgcctccattactccggtagcataaatgcgtggtccactaaagaacctttcagctggattaaggtcgatcttcttgcccccatgatcatccacggcattaagacacagggagcgaggcagaaattctcctccctctacatctcacagttcattattatgtatagtttggacggcaagaagtggcaaacttatagaggtaacagtactggaacactcatggtgttcttcggcaacgttgatagctctggcatcaaacacaacatctttaatcctcccataatagctcggtacatcagattgcatccgacccactacagcattaggagtacactccgaatggagcttatgggttgcgacttgaattcctgttcaatgccactcggaatggagtctaaagccatctctgatgcacagataaccgccagtagctactttacgaacatgtttgctacgtggtcaccctctaaggcaaggcttcatttgcaaggccggtctaatgcctggagacctcaggtgaacaacccgaaagaatggctccaggtggactttcagaagaccatgaaagtaacaggtgtcactactcagggagttaagtccttggataccagcatgtatgtgaaggagttccttatttcctcatcacaagatggccaccagtggaccctcttctttcagaatggtaaggtcaaagtgtttcagggcaatcaagacagcttcacacccgtggtgaacagtcttgatcctccactcttgacacgataccttcgaatccatccacagtcttgggttcaccagattgcattgcgcatggaagtacttggatgcgaggctcaggacctctac

SEQ ID NO: 340 - protein, 1457 aa, synthetic construct
  REGION 1..1457: note = Variant of human B-domain deleted Factor VIII
MQIELSTCFFLCLLRFCFSATRRYYLGAVELSWDYMQSDLGELPVDARFPPRVPKSFPFNTSVVYKKTLFVEFTDHLFNIAKPRPPWMGLLGPTIQAEVYDTVVITLKNMASHPVSLHAVGVSYWKASEGAEYDDQTSQREKEDDKVFPGGSHTYVWQVLKENGPMASDPLCLTYSYLSHVDLVKDLNSGLIGALLVCREGSLAKEKTQTLHKFILLFAVFDEGKSWHSETKNSLMQDRDAASARAWPKMHTVNGYVNRSLPGLIGCHRKSVYWHVIGMGTTPEVHSIFLEGHTFLVRNHRQASLEISPITFLTAQTLLMDLGQFLLFCHISSHQHDGMEAYVKVDSCPEEPQLRMKNNEEAEDYDDDLTDSEMDVVRFDDDNSPSFIQIRSVAKKHPKTWVHYIAAEEEDWDYAPLVLAPDDRSYKSQYLNNGPQRIGRKYKKVRFMAYTDETFKTREAIQHESGILGPLLYGEVGDTLLIIFKNQASRPYNIYPHGITDVRPLYSRRLPKGVKHLKDFPILPGEIFKYKWTVTVEDGPTKSDPRCLTRYYSSFVNMERDLASGLIGPLLICYKESVDQRGNQIMSDKRNVILFSVFDENRSWYLTENIQRFLPNPAGVQLEDPEFQASNIMHSINGYVFDSLQLSVCLHEVAYWYILSIGAQTDFLSVFFSGYTFKHKMVYEDTLTLFPFSGETVFMSMENPGLWILGCHNSDFRNRGMTALLKVSSCDKNTGDYYEDSYEDISAYLLSKNNQIEPRSFSQNPPVLKRHQREITRTTLQSDQEEIDYDDTISVEMKKEDFDIYDEDENQSPRSFQKKTRHYFIAAVERLWDYGMSSSPHVLRNRAQSGSVPQFKKVVFQEFTDGSFTQPLYRGELNEHLGLLGPYIRAEVEDNIMVTFRNQASRPYSFYSSLISYEEDQRQGAEPRKNFVKPNETKTYFWKVQHHMAPTKDEFDCKAWAYFSDVDLEKDVHSGLIGPLLVCHTNTLNPAHGRQVTVQEFALFFTIFDETKSWYFTENMERNCRAPCNIQMEDPTFKENYRFHAINGYIMDTLPGLVMAQDQRIRWYLLSMGSNENIHSIHFSGHVFTVRKKEEYKMALYNLYPGVFETVEMLPSKAGIWRVECLIGEHLHAGMSTLFLVYSNKCQTPLGMASGHIRDFQITASGQYGQWAPKLARLHYSGSINAWSTKEPFSWIKVDLLAPMIIHGIKTQGARQKFSSLYISQFIIMYSLDGKKWQTYRGNSTGTLMVFFGNVDSSGIKHNIFNPPIIARYIRLHPTHYSIRSTLRMELMGCDLNSCSMPLGMESKAISDAQITASSYFTNMFATWSPSKARLHLQGRSNAWRPQVNNPKEWLQVDFQKTMKVTGVTTQGVKSLDTSMYVKEFLISSSQDGHQWTLFFQNGKVKVFQGNQDSFTPVVNSLDPPLLTRYLRIHPQSWVHQIALRMEVLGCEAQDLY

SEQ ID NO: 341 - DNA, 4371 bp, synthetic construct
  misc_feature 1..4371: note = Variant of human B-domain deleted Factor VIII
  source 1..4371: mol_type = other DNA
atgcagattgaactgtctacctgcttcttcctctgtttgctgaggttctgctttagcgccactagacggtactaccttggcgctgtggagctgtcctgggactatatgcagagtgatttgggagagcttcccgtcgacgcacgatttcctcctcgcgttccaaagtcatttcccttcaacacaagcgtggtgtacaagaagacgctcttcgtcgaattcaccgatcacctgttcaatatcgccaaacccagaccaccatggatgggtcttttggggcctaccatacaagcggaggtgtatgacacagttgttatcactctcaagaacatggcttctcatccggtaagtcttcacgcagtgggcgtgtcctactggaaagcttcagaaggagccgagtatgatgatcagacatcccagagggagaaagaagacgacaaggtatttccaggtgggtctcatacctatgtgtggcaagtgctcaaagagaatggccctatggcaagcgatccgctctgtttgacttacagctacctttcacacgttgacctcgtcaaggacctcaactccgggttgattggagccttgttggtatgcagggaaggatctcttgccaaagagaagacacagaccctccacaagtttatccttctctttgctgtgttcgatgagggcaaaagttggcatagcgaaacgaagaattccctcatgcaggatcgcgacgcagccagcgccagagcttggcccaagatgcacactgtgaacggatatgtcaataggtcacttcctggcttgattgggtgtcatcggaaaagtgtctactggcacgtgatcggaatggggacaacaccagaggtccactccatatttctcgaaggccataccttccttgttcgaaaccacagacaggcatccttggagatctctcccattacctttctcactgcccaaacgctccttatggacttgggtcagttccttctcttctgccatatcagctcacaccagcatgatggtatggaagcttatgtgaaagtcgacagttgtcctgaggagccacagttgcgcatgaagaataatgaagaagccgaggattacgacgacgatctcaccgattctgagatggacgtggtgaggtttgatgacgacaactctccctccttcattcaaatccggagcgtggcgaagaaacaccccaagacttgggtccactatatagcggcggaagaggaggattgggattacgctcctcttgtattggcaccagatgaccgctcatacaaaagccagtacctcaacaacggaccgcagagaattggccggaagtataagaaagtgcgatttatggcctatacagacgaaacctttaagacaagggaggccatccagcatgagagtgggattttgggacctcttctttacggcgaagttggtgataccctcctcatcatcttcaagaatcaagcttctcgcccctataacatttacccacacgggatcactgacgttaggcctttgtatagcagaagacttcccaaaggcgtgaagcatctcaaagacttccccattttgccaggcgagatctttaagtacaaatggaccgtcacagtggaagatggaccgactaaatcagaccctcgatgccttacgcggtactattcctccttcgtgaatatggagagagatttggcaagcggactcataggaccactcctcatctgttacaaggaatctgtagaccagaggggtaaccagattatgagtgataaacgcaatgtgatcctttttagcgtcttcgacgagaaccggtcctggtacttgaccgagaatatacaaaggttccttcccaaccccgcaggcgttcagttggaagaccctgagtttcaggccagcaatattatgcactcaatcaacggctatgtgtttgatagtctccagctttctgtttgcctccatgaagtagcctattggtacatcttgtcaattggtgctcaaacagacttcctctccgtcttcttctccggctacacctttaagcacaagatggtgtatgaggacactctcacactctttccattttctggagaaaccgtgttcatgagcatggagaatccaggcctttggatcttgggttgccacaacagtgattttcgcaatcggggaatgactgctctcctcaaagtcagcagctgtgataagaacacaggcgactattacgaagattcttacgaggacataagtgcctacttgttgtccaagaataacgccattgagcccagatcattctcccagaatcctcccgtgcttaaaaggcatcagcgcgaaatcaccagaactactcttcagtctgatcaagaggagattgactatgacgacaccataagcgtggaaatgaagaaggaggatttcgatatctatgacgaagatgagaaccagtctccgcggagctttcagaagaagacgcgacactacttcattgcagcagtcgaaaggctttgggactacggtatgtcatcatcccctcatgtgttgcgcaatagagctcagagtggaagtgttccacagttcaagaaagtcgtctttcaagagtttacagatggcagcttcacacagcctctctatcggggcgagcttaacgaacatttgggactccttggtccctatatccgagccgaagtggaggacaacattatggttacctttaggaatcaagcctctcgcccctacagcttctactcctccctcatcagttatgaggaggatcagagacaaggcgctgaaccacggaagaactttgtgaaaccgaatgagacgaagacctacttctggaaagtacagcaccacatggcccccacaaaagacgaattcgattgcaaagcatgggcgtatttttcagacgttgacttggagaaagatgtacattcaggacttattggtcctttgttggtgtgtcacactaacactctcaatccagcccatggcaggcaggtgacagtccaggaattcgctcttttctttaccatctttgatgagaccaagtcctggtacttcacggaaaacatggagcgcaattgcagagccccctgtaacatacagatggaggaccctacctttaaggaaaatggtcggttccacgcaatcaacggatacattatggatacactccctggccttgtgatggctcaggaccaacgaatcaggtggtacctcctcagcatgggttctaatgagaacatacactccattcacttttcaggacatgtgttcactgtccggaagaaagaagagtataagatggccctctacaatttgtatccaggcgtgtttgagaccgttgaaatgcttccctctaaagctggcatctggagagtagagtgcttgatcggagaacatcttcacgcaggtatgagcaccttgttcctcgtgtacagcaacaaatgtcagaccccacttggcatggccagtggacacattcgcgactttcagatcacagcatctggccagtatggacaatgggccccaaagttggctcgcctccattactccggtagcataaatgcgtggtccactaaagaacctttcagctggattaaggtcgatcttcttgcccccatgatcatccacggcattaagacacagggagcgaggcagaaattctcctccctctacatctcacagttcattattatgtatagtttggacggcaagaagtggcaaacttatagaggtaacagtactggaacactcatggtgttcttcggcaacgttgatagctctggcatcaaacacaacatctttaatcctcccataatagctcggtacatcagattgcatccgacccactacagcattaggagtacactccgaatggagcttatgggttgcgacttgaattcctgttcaatgccactcggaatggagtctaaagccatctctgatgcacagataaccgccagtagctactttacgaacatgtttgctacgtggtcaccctctaaggcaaggcttcatttgcaaggccggtctaatgcctggagacctcaggtgaacaacccgaaagaatggctccaggtggactttcagaagaccatgaaagtaacaggtgtcactactcagggagttaagtccttggataccagcatgtatgtgaaggagttccttatttcctcatcacaagatggccaccagtggaccctcttctttcagaatggtaaggtcaaagtgtttcagggcaatcaagacagcttcacacccgtggtgaacagtcttgatcctccactcttgacacgataccttcgaatccatccacagtcttgggttcaccagattgcattgcgcatggaagtacttggatgcgaggctcaggacctctac

SEQ ID NO: 342 - protein, 1457 aa, synthetic construct
  REGION 1..1457: note = Variant of human B-domain deleted Factor VIII
MQIELSTCFFLCLLRFCFSATRRYYLGAVELSWDYMQSDLGELPVDARFPPRVPKSFPFNTSVVYKKTLFVEFTDHLFNIAKPRPPWMGLLGPTIQAEVYDTVVITLKNMASHPVSLHAVGVSYWKASEGAEYDDQTSQREKEDDKVFPGGSHTYVWQVLKENGPMASDPLCLTYSYLSHVDLVKDLNSGLIGALLVCREGSLAKEKTQTLHKFILLFAVFDEGKSWHSETKNSLMQDRDAASARAWPKMHTVNGYVNRSLPGLIGCHRKSVYWHVIGMGTTPEVHSIFLEGHTFLVRNHRQASLEISPITFLTAQTLLMDLGQFLLFCHISSHQHDGMEAYVKVDSCPEEPQLRMKNNEEAEDYDDDLTDSEMDVVRFDDDNSPSFIQIRSVAKKHPKTWVHYIAAEEEDWDYAPLVLAPDDRSYKSQYLNNGPQRIGRKYKKVRFMAYTDETFKTREAIQHESGILGPLLYGEVGDTLLIIFKNQASRPYNIYPHGITDVRPLYSRRLPKGVKHLKDFPILPGEIFKYKWTVTVEDGPTKSDPRCLTRYYSSFVNMERDLASGLIGPLLICYKESVDQRGNQIMSDKRNVILFSVFDENRSWYLTENIQRFLPNPAGVQLEDPEFQASNIMHSINGYVFDSLQLSVCLHEVAYWYILSIGAQTDFLSVFFSGYTFKHKMVYEDTLTLFPFSGETVFMSMENPGLWILGCHNSDFRNRGMTALLKVSSCDKNTGDYYEDSYEDISAYLLSKNNAIEPRSFSQNPPVLKRHQREITRTTLQSDQEEIDYDDTISVEMKKEDFDIYDEDENQSPRSFQKKTRHYFIAAVERLWDYGMSSSPHVLRNRAQSGSVPQFKKVVFQEFTDGSFTQPLYRGELNEHLGLLGPYIRAEVEDNIMVTFRNQASRPYSFYSSLISYEEDQRQGAEPRKNFVKPNETKTYFWKVQHHMAPTKDEFDCKAWAYFSDVDLEKDVHSGLIGPLLVCHTNTLNPAHGRQVTVQEFALFFTIFDETKSWYFTENMERNCRAPCNIQMEDPTFKENGRFHAINGYIMDTLPGLVMAQDQRIRWYLLSMGSNENIHSIHFSGHVFTVRKKEEYKMALYNLYPGVFETVEMLPSKAGIWRVECLIGEHLHAGMSTLFLVYSNKCQTPLGMASGHIRDFQITASGQYGQWAPKLARLHYSGSINAWSTKEPFSWIKVDLLAPMIIHGIKTQGARQKFSSLYISQFIIMYSLDGKKWQTYRGNSTGTLMVFFGNVDSSGIKHNIFNPPIIARYIRLHPTHYSIRSTLRMELMGCDLNSCSMPLGMESKAISDAQITASSYFTNMFATWSPSKARLHLQGRSNAWRPQVNNPKEWLQVDFQKTMKVTGVTTQGVKSLDTSMYVKEFLISSSQDGHQWTLFFQNGKVKVFQGNQDSFTPVVNSLDPPLLTRYLRIHPQSWVHQIALRMEVLGCEAQDLY

SEQ ID NO: 343 - DNA, 4371 bp, synthetic construct
  misc_feature 1..4371: note = Variant of human B-domain deleted Factor VIII
  source 1..4371: mol_type = other DNA
atgcagattgaactgtctacctgcttcttcctctgtttgctgaggttctgctttagcgccactagacggtactaccttggcgctgtggagctgtcctgggactatatgcagagtgatttgggagagcttcccgtcgacgcacgatttcctcctcgcgttccaaagtcatttcccttcaacacaagcgtggtgtacaagaagacgctcttcgtcgaattcaccgatcacctgttcaatatcgccaaacccagaccaccatggatgggtcttttggggcctaccatacaagcggaggtgtatgacacagttgttatcactctcaagaacatggcttctcatccggtaagtcttcacgcagtgggcgtgtcctactggaaagcttcagaaggagccgagtatgatgatcagacatcccagagggagaaagaagacgacaaggtatttccaggtgggtctcatacctatgtgtggcaagtgctcaaagagaatggccctatggcaagcgatccgctctgtttgacttacagctacctttcacacgttgacctcgtcaaggacctcaactccgggttgattggagccttgttggtatgcagggaaggatctcttgccaaagagaagacacagaccctccacaagtttatccttctctttgctgtgttcgatgagggcaaaagttggcatagcgaaacgaagaattccctcatgcaggatcgcgacgcagccagcgccagagcttggcccaagatgcacactgtgaacggatatgtcaataggtcacttcctggcttgattgggtgtcatcggaaaagtgtctactggcacgtgatcggaatggggacaacaccagaggtccactccatatttctcgaaggccataccttccttgttcgaaaccacagacaggcatccttggagatctctcccattacctttctcactgcccaaacgctccttatggacttgggtcagttccttctcttctgccatatcagctcacaccagcatgatggtatggaagcttatgtgaaagtcgacagttgtcctgaggagccacagttgcgcatgaagaataatgaagaagccgaggattacgacgacgatctcaccgattctgagatggacgtggtgaggtttgatgacgacaactctccctccttcattcaaatccggagcgtggcgaagaaacaccccaagacttgggtccactatatagcggcggaagaggaggattgggattacgctcctcttgtattggcaccagatgaccgctcatacaaaagccagtacctcaacaacggaccgcagagaattggccggaagtataagaaagtgcgatttatggcctatacagacgaaacctttaagacaagggaggccatccagcatgagagtgggattttgggacctcttctttacggcgaagttggtgataccctcctcatcatcttcaagaatcaagcttctcgcccctataacatttacccacacgggatcactgacgttaggcctttgtatagcagaagacttcccaaaggcgtgaagcatctcaaagacttccccattttgccaggcgagatctttaagtacaaatggaccgtcacagtggaagatggaccgactaaatcagaccctcgatgccttacgcggtactattcctccttcgtgaatatggagagagatttggcaagcggactcataggaccactcctcatctgttacaaggaatctgtagaccagaggggtaaccagattatgagtgataaacgcaatgtgatcctttttagcgtcttcgacgagaaccggtcctggtacttgaccgagaatatacaaaggttccttcccaaccccgcaggcgttcagttggaagaccctgagtttcaggccagcaatattatgcactcaatcaacggctatgtgtttgatagtctccagctttctgtttgcctccatgaagtagcctattggtacatcttgtcaattggtgctcaaacagacttcctctccgtcttcttctccggctacacctttaagcacaagatggtgtatgaggacactctcacactctttccattttctggagaaaccgtgttcatgagcatggagaatccaggcctttggatcttgggttgccacaacagtgattttcgcaatcggggaatgactgctctcctcaaagtcagcagctgtgataagaacacaggcgactattacgaagattcttacgaggacataagtgccagtttgttgtccaagaataacgccattgagcccagatcattctcccagaatcctcccgtgcttaaaaggcatcagcgcgaaatcaccagaactactcttcagtctgatcaagaggagattgactatgacgacaccataagcgtggaaatgaagaaggaggatttcgatatctatgacgaagatgagaaccagtctccgcggagctttcagaagaagacgcgacactacttcattgcagcagtcgaaaggctttgggactacggtatgtcatcatcccctcatgtgttgcgcaatagagctcagagtggaagtgttccacagttcaagaaagtcgtctttcaagagtttacagatggcagcttcacacagcctctctatcggggcgagcttaacgaacatttgggactccttggtccctatatccgagccgaagtggaggacaacattatggttacctttaggaatcaagcctctcgcccctacagcttctactcctccctcatcagttatgaggaggatcagagacaaggcgctgaaccacggaagaactttgtgaaaccgaatgagacgaagacctacttctggaaagtacagcaccacatggcccccacaaaagacgaattcgattgcaaagcatgggcgtatttttcagacgttgacttggagaaagatgtacattcaggacttattggtcctttgttggtgtgtcacactaacactctcaatccagcccatggcaggcaggtgacagtccaggaattcgctcttttctttaccatctttgatgagaccaagtcctggtacttcacggaaaacatggagcgcaattgcagagccccctgtaacatacagatggaggaccctacctttaaggaaaattatcggttccacgcaatcaacggatacattatggatacactccctggccttgtgatggctcaggaccaacgaatcaggtggtacctcctcagcatgggttctaatgagaacatacactccattcacttttcaggacatgtgttcactgtccggaagaaagaagagtataagatggccctctacaatttgtatccaggcgtgtttgagaccgttgaaatgcttccctctaaagctggcatctggagagtagagtgcttgatcggagaacatcttcacgcaggtatgagcaccttgttcctcgtgtacagcaacaaatgtcagaccccacttggcatggccagtggacacattcgcgactttcagatcacagcatctggccagtatggacaatgggccccaaagttggctcgcctccattactccggtagcataaatgcgtggtccactaaagaacctttcagctggattaaggtcgatcttcttgcccccatgatcatccacggcattaagacacagggagcgaggcagaaattctcctccctctacatctcacagttcattattatgtatagtttggacggcaagaagtggcaaacttatagaggtaacagtactggaacactcatggtgttcttcggcaacgttgatagctctggcatcaaacacaacatctttaatcctcccataatagctcggtacatcagattgcatccgacccactacagcattaggagtacactccgaatggagcttatgggttgcgacttgaattcctgttcaatgccactcggaatggagtctaaagccatctctgatgcacagataaccgccagtagctactttacgaacatgtttgctacgtggtcaccctctaaggcaaggcttcatttgcaaggccggtctaatgcctggagacctcaggtgaacaacccgaaagaatggctccaggtggactttcagaagaccatgaaagtaacaggtgtcactactcagggagttaagtccttggataccagcatgtatgtgaaggagttccttatttcctcatcacaagatggccaccagtggaccctcttctttcagaatggtaaggtcaaagtgtttcagggcaatcaagacagcttcacacccgtggtgaacagtcttgatcctccactcttgacacgataccttcgaatccatccacagtcttgggttcaccagattgcattgcgcatggaagtacttggatgcgaggctcaggacctctac

SEQ ID NO: 344 - protein, 1457 aa, synthetic construct
  REGION 1..1457: note = Variant of human B-domain deleted Factor VIII
MQIELSTCFFLCLLRFCFSATRRYYLGAVELSWDYMQSDLGELPVDARFPPRVPKSFPFNTSVVYKKTLFVEFTDHLFNIAKPRPPWMGLLGPTIQAEVYDTVVITLKNMASHPVSLHAVGVSYWKASEGAEYDDQTSQREKEDDKVFPGGSHTYVWQVLKENGPMASDPLCLTYSYLSHVDLVKDLNSGLIGALLVCREGSLAKEKTQTLHKFILLFAVFDEGKSWHSETKNSLMQDRDAASARAWPKMHTVNGYVNRSLPGLIGCHRKSVYWHVIGMGTTPEVHSIFLEGHTFLVRNHRQASLEISPITFLTAQTLLMDLGQFLLFCHISSHQHDGMEAYVKVDSCPEEPQLRMKNNEEAEDYDDDLTDSEMDVVRFDDDNSPSFIQIRSVAKKHPKTWVHYIAAEEEDWDYAPLVLAPDDRSYKSQYLNNGPQRIGRKYKKVRFMAYTDETFKTREAIQHESGILGPLLYGEVGDTLLIIFKNQASRPYNIYPHGITDVRPLYSRRLPKGVKHLKDFPILPGEIFKYKWTVTVEDGPTKSDPRCLTRYYSSFVNMERDLASGLIGPLLICYKESVDQRGNQIMSDKRNVILFSVFDENRSWYLTENIQRFLPNPAGVQLEDPEFQASNIMHSINGYVFDSLQLSVCLHEVAYWYILSIGAQTDFLSVFFSGYTFKHKMVYEDTLTLFPFSGETVFMSMENPGLWILGCHNSDFRNRGMTALLKVSSCDKNTGDYYEDSYEDISASLLSKNNAIEPRSFSQNPPVLKRHQREITRTTLQSDQEEIDYDDTISVEMKKEDFDIYDEDENQSPRSFQKKTRHYFIAAVERLWDYGMSSSPHVLRNRAQSGSVPQFKKVVFQEFTDGSFTQPLYRGELNEHLGLLGPYIRAEVEDNIMVTFRNQASRPYSFYSSLISYEEDQRQGAEPRKNFVKPNETKTYFWKVQHHMAPTKDEFDCKAWAYFSDVDLEKDVHSGLIGPLLVCHTNTLNPAHGRQVTVQEFALFFTIFDETKSWYFTENMERNCRAPCNIQMEDPTFKENYRFHAINGYIMDTLPGLVMAQDQRIRWYLLSMGSNENIHSIHFSGHVFTVRKKEEYKMALYNLYPGVFETVEMLPSKAGIWRVECLIGEHLHAGMSTLFLVYSNKCQTPLGMASGHIRDFQITASGQYGQWAPKLARLHYSGSINAWSTKEPFSWIKVDLLAPMIIHGIKTQGARQKFSSLYISQFIIMYSLDGKKWQTYRGNSTGTLMVFFGNVDSSGIKHNIFNPPIIARYIRLHPTHYSIRSTLRMELMGCDLNSCSMPLGMESKAISDAQITASSYFTNMFATWSPSKARLHLQGRSNAWRPQVNNPKEWLQVDFQKTMKVTGVTTQGVKSLDTSMYVKEFLISSSQDGHQWTLFFQNGKVKVFQGNQDSFTPVVNSLDPPLLTRYLRIHPQSWVHQIALRMEVLGCEAQDLY

SEQ ID NO: 345 - DNA, 4371 bp, synthetic construct
  misc_feature 1..4371: note = Variant of human B-domain deleted Factor VIII
  source 1..4371: mol_type = other DNA
atgcagattgaactgtctacctgcttcttcctctgtttgctgaggttctgctttagcgccactagacggtactaccttggcgctgtggagctgtcctgggactatatgcagagtgatttgggagagcttcccgtcgacgcacgatttcctcctcgcgttccaaagtcatttcccttcaacacaagcgtggtgtacaagaagacgctcttcgtcgaattcaccgatcacctgttcaatatcgccaaacccagaccaccatggatgggtcttttggggcctaccatacaagcggaggtgtatgacacagttgttatcactctcaagaacatggcttctcatccggtaagtcttcacgcagtgggcgtgtcctactggaaagcttcagaaggagccgagtatgatgatcagacatcccagagggagaaagaagacgacaaggtatttccaggtgggtctcatacctatgtgtggcaagtgctcaaagagaatggccctatggcaagcgatccgctctgtttgacttacagctacctttcacacgttgacctcgtcaaggacctcaactccgggttgattggagccttgttggtatgcagggaaggatctcttgccaaagagaagacacagaccctccacaagtttatccttctctttgctgtgttcgatgagggcaaaagttggcatagcgaaacgaagaattccctcatgcaggatcgcgacgcagccagcgccagagcttggcccaagatgcacactgtgaacggatatgtcaataggtcacttcctggcttgattgggtgtcatcggaaaagtgtctactggcacgtgatcggaatggggacaacaccagaggtccactccatatttctcgaaggccataccttccttgttcgaaaccacagacaggcatccttggagatctctcccattacctttctcactgcccaaacgctccttatggacttgggtcagttccttctcttctgccatatcagctcacaccagcatgatggtatggaagcttatgtgaaagtcgacagttgtcctgaggagccacagttgcgcatgaagaataatgaagaagccgaggattacgacgacgatctcaccgattctgagatggacgtggtgaggtttgatgacgacaactctccctccttcattcaaatccggagcgtggcgaagaaacaccccaagacttgggtccactatatagcggcggaagaggaggattgggattacgctcctcttgtattggcaccagatgaccgctcatacaaaagccagtacctcaacaacggaccgcagagaattggccggaagtataagaaagtgcgatttatggcctatacagacgaaacctttaagacaagggaggccatccagcatgagagtgggattttgggacctcttctttacggcgaagttggtgataccctcctcatcatcttcaagaatcaagcttctcgcccctataacatttacccacacgggatcactgacgttaggcctttgtatagcagaagacttcccaaaggcgtgaagcatctcaaagacttccccattttgccaggcgagatctttaagtacaaatggaccgtcacagtggaagatggaccgactaaatcagaccctcgatgccttacgcggtactattcctccttcgtgaatatggagagagatttggcaagcggactcataggaccactcctcatctgttacaaggaatctgtagaccagaggggtaaccagattatgagtgataaacgcaatgtgatcctttttagcgtcttcgacgagaaccggtcctggtacttgaccgagaatatacaaaggttccttcccaaccccgcaggcgttcagttggaagaccctgagtttcaggccagcaatattatgcactcaatcaacggctatgtgtttgatagtctccagctttctgtttgcctccatgaagtagcctattggtacatcttgtcaattggtgctcaaacagacttcctctccgtcttcttctccggctacacctttaagcacaagatggtgtatgaggacactctcacactctttccattttctggagaaaccgtgttcatgagcatggagaatccaggcctttggatcttgggttgccacaacagtgattttcgcaatcggggaatgactgctctcctcaaagtcagcagctgtgataagaacacaggcgactattacgaagattcttacgaggacataagtgcctacttgttgtccaagaataacgccattgagcccagatcattctcccagaatcctcccgtgcttaaaaggcatcagcgcgaaatcaccagaactactcttcagtctgatcaagaggagattgactatgacgacaccataagcgtggaaatgaagaaggaggatttcgatatctatgacgaagatgagaaccagtctccgcggagctttcagaagaagacgcgacactacttcattgcagcagtcgaaaggctttgggactacggtatgtcatcatcccctcatgtgttgcgcaatagagctcagagtggaagtgttccacagttcaagaaagtcgtctttcaagagtttacagatggcagcttcacacagcctctctatcggggcgagcttaacgaacatttgggactccttggtccctatatccgagccgaagtggaggacaacattatggttacctttaggaatcaagcctctcgcccctacagcttctactcctccctcatcagttatgaggaggatcagagacaaggcgctgaaccacggaagaactttgtgaaaccgaatgagacgaagacctacttctggaaagtacagcaccacatggcccccacaaaagacgaattcgattgcaaagcatgggcgtatttttcagacgttgacttggagaaagatgtacattcaggacttattggtcctttgttggtgtgtcacactaacactctcaatccagcccatggcaggcaggtgacagtccaggaattcgctcttttctttaccatctttgatgagaccaagtcctggtacttcacggaaaacatggagcgcaattgcagagccccctgtaacatacagatggaggaccctacctttaaggaaaattatcggttccacgcaatcaacggagggattatggatacactccctggccttgtgatggctcaggaccaacgaatcaggtggtacctcctcagcatgggttctaatgagaacatacactccattcacttttcaggacatgtgttcactgtccggaagaaagaagagtataagatggccctctacaatttgtatccaggcgtgtttgagaccgttgaaatgcttccctctaaagctggcatctggagagtagagtgcttgatcggagaacatcttcacgcaggtatgagcaccttgttcctcgtgtacagcaacaaatgtcagaccccacttggcatggccagtggacacattcgcgactttcagatcacagcatctggccagtatggacaatgggccccaaagttggctcgcctccattactccggtagcataaatgcgtggtccactaaagaacctttcagctggattaaggtcgatcttcttgcccccatgatcatccacggcattaagacacagggagcgaggcagaaattctcctccctctacatctcacagttcattattatgtatagtttggacggcaagaagtggcaaacttatagaggtaacagtactggaacactcatggtgttcttcggcaacgttgatagctctggcatcaaacacaacatctttaatcctcccataatagctcggtacatcagattgcatccgacccactacagcattaggagtacactccgaatggagcttatgggttgcgacttgaattcctgttcaatgccactcggaatggagtctaaagccatctctgatgcacagataaccgccagtagctactttacgaacatgtttgctacgtggtcaccctctaaggcaaggcttcatttgcaaggccggtctaatgcctggagacctcaggtgaacaacccgaaagaatggctccaggtggactttcagaagaccatgaaagtaacaggtgtcactactcagggagttaagtccttggataccagcatgtatgtgaaggagttccttatttcctcatcacaagatggccaccagtggaccctcttctttcagaatggtaaggtcaaagtgtttcagggcaatcaagacagcttcacacccgtggtgaacagtcttgatcctccactcttgacacgataccttcgaatccatccacagtcttgggttcaccagattgcattgcgcatggaagtacttggatgcgaggctcaggacctctac

SEQ ID NO: 346 - protein, 1457 aa, synthetic construct
  REGION 1..1457: note = Variant of human B-domain deleted Factor VIII
MQIELSTCFFLCLLRFCFSATRRYYLGAVELSWDYMQSDLGELPVDARFPPRVPKSFPFNTSVVYKKTLFVEFTDHLFNIAKPRPPWMGLLGPTIQAEVYDTVVITLKNMASHPVSLHAVGVSYWKASEGAEYDDQTSQREKEDDKVFPGGSHTYVWQVLKENGPMASDPLCLTYSYLSHVDLVKDLNSGLIGALLVCREGSLAKEKTQTLHKFILLFAVFDEGKSWHSETKNSLMQDRDAASARAWPKMHTVNGYVNRSLPGLIGCHRKSVYWHVIGMGTTPEVHSIFLEGHTFLVRNHRQASLEISPITFLTAQTLLMDLGQFLLFCHISSHQHDGMEAYVKVDSCPEEPQLRMKNNEEAEDYDDDLTDSEMDVVRFDDDNSPSFIQIRSVAKKHPKTWVHYIAAEEEDWDYAPLVLAPDDRSYKSQYLNNGPQRIGRKYKKVRFMAYTDETFKTREAIQHESGILGPLLYGEVGDTLLIIFKNQASRPYNIYPHGITDVRPLYSRRLPKGVKHLKDFPILPGEIFKYKWTVTVEDGPTKSDPRCLTRYYSSFVNMERDLASGLIGPLLICYKESVDQRGNQIMSDKRNVILFSVFDENRSWYLTENIQRFLPNPAGVQLEDPEFQASNIMHSINGYVFDSLQLSVCLHEVAYWYILSIGAQTDFLSVFFSGYTFKHKMVYEDTLTLFPFSGETVFMSMENPGLWILGCHNSDFRNRGMTALLKVSSCDKNTGDYYEDSYEDISAYLLSKNNAIEPRSFSQNPPVLKRHQREITRTTLQSDQEEIDYDDTISVEMKKEDFDIYDEDENQSPRSFQKKTRHYFIAAVERLWDYGMSSSPHVLRNRAQSGSVPQFKKVVFQEFTDGSFTQPLYRGELNEHLGLLGPYIRAEVEDNIMVTFRNQASRPYSFYSSLISYEEDQRQGAEPRKNFVKPNETKTYFWKVQHHMAPTKDEFDCKAWAYFSDVDLEKDVHSGLIGPLLVCHTNTLNPAHGRQVTVQEFALFFTIFDETKSWYFTENMERNCRAPCNIQMEDPTFKENYRFHAINGGIMDTLPGLVMAQDQRIRWYLLSMGSNENIHSIHFSGHVFTVRKKEEYKMALYNLYPGVFETVEMLPSKAGIWRVECLIGEHLHAGMSTLFLVYSNKCQTPLGMASGHIRDFQITASGQYGQWAPKLARLHYSGSINAWSTKEPFSWIKVDLLAPMIIHGIKTQGARQKFSSLYISQFIIMYSLDGKKWQTYRGNSTGTLMVFFGNVDSSGIKHNIFNPPIIARYIRLHPTHYSIRSTLRMELMGCDLNSCSMPLGMESKAISDAQITASSYFTNMFATWSPSKARLHLQGRSNAWRPQVNNPKEWLQVDFQKTMKVTGVTTQGVKSLDTSMYVKEFLISSSQDGHQWTLFFQNGKVKVFQGNQDSFTPVVNSLDPPLLTRYLRIHPQSWVHQIALRMEVLGCEAQDLY

SEQ ID NO: 347 - DNA, 4371 bp, synthetic construct
  misc_feature 1..4371: note = Variant of human B-domain deleted Factor VIII
  source 1..4371: mol_type = other DNA
atgcagattgaactgtctacctgcttcttcctctgtttgctgaggttctgctttagcgccactagacggtactaccttggcgctgtggagctgtcctgggactatatgcagagtgatttgggagagcttcccgtcgacgcacgatttcctcctcgcgttccaaagtcatttcccttcaacacaagcgtggtgtacaagaagacgctcttcgtcgaattcaccgatcacctgttcaatatcgccaaacccagaccaccatggatgggtcttttggggcctaccatacaagcggaggtgtatgacacagttgttatcactctcaagaacatggcttctcatccggtaagtcttcacgcagtgggcgtgtcctactggaaagcttcagaaggagccgagtatgatgatcagacatcccagagggagaaagaagacgacaaggtatttccaggtgggtctcatacctatgtgtggcaagtgctcaaagagaatggccctatggcaagcgatccgctctgtttgacttacagctacctttcacacgttgacctcgtcaaggacctcaactccgggttgattggagccttgttggtatgcagggaaggatctcttgccaaagagaagacacagaccctccacaagtttatccttctctttgctgtgttcgatgagggcaaaagttggcatagcgaaacgaagaattccctcatgcaggatcgcgacgcagccagcgccagagcttggcccaagatgcacactgtgaacggatatgtcaataggtcacttcctggcttgattgggtgtcatcggaaaagtgtctactggcacgtgatcggaatggggacaacaccagaggtccactccatatttctcgaaggccataccttccttgttcgaaaccacagacaggcatccttggagatctctcccattacctttctcactgcccaaacgctccttatggacttgggtcagttccttctcttctgccatatcagctcacaccagcatgatggtatggaagcttatgtgaaagtcgacagttgtcctgaggagccacagttgcgcatgaagaataatgaagaagccgaggattacgacgacgatctcaccgattctgagatggacgtggtgaggtttgatgacgacaactctccctccttcattcaaatccggagcgtggcgaagaaacaccccaagacttgggtccactatatagcggcggaagaggaggattgggattacgctcctcttgtattggcaccagatgaccgctcatacaaaagccagtacctcaacaacggaccgcagagaattggccggaagtataagaaagtgcgatttatggcctatacagacgaaacctttaagacaagggaggccatccagcatgagagtgggattttgggacctcttctttacggcgaagttggtgataccctcctcatcatcttcaagaatcaagcttctcgcccctataacatttacccacacgggatcactgacgttaggcctttgtatagcagaagacttcccaaaggcgtgaagcatctcaaagacttccccattttgccaggcgagatctttaagtacaaatggaccgtcacagtggaagatggaccgactaaatcagaccctcgatgccttacgcggtactattcctccttcgtgaatatggagagagatttggcaagcggactcataggaccactcctcatctgttacaaggaatctgtagaccagaggggtaaccagattatgagtgataaacgcaatgtgatcctttttagcgtcttcgacgagaaccggtcctggtacttgaccgagaatatacaaaggttccttcccaaccccgcaggcgttcagttggaagaccctgagtttcaggccagcaatattatgcactcaatcaacggctatgtgtttgatagtctccagctttctgtttgcctccatgaagtagcctattggtacatcttgtcaattggtgctcaaacagacttcctctccgtcttcttctccggctacacctttaagcacaagatggtgtatgaggacactctcacactctttccattttctggagaaaccgtgttcatgagcatggagaatccaggcctttggatcttgggttgccacaacagtgattttcgcaatcggggaatgactgctctcctcaaagtcagcagctgtgataagaacacaggcgactattacgaagattcttacgaggacataagtgcctacttgttgtccaagaataacgccattgagcccagatcattctcccagaatcctcccgtgcttaaaaggcatcagcgcgaaatcaccagaactactcttcagtctgatcaagaggagattgactatgacgacaccataagcgtggaaatgaagaaggaggatttcgatatctatgacgaagatgagaaccagtctccgcggagctttcagaagaagacgcgacactacttcattgcagcagtcgaaaggctttgggactacggtatgtcatcatcccctcatgtgttgcgcaatagagctcagagtggaagtgttccacagttcaagaaagtcgtctttcaagagtttacagatggcagcttcacacagcctctctatcggggcgagcttaacgaacatttgggactccttggtccctatatccgagccgaagtggaggacaacattatggttacctttaggaatcaagcctctcgcccctacagcttctactcctccctcatcagttatgaggaggatcagagacaaggcgctgaaccacggaagaactttgtgaaaccgaatgagacgaagacctacttctggaaagtacagcaccacatggcccccacaaaagacgaattcgattgcaaagcatgggcgtatttttcagacgttgacttggagaaagatgtacattcaggacttattggtcctttgttggtgtgtcacactaacactctcaatccagcccatggcaggcaggtgacagtccaggaattcgctcttttctttaccatctttgatgagaccaagtcctggtacttcacggaaaacatggagcgcaattgcagagccccctgtaacatacagatggaggaccctacctttaaggaaaattatcggttccacgcaatcaacggatacattatggatacactccctggccttgtgatggctcaggaccaacgaatcaggtggtacctcctcagcatgggttctaatgagaacatacactccattcacttttcaggacatgtgttcactgtccggaagaaagaagagtataagatggccctctacaatttgtatccaggcgtgtttgagaccgttgaaatgcttccctctaaagctggcatctggagagtagagtgcttgatcggagaacatcttcacgcaggtatgagcaccttgttcctcgtgtacagcaacaaatgtcagaccccacttggcatggccagtggacacattcgcgactttcagatcacagcatctggccagtatggacaatgggccccaaagttggctcgcctccattactccggtagcataaatgcgtggtccactaaagaacctttcagctggattaaggtcgatcttcttgcccccatgatcatccacggcattaagacacagggagcgaggcagaaattctcctccgtgtacatctcacagttcattattatgtatagtttggacggcaagaagtggcaaacttatagaggtaacagtactggaacactcatggtgttcttcggcaacgttgatagctctggcatcaaacacaacatctttaatcctcccataatagctcggtacatcagattgcatccgacccactacagcattaggagtacactccgaatggagcttatgggttgcgacttgaattcctgttcaatgccactcggaatggagtctaaagccatctctgatgcacagataaccgccagtagctactttacgaacatgtttgctacgtggtcaccctctaaggcaaggcttcatttgcaaggccggtctaatgcctggagacctcaggtgaacaacccgaaagaatggctccaggtggactttcagaagaccatgaaagtaacaggtgtcactactcagggagttaagtccttggataccagcatgtatgtgaaggagttccttatttcctcatcacaagatggccaccagtggaccctcttctttcagaatggtaaggtcaaagtgtttcagggcaatcaagacagcttcacacccgtggtgaacagtcttgatcctccactcttgacacgataccttcgaatccatccacagtcttgggttcaccagattgcattgcgcatggaagtacttggatgcgaggctcaggacctctac

SEQ ID NO: 348 - protein, 1457 aa, synthetic construct
  REGION 1..1457: note = Variant of human B-domain deleted Factor VIII
MQIELSTCFFLCLLRFCFSATRRYYLGAVELSWDYMQSDLGELPVDARFPPRVPKSFPFNTSVVYKKTLFVEFTDHLFNIAKPRPPWMGLLGPTIQAEVYDTVVITLKNMASHPVSLHAVGVSYWKASEGAEYDDQTSQREKEDDKVFPGGSHTYVWQVLKENGPMASDPLCLTYSYLSHVDLVKDLNSGLIGALLVCREGSLAKEKTQTLHKFILLFAVFDEGKSWHSETKNSLMQDRDAASARAWPKMHTVNGYVNRSLPGLIGCHRKSVYWHVIGMGTTPEVHSIFLEGHTFLVRNHRQASLEISPITFLTAQTLLMDLGQFLLFCHISSHQHDGMEAYVKVDSCPEEPQLRMKNNEEAEDYDDDLTDSEMDVVRFDDDNSPSFIQIRSVAKKHPKTWVHYIAAEEEDWDYAPLVLAPDDRSYKSQYLNNGPQRIGRKYKKVRFMAYTDETFKTREAIQHESGILGPLLYGEVGDTLLIIFKNQASRPYNIYPHGITDVRPLYSRRLPKGVKHLKDFPILPGEIFKYKWTVTVEDGPTKSDPRCLTRYYSSFVNMERDLASGLIGPLLICYKESVDQRGNQIMSDKRNVILFSVFDENRSWYLTENIQRFLPNPAGVQLEDPEFQASNIMHSINGYVFDSLQLSVCLHEVAYWYILSIGAQTDFLSVFFSGYTFKHKMVYEDTLTLFPFSGETVFMSMENPGLWILGCHNSDFRNRGMTALLKVSSCDKNTGDYYEDSYEDISAYLLSKNNAIEPRSFSQNPPVLKRHQREITRTTLQSDQEEIDYDDTISVEMKKEDFDIYDEDENQSPRSFQKKTRHYFIAAVERLWDYGMSSSPHVLRNRAQSGSVPQFKKVVFQEFTDGSFTQPLYRGELNEHLGLLGPYIRAEVEDNIMVTFRNQASRPYSFYSSLISYEEDQRQGAEPRKNFVKPNETKTYFWKVQHHMAPTKDEFDCKAWAYFSDVDLEKDVHSGLIGPLLVCHTNTLNPAHGRQVTVQEFALFFTIFDETKSWYFTENMERNCRAPCNIQMEDPTFKENYRFHAINGYIMDTLPGLVMAQDQRIRWYLLSMGSNENIHSIHFSGHVFTVRKKEEYKMALYNLYPGVFETVEMLPSKAGIWRVECLIGEHLHAGMSTLFLVYSNKCQTPLGMASGHIRDFQITASGQYGQWAPKLARLHYSGSINAWSTKEPFSWIKVDLLAPMIIHGIKTQGARQKFSSVYISQFIIMYSLDGKKWQTYRGNSTGTLMVFFGNVDSSGIKHNIFNPPIIARYIRLHPTHYSIRSTLRMELMGCDLNSCSMPLGMESKAISDAQITASSYFTNMFATWSPSKARLHLQGRSNAWRPQVNNPKEWLQVDFQKTMKVTGVTTQGVKSLDTSMYVKEFLISSSQDGHQWTLFFQNGKVKVFQGNQDSFTPVVNSLDPPLLTRYLRIHPQSWVHQIALRMEVLGCEAQDLY

SEQ ID NO: 349 - DNA, 4371 bp, synthetic construct
  misc_feature 1..4371: note = Variant of human B-domain deleted Factor VIII
  source 1..4371: mol_type = other DNA
atgcagattgaactgtctacctgcttcttcctctgtttgctgaggttctgctttagcgccactagacggtactaccttggcgctgtggagctgtcctgggactatatgcagagtgatttgggagagcttcccgtcgacgcacgatttcctcctcgcgttccaaagtcatttcccttcaacacaagcgtggtgtacaagaagacgctcttcgtcgaattcaccgatcacctgttcaatatcgccaaacccagaccaccatggatgggtcttttggggcctaccatacaagcggaggtgtatgacacagttgttatcactctcaagaacatggcttctcatccggtaagtcttcacgcagtgggcgtgtcctactggaaagcttcagaaggagccgagtatgatgatcagacatcccagagggagaaagaagacgacaaggtatttccaggtgggtctcatacctatgtgtggcaagtgctcaaagagaatggccctatggcaagcgatccgctctgtttgacttacagctacctttcacacgttgacctcgtcaaggacctcaactccgggttgattggagccttgttggtatgcagggaaggatctcttgccaaagagaagacacagaccctccacaagtttatccttctctttgctgtgttcgatgagggcaaaagttggcatagcgaaacgaagaattccctcatgcaggatcgcgacgcagccagcgccagagcttggcccaagatgcacactgtgaacggatatgtcaataggtcacttcctggcttgattgggtgtcatcggaaaagtgtctactggcacgtgatcggaatggggacaacaccagaggtccactccatatttctcgaaggccataccttccttgttcgaaaccacagacaggcatccttggagatctctcccattacctttctcactgcccaaacgctccttatggacttgggtcagttccttctcttctgccatatcagctcacaccagcatgatggtatggaagcttatgtgaaagtcgacagttgtcctgaggagccacagttgcgcatgaagaataatgaagaagccgaggattacgacgacgatctcaccgattctgagatggacgtggtgaggtttgatgacgacaactctccctccttcattcaaatccggagcgtggcgaagaaacaccccaagacttgggtccactatatagcggcggaagaggaggattgggattacgctcctcttgtattggcaccagatgaccgctcatacaaaagccagtacctcaacaacggaccgcagagaattggccggaagtataagaaagtgcgatttatggcctatacagacgaaacctttaagacaagggaggccatccagcatgagagtgggattttgggacctcttctttacggcgaagttggtgataccctcctcatcatcttcaagaatcaagcttctcgcccctataacatttacccacacgggatcactgacgttaggcctttgtatagcagaagacttcccaaaggcgtgaagcatctcaaagacttccccattttgccaggcgagatctttaagtacaaatggaccgtcacagtggaagatggaccgactaaatcagaccctcgatgccttacgcggtactattcctccttcgtgaatatggagagagatttggcaagcggactcataggaccactcctcatctgttacaaggaatctgtagaccagaggggtaaccagattatgagtgataaacgcaatgtgatcctttttagcgtcttcgacgagaaccggtcctggtacttgaccgagaatatacaaaggttccttcccaaccccgcaggcgttcagttggaagaccctgagtttcaggccagcaatattatgcactcaatcaacggctatgtgtttgatagtctccagctttctgtttgcctccatgaagtagcctattggtacatcttgtcaattggtgctcaaacagacttcctctccgtcttcttctccggctacacctttaagcacaagatggtgtatgaggacactctcacactctttccattttctggagaaaccgtgttcatgagcatggagaatccaggcctttggatcttgggttgccacaacagtgattttcgcaatcggggaatgactgctctcctcaaagtcagcagctgtgataagaacacaggcgactattacgaagattcttacgaggacataagtgcctacttgttgtccaagaataacgccattgagcccagatcattctcccagaatcctcccgtgcttaaaaggcatcagcgcgaaatcaccagaactactcttcagtctgatcaagaggagattgactatgacgacaccataagcgtggaaatgaagaaggaggatttcgatatctatgacgaagatgagaaccagtctccgcggagctttcagaagaagacgcgacactacttcattgcagcagtcgaaaggctttgggactacggtatgtcatcatcccctcatgtgttgcgcaatagagctcagagtggaagtgttccacagttcaagaaagtcgtctttcaagagtttacagatggcagcttcacacagcctctctatcggggcgagcttaacgaacatttgggactccttggtccctatatccgagccgaagtggaggacaacattatggttacctttaggaatcaagcctctcgcccctacagcttctactcctccctcatcagttatgaggaggatcagagacaaggcgctgaaccacggaagaactttgtgaaaccgaatgagacgaagacctacttctggaaagtacagcaccacatggcccccacaaaagacgaattcgattgcaaagcatgggcgtatttttcagacgttgacttggagaaagatgtacattcaggacttattggtcctttgttggtgtgtcacactaacactctcaatccagcccatggcaggcaggtgacagtccaggaattcgctcttttctttaccatctttgatgagaccaagtcctggtacttcacggaaaacatggagcgcaattgcagagccccctgtaacatacagatggaggaccctacctttaaggaaaattatcggttccacgcaatcaacggatacattgaggatacactccctggccttgtgatggctcaggaccaacgaatcaggtggtacctcctcagcatgggttctaatgagaacatacactccattcacttttcaggacatgtgttcactgtccggaagaaagaagagtataagatggccctctacaatttgtatccaggcgtgtttgagaccgttgaaatgcttccctctaaagctggcatctggagagtagagtgcttgatcggagaacatcttcacgcaggtatgagcaccttgttcctcgtgtacagcaacaaatgtcagaccccacttggcatggccagtggacacattcgcgactttcagatcacagcatctggccagtatggacaatgggccccaaagttggctcgcctccattactccggtagcataaatgcgtggtccactaaagaacctttcagctggattaaggtcgatcttcttgcccccatgatcatccacggcattaagacacagggagcgaggcagaaattctcctccctctacatctcacagttcattattatgtatagtttggacggcaagaagtggcaaacttatagaggtaacagtactggaacactcatggtgttcttcggcaacgttgatagctctggcatcaaacacaacatctttaatcctcccataatagctcggtacatcagattgcatccgacccactacagcattaggagtacactccgaatggagcttatgggttgcgacttgaattcctgttcaatgccactcggaatggagtctaaagccatctctgatgcacagataaccgccagtagctactttacgaacatgtttgctacgtggtcaccctctaaggcaaggcttcatttgcaaggccggtctaatgcctggagacctcaggtgaacaacccgaaagaatggctccaggtggactttcagaagaccatgaaagtaacaggtgtcactactcagggagttaagtccttggataccagcatgtatgtgaaggagttccttatttcctcatcacaagatggccaccagtggaccctcttctttcagaatggtaaggtcaaagtgtttcagggcaatcaagacagcttcacacccgtggtgaacagtcttgatcctccactcttgacacgataccttcgaatccatccacagtcttgggttcaccagattgcattgcgcatggaagtacttggatgcgaggctcaggacctctac

SEQ ID NO: 350 - protein, 1457 aa, synthetic construct
  REGION 1..1457: note = Variant of human B-domain deleted Factor VIII
MQIELSTCFFLCLLRFCFSATRRYYLGAVELSWDYMQSDLGELPVDARFPPRVPKSFPFNTSVVYKKTLFVEFTDHLFNIAKPRPPWMGLLGPTIQAEVYDTVVITLKNMASHPVSLHAVGVSYWKASEGAEYDDQTSQREKEDDKVFPGGSHTYVWQVLKENGPMASDPLCLTYSYLSHVDLVKDLNSGLIGALLVCREGSLAKEKTQTLHKFILLFAVFDEGKSWHSETKNSLMQDRDAASARAWPKMHTVNGYVNRSLPGLIGCHRKSVYWHVIGMGTTPEVHSIFLEGHTFLVRNHRQASLEISPITFLTAQTLLMDLGQFLLFCHISSHQHDGMEAYVKVDSCPEEPQLRMKNNEEAEDYDDDLTDSEMDVVRFDDDNSPSFIQIRSVAKKHPKTWVHYIAAEEEDWDYAPLVLAPDDRSYKSQYLNNGPQRIGRKYKKVRFMAYTDETFKTREAIQHESGILGPLLYGEVGDTLLIIFKNQASRPYNIYPHGITDVRPLYSRRLPKGVKHLKDFPILPGEIFKYKWTVTVEDGPTKSDPRCLTRYYSSFVNMERDLASGLIGPLLICYKESVDQRGNQIMSDKRNVILFSVFDENRSWYLTENIQRFLPNPAGVQLEDPEFQASNIMHSINGYVFDSLQLSVCLHEVAYWYILSIGAQTDFLSVFFSGYTFKHKMVYEDTLTLFPFSGETVFMSMENPGLWILGCHNSDFRNRGMTALLKVSSCDKNTGDYYEDSYEDISAYLLSKNNAIEPRSFSQNPPVLKRHQREITRTTLQSDQEEIDYDDTISVEMKKEDFDIYDEDENQSPRSFQKKTRHYFIAAVERLWDYGMSSSPHVLRNRAQSGSVPQFKKVVFQEFTDGSFTQPLYRGELNEHLGLLGPYIRAEVEDNIMVTFRNQASRPYSFYSSLISYEEDQRQGAEPRKNFVKPNETKTYFWKVQHHMAPTKDEFDCKAWAYFSDVDLEKDVHSGLIGPLLVCHTNTLNPAHGRQVTVQEFALFFTIFDETKSWYFTENMERNCRAPCNIQMEDPTFKENYRFHAINGYIEDTLPGLVMAQDQRIRWYLLSMGSNENIHSIHFSGHVFTVRKKEEYKMALYNLYPGVFETVEMLPSKAGIWRVECLIGEHLHAGMSTLFLVYSNKCQTPLGMASGHIRDFQITASGQYGQWAPKLARLHYSGSINAWSTKEPFSWIKVDLLAPMIIHGIKTQGARQKFSSLYISQFIIMYSLDGKKWQTYRGNSTGTLMVFFGNVDSSGIKHNIFNPPIIARYIRLHPTHYSIRSTLRMELMGCDLNSCSMPLGMESKAISDAQITASSYFTNMFATWSPSKARLHLQGRSNAWRPQVNNPKEWLQVDFQKTMKVTGVTTQGVKSLDTSMYVKEFLISSSQDGHQWTLFFQNGKVKVFQGNQDSFTPVVNSLDPPLLTRYLRIHPQSWVHQIALRMEVLGCEAQDLY

SEQ ID NO: 351 - DNA, 4371 bp, synthetic construct
  misc_feature 1..4371: note = Variant of human B-domain deleted Factor VIII
  source 1..4371: mol_type = other DNA
atgcagattgaactgtctacctgcttcttcctctgtttgctgaggttctgctttagcgccactagacggtactaccttggcgctgtggagctgtcctgggactatatgcagagtgatttgggagagcttcccgtcgacgcacgatttcctcctcgcgttccaaagtcatttcccttcaacacaagcgtggtgtacaagaagacgctcttcgtcgaattcaccgatcacctgttcaatatcgccaaacccagaccaccatggatgggtcttttggggcctaccatacaagcggaggtgtatgacacagttgttatcactctcaagaacatggcttctcatccggtaagtcttcacgcagtgggcgtgtcctactggaaagcttcagaaggagccgagtatgatgatcagacatcccagagggagaaagaagacgacaaggtatttccaggtgggtctcatacctatgtgtggcaagtgctcaaagagaatggccctatggcaagcgatccgctctgtttgacttacagctacctttcacacgttgacctcgtcaaggacctcaactccgggttgattggagccttgttggtatgcagggaaggatctcttgccaaagagaagacacagaccctccacaagtttatccttctctttgctgtgttcgatgagggcaaaagttggcatagcgaaacgaagaattccctcatgcaggatcgcgacgcagccagcgccagagcttggcccaagatgcacactgtgaacggatatgtcaataggtcacttcctggcttgattgggtgtcatcggaaaagtgtctactggcacgtgatcggaatggggacaacaccagaggtccactccatatttctcgaaggccataccttccttgttcgaaaccacagacaggcatccttggagatctctcccattacctttctcactgcccaaacgctccttatggacttgggtcagttccttctcttctgccatatcagctcacaccagcatgatggtatggaagcttatgtgaaagtcgacagttgtcctgaggagccacagttgcgcatgaagaataatgaagaagccgaggattacgacgacgatctcaccgattctgagatggacgtggtgaggtttgatgacgacaactctccctccttcattcaaatccggagcgtggcgaagaaacaccccaagacttgggtccactatatagcggcggaagaggaggattgggattacgctcctcttgtattggcaccagatgaccgctcatacaaaagccagtacctcaacaacggaccgcagagaattggccggaagtataagaaagtgcgatttatggcctatacagacgaaacctttaagacaagggaggccatccagcatgagagtgggattttgggacctcttctttacggcgaagttggtgataccctcctcatcatcttcaagaatcaagcttctcgcccctataacatttacccacacgggatcactgacgttaggcctttgtatagcagaagacttcccaaaggcgtgaagcatctcaaagacttccccattttgccaggcgagatctttaagtacaaatggaccgtcacagtggaagatggaccgactaaatcagaccctcgatgccttacgcggtactattcctccttcgtgaatatggagagagatttggcaagcggactcataggaccactcctcatctgttacaaggaatctgtagaccagaggggtaaccagattatgagtgataaacgcaatgtgatcctttttagcgtcttcgacgagaaccggtcctggtacttgaccgagaatatacaagggttccttcccaaccccgcaggcgttcagttggaagaccctgagtttcaggccagcaatattatgcactcaatcaacggctatgtgtttgatagtctccagctttctgtttgcctccatgaagtagcctattggtacatcttgtcaattggtgctcaaacagacttcctctccgtcttcttctccggctacacctttaagcacaagatggtgtatgaggacactctcacactctttccattttctggagaaaccgtgttcatgagcatggagaatccaggcctttggatcttgggttgccacaacagtgattttcgcaatcggggaatgactgctctcctcaaagtcagcagctgtgataagaacacaggcgactattacgaagattcttacgaggacataagtgcctacttgttgtccaagaataacgccattgagcccagatcattctcccagaatcctcccgtgcttaaaaggcatcagcgcgaaatcaccagaactactcttcagtctgatcaagaggagattgactatgacgacaccataagcgtggaaatgaagaaggaggatttcgatatctatgacgaagatgagaaccagtctccgcggagctttcagaagaagacgcgacactacttcattgcagcagtcgaaaggctttgggactacggtatgtcatcatcccctcatgtgttgcgcaatagagctcagagtggaagtgttccacagttcaagaaagtcgtctttcaagagtttacagatggcagcttcacacagcctctctatcggggcgagcttaacgaacatttgggactccttggtccctatatccgagccgaagtggaggacaacattatggttacctttaggaatcaagcctctcgcccctacagcttctactcctccctcatcagttatgaggaggatcagagacaaggcgctgaaccacggaagaactttgtgaaaccgaatgagacgaagacctacttctggaaagtacagcaccacatggcccccacaaaagacgaattcgattgcaaagcatgggcgtatttttcagacgttgacttggagaaagatgtacattcaggacttattggtcctttgttggtgtgtcacactaacactctcaatccagcccatggcaggcaggtgacagtccaggaattcgctcttttctttaccatctttgatgagaccaagtcctggtacttcacggaaaacatggagcgcaattgcagagccccctgtaacatacagatggaggaccctacctttaaggaaaattatcggttccacgcaatcaacggatacattatggatacactccctggccttgtgatggctcaggaccaacgaatcaggtggtacctcctcagcatgggttctaatgagaacatacactccattcacttttcaggacatgtgttcactgtccggaagaaagaagagtataagatggccctctacaatttgtatccaggcgtgtttgagaccgttgaaatgcttccctctaaagctggcatctggagagtagagtgcttgatcggagaacatcttcacgcaggtatgagcaccttgttcctcgtgtacagcaacaaatgtcagaccccacttggcatggccagtggacacattcgcgactttcagatcacagcatctggccagtatggacaatgggccccaaagttggctcgcctccattactccggtagcataaatgcgtggtccactaaagaacctttcagctggattaaggtcgatcttcttgcccccatgatcatccacggcattaagacacagggagcgaggcagaaattctcctccctctacatctcacagttcattattatgtatagtttggacggcaagaagtggcaaacttatagaggtaacagtactggaacactcatggtgttcttcggcaacgttgatagctctggcatcaaacacaacatctttaatcctcccataatagctcggtacatcagattgcatccgacccactacagcattaggagtacactccgaatggagcttatgggttgcgacttgaattcctgttcaatgccactcggaatggagtctaaagccatctctgatgcacagataaccgccagtagctactttacgaacatgtttgctacgtggtcaccctctaaggcaaggcttcatttgcaaggccggtctaatgcctggagacctcaggtgaacaacccgaaagaatggctccaggtggactttcagaagaccatgaaagtaacaggtgtcactactcagggagttaagtccttggataccagcatgtatgtgaaggagttccttatttcctcatcacaagatggccaccagtggaccctcttctttcagaatggtaaggtcaaagtgtttcagggcaatcaagacagcttcacacccgtggtgaacagtcttgatcctccactcttgacacgataccttcgaatccatccacagtcttgggttcaccagattgcattgcgcatggaagtacttggatgcgaggctcaggacctctac

SEQ ID NO: 352 - protein, 1457 aa, synthetic construct
  REGION 1..1457: note = Variant of human B-domain deleted Factor VIII
MQIELSTCFFLCLLRFCFSATRRYYLGAVELSWDYMQSDLGELPVDARFPPRVPKSFPFNTSVVYKKTLFVEFTDHLFNIAKPRPPWMGLLGPTIQAEVYDTVVITLKNMASHPVSLHAVGVSYWKASEGAEYDDQTSQREKEDDKVFPGGSHTYVWQVLKENGPMASDPLCLTYSYLSHVDLVKDLNSGLIGALLVCREGSLAKEKTQTLHKFILLFAVFDEGKSWHSETKNSLMQDRDAASARAWPKMHTVNGYVNRSLPGLIGCHRKSVYWHVIGMGTTPEVHSIFLEGHTFLVRNHRQASLEISPITFLTAQTLLMDLGQFLLFCHISSHQHDGMEAYVKVDSCPEEPQLRMKNNEEAEDYDDDLTDSEMDVVRFDDDNSPSFIQIRSVAKKHPKTWVHYIAAEEEDWDYAPLVLAPDDRSYKSQYLNNGPQRIGRKYKKVRFMAYTDETFKTREAIQHESGILGPLLYGEVGDTLLIIFKNQASRPYNIYPHGITDVRPLYSRRLPKGVKHLKDFPILPGEIFKYKWTVTVEDGPTKSDPRCLTRYYSSFVNMERDLASGLIGPLLICYKESVDQRGNQIMSDKRNVILFSVFDENRSWYLTENIQGFLPNPAGVQLEDPEFQASNIMHSINGYVFDSLQLSVCLHEVAYWYILSIGAQTDFLSVFFSGYTFKHKMVYEDTLTLFPFSGETVFMSMENPGLWILGCHNSDFRNRGMTALLKVSSCDKNTGDYYEDSYEDISAYLLSKNNAIEPRSFSQNPPVLKRHQREITRTTLQSDQEEIDYDDTISVEMKKEDFDIYDEDENQSPRSFQKKTRHYFIAAVERLWDYGMSSSPHVLRNRAQSGSVPQFKKVVFQEFTDGSFTQPLYRGELNEHLGLLGPYIRAEVEDNIMVTFRNQASRPYSFYSSLISYEEDQRQGAEPRKNFVKPNETKTYFWKVQHHMAPTKDEFDCKAWAYFSDVDLEKDVHSGLIGPLLVCHTNTLNPAHGRQVTVQEFALFFTIFDETKSWYFTENMERNCRAPCNIQMEDPTFKENYRFHAINGYIMDTLPGLVMAQDQRIRWYLLSMGSNENIHSIHFSGHVFTVRKKEEYKMALYNLYPGVFETVEMLPSKAGIWRVECLIGEHLHAGMSTLFLVYSNKCQTPLGMASGHIRDFQITASGQYGQWAPKLARLHYSGSINAWSTKEPFSWIKVDLLAPMIIHGIKTQGARQKFSSLYISQFIIMYSLDGKKWQTYRGNSTGTLMVFFGNVDSSGIKHNIFNPPIIARYIRLHPTHYSIRSTLRMELMGCDLNSCSMPLGMESKAISDAQITASSYFTNMFATWSPSKARLHLQGRSNAWRPQVNNPKEWLQVDFQKTMKVTGVTTQGVKSLDTSMYVKEFLISSSQDGHQWTLFFQNGKVKVFQGNQDSFTPVVNSLDPPLLTRYLRIHPQSWVHQIALRMEVLGCEAQDLY

SEQ ID NO: 353 - DNA, 4371 bp, synthetic construct
  misc_feature 1..4371: note = Variant of human B-domain deleted Factor VIII
  source 1..4371: mol_type = other DNA
atgcagattgaactgtctacctgcttcttcctctgtttgctgaggttctgctttagcgccactagacggtactaccttggcgctgtggagctgtcctgggactatatgcagagtgatttgggagagcttcccgtcgacgcacgatttcctcctcgcgttccaaagtcatttcccttcaacacaagcgtggtgtacaagaagacgctcttcgtcgaattcaccgatcacctgttcaatatcgccaaacccagaccaccatggatgggtcttttggggcctaccatacaagcggaggtgtatgacacagttgttatcactctcaagaacatggcttctcatccggtaagtcttcacgcagtgggcgtgtcctactggaaagcttcagaaggagccgagtatgatgatcagacatcccagagggagaaagaagacgacaaggtatttccaggtgggtctcatacctatgtgtggcaagtgctcaaagagaatggccctatggcaagcgatccgctctgtttgacttacagctacctttcacacgttgacctcgtcaaggacctcaactccgggttgattggagccttgttggtatgcagggaaggatctcttgccaaagagaagacacagaccctccacaagtttatccttctctttgctgtgttcgatgagggcaaaagttggcatagcgaaacgaagaattccctcatgcaggatcgcgacgcagccagcgccagagcttggcccaagatgcacactgtgaacggatatgtcaataggtcacttcctggcttgattgggtgtcatcggaaaagtgtctactggcacgtgatcggaatggggacaacaccagaggtccactccatatttctcgaaggccataccttccttgttcgaaaccacagacaggcatccttggagatctctcccattacctttctcactgcccaaacgctccttatggacttgggtcagttccttctcttctgccatatcagctcacaccagcatgatggtatggaagcttatgtgaaagtcgacagttgtcctgaggagccacagttgcgcatgaagaataatgaagaagccgaggattacgacgacgatctcaccgattctgagatggacgtggtgaggtttgatgacgacaactctccctccttcattcaaatccggagcgtggcgaagaaacaccccaagacttgggtccactatatagcggcggaagaggaggattgggattacgctcctcttgtattggcaccagatgaccgctcatacaaaagccagtacctcaacaacggaccgcagagaattggccggaagtataagaaagtgcgatttatggcctatacagacgaaacctttaagacaagggaggccatccagcatgagagtgggattttgggacctcttctttacggcgaagttggtgataccctcctcatcatcttcaagaatcaagcttctcgcccctataacatttacccacacgggatcactgacgttaggcctttgtatagcagaagacttcccaaaggcgtgaagcatctcaaagacttccccattttgccaggcgagatctttaagtacaaatggaccgtcacagtggaagatggaccgactaaatcagaccctcgatgccttacgcggtactattcctccttcgtgaatatggagagagatttggcaagcggactcataggaccactcctcatctgttacaaggaatctgtagaccagaggggtaaccagattatgagtgataaacgcaatgtgatcctttttagcgtcttcgacgagaaccggtcctggtacttgaccgagaatatacaaaggttccttcccaaccccgcaggcgttcagttggaagaccctgagtttcaggccagcaatattatgcactcaatcaacggctatgtgtttgatagtctccagctttctgtttgcctccatgaagtagcctattggtacatcttgtcaattggtgctcaaacagacttcctctccgtcttcttctccggctacacctttaagcacaagatggtgtatgaggacactctcacactctttccattttctggagaaaccgtgttcatgagcatggagaatccaggcctttggatcttgggttgccacaacagtgattttcgcaatcggggaatgactgctctcctcaaagtcagcagctgtgataagaacacaggcgactattacgaagattcttacgaggacataagtgcctacttgttgtccaagaataacgccattgagcccagatcattctcccagaatcctcccgtgcttaaaaggcatcagcgcgaaatcaccagaactactcttcagtctgatcaagaggagattgactatgacgacaccataagcgtggaaatgaagaaggaggatttcgatatctatgacgaagatgagaaccagtctccgcggagctttcagaagaagacgcgacactacttcattgcagcagtcgaaaggctttgggactacggtatgtcatcatcccctcatgtgttgcgcaatagagctcagagtggaagtgttccacagttcaagaaagtcgtctttcaagagtttacagatggcagcttcacacagcctctctatcggggcgagcttaacgaacatttgggactccttggtccctatatccgagccgaagtggaggacaacattatggttacctttaggaatcaagcctctcgcccctacagcttctactcctccctcatcagttatgaggaggatcagagacaaggcgctgaaccacggaagaactttgtgaaaccgaatgagacgaagacctacttctggaaagtacagcaccacatggcccccacaaaagacgaattcgattgcaaagcatgggcgtatttttcagacgttgacttggagaaagatgtacattcaggacttattggtcctttgttggtgtgtcacactaacactctcaatccagcccatggcaggcaggtgacagtccaggaattcgctcttttctttaccatctttgatgagaccaagtcctggtacttcacggaaaacatggagcgcaattgcagagccccctgtaacatacagatggaggaccctacccataaggaaaattatcggttccacgcaatcaacggatacattatggatacactccctggccttgtgatggctcaggaccaacgaatcaggtggtacctcctcagcatgggttctaatgagaacatacactccattcacttttcaggacatgtgttcactgtccggaagaaagaagagtataagatggccctctacaatttgtatccaggcgtgtttgagaccgttgaaatgcttccctctaaagctggcatctggagagtagagtgcttgatcggagaacatcttcacgcaggtatgagcaccttgttcctcgtgtacagcaacaaatgtcagaccccacttggcatggccagtggacacattcgcgactttcagatcacagcatctggccagtatggacaatgggccccaaagttggctcgcctccattactccggtagcataaatgcgtggtccactaaagaacctttcagctggattaaggtcgatcttcttgcccccatgatcatccacggcattaagacacagggagcgaggcagaaattctcctccctctacatctcacagttcattattatgtatagtttggacggcaagaagtggcaaacttatagaggtaacagtactggaacactcatggtgttcttcggcaacgttgatagctctggcatcaaacacaacatctttaatcctcccataatagctcggtacatcagattgcatccgacccactacagcattaggagtacactccgaatggagcttatgggttgcgacttgaattcctgttcaatgccactcggaatggagtctaaagccatctctgatgcacagataaccgccagtagctactttacgaacatgtttgctacgtggtcaccctctaaggcaaggcttcatttgcaaggccggtctaatgcctggagacctcaggtgaacaacccgaaagaatggctccaggtggactttcagaagaccatgaaagtaacaggtgtcactactcagggagttaagtccttggataccagcatgtatgtgaaggagttccttatttcctcatcacaagatggccaccagtggaccctcttctttcagaatggtaaggtcaaagtgtttcagggcaatcaagacagcttcacacccgtggtgaacagtcttgatcctccactcttgacacgataccttcgaatccatccacagtcttgggttcaccagattgcattgcgcatggaagtacttggatgcgaggctcaggacctctac

SEQ ID NO: 354 - protein, 1457 aa, synthetic construct
  REGION 1..1457: note = Variant of human B-domain deleted Factor VIII
MQIELSTCFFLCLLRFCFSATRRYYLGAVELSWDYMQSDLGELPVDARFPPRVPKSFPFNTSVVYKKTLFVEFTDHLFNIAKPRPPWMGLLGPTIQAEVYDTVVITLKNMASHPVSLHAVGVSYWKASEGAEYDDQTSQREKEDDKVFPGGSHTYVWQVLKENGPMASDPLCLTYSYLSHVDLVKDLNSGLIGALLVCREGSLAKEKTQTLHKFILLFAVFDEGKSWHSETKNSLMQDRDAASARAWPKMHTVNGYVNRSLPGLIGCHRKSVYWHVIGMGTTPEVHSIFLEGHTFLVRNHRQASLEISPITFLTAQTLLMDLGQFLLFCHISSHQHDGMEAYVKVDSCPEEPQLRMKNNEEAEDYDDDLTDSEMDVVRFDDDNSPSFIQIRSVAKKHPKTWVHYIAAEEEDWDYAPLVLAPDDRSYKSQYLNNGPQRIGRKYKKVRFMAYTDETFKTREAIQHESGILGPLLYGEVGDTLLIIFKNQASRPYNIYPHGITDVRPLYSRRLPKGVKHLKDFPILPGEIFKYKWTVTVEDGPTKSDPRCLTRYYSSFVNMERDLASGLIGPLLICYKESVDQRGNQIMSDKRNVILFSVFDENRSWYLTENIQRFLPNPAGVQLEDPEFQASNIMHSINGYVFDSLQLSVCLHEVAYWYILSIGAQTDFLSVFFSGYTFKHKMVYEDTLTLFPFSGETVFMSMENPGLWILGCHNSDFRNRGMTALLKVSSCDKNTGDYYEDSYEDISAYLLSKNNAIEPRSFSQNPPVLKRHQREITRTTLQSDQEEIDYDDTISVEMKKEDFDIYDEDENQSPRSFQKKTRHYFIAAVERLWDYGMSSSPHVLRNRAQSGSVPQFKKVVFQEFTDGSFTQPLYRGELNEHLGLLGPYIRAEVEDNIMVTFRNQASRPYSFYSSLISYEEDQRQGAEPRKNFVKPNETKTYFWKVQHHMAPTKDEFDCKAWAYFSDVDLEKDVHSGLIGPLLVCHTNTLNPAHGRQVTVQEFALFFTIFDETKSWYFTENMERNCRAPCNIQMEDPTHKENYRFHAINGYIMDTLPGLVMAQDQRIRWYLLSMGSNENIHSIHFSGHVFTVRKKEEYKMALYNLYPGVFETVEMLPSKAGIWRVECLIGEHLHAGMSTLFLVYSNKCQTPLGMASGHIRDFQITASGQYGQWAPKLARLHYSGSINAWSTKEPFSWIKVDLLAPMIIHGIKTQGARQKFSSLYISQFIIMYSLDGKKWQTYRGNSTGTLMVFFGNVDSSGIKHNIFNPPIIARYIRLHPTHYSIRSTLRMELMGCDLNSCSMPLGMESKAISDAQITASSYFTNMFATWSPSKARLHLQGRSNAWRPQVNNPKEWLQVDFQKTMKVTGVTTQGVKSLDTSMYVKEFLISSSQDGHQWTLFFQNGKVKVFQGNQDSFTPVVNSLDPPLLTRYLRIHPQSWVHQIALRMEVLGCEAQDLY

SEQ ID NO: 355 - DNA, 4371 bp, synthetic construct
  misc_feature 1..4371: note = Variant of human B-domain deleted Factor VIII
  source 1..4371: mol_type = other DNA
atgcagattgaactgtctacctgcttcttcctctgtttgctgaggttctgctttagcgccactagacggtactaccttggcgctgtggagctgtcctgggactatatgcagagtgatttgggagagcttcccgtcgacgcacgatttcctcctcgcgttccaaagtcatttcccttcaacacaagcgtggtgtacaagaagacgctcttcgtcgaattcaccgatcacctgttcaatatcgccaaacccagaccaccatggatgggtcttttggggcctaccatacaagcggaggtgtatgacacagttgttatcactctcaagaacatggcttctcatccggtaagtcttcacgcagtgggcgtgtcctactggaaagcttcagaaggagccgagtatgatgatcagacatcccagagggagaaagaagacgacaaggtatttccaggtgggtctcatacctatgtgtggcaagtgctcaaagagaatggccctatggcaagcgatccgctctgtttgacttacagctacctttcacacgttgacctcgtcaaggacctcaactccgggttgattggagccttgttggtatgcagggaaggatctcttgccaaagagaagacacagaccctccacaagtttatccttctctttgctgtgttcgatgagggcaaaagttggcatagcgaaacgaagaattccctcatgcaggatcgcgacgcagccagcgccagagcttggcccaagatgcacactgtgaacggatatgtcaataggtcacttcctggcttgattgggtgtcatcggaaaagtgtctactggcacgtgatcggaatggggacaacaccagaggtccactccatatttctcgaaggccataccttccttgttcgaaaccacagacaggcatccttggagatctctcccattacctttctcactgcccaaacgctccttatggacttgggtcagttccttctcttctgccatatcagctcacaccagcatgatggtatggaagcttatgtgaaagtcgacagttgtcctgaggagccacagttgcgcatgaagaataatgaagaagccgaggattacgacgacgatctcaccgattctgagatggacgtggtgaggtttgatgacgacaactctccctccttcattcaaatccggagcgtggcgaagaaacaccccaagacttgggtccactatatagcggcggaagaggaggattgggattacgctcctcttgtattggcaccagatgaccgctcatacaaaagccagtacctcaacaacggaccgcagagaattggccggaagtataagaaagtgcgatttatggcctatacagacgaaacctttaagacaagggaggccatccagcatgagagtgggattttgggacctcttctttacggcgaagttggtgataccctcctcatcatcttcaagaatcaagcttctcgcccctataacatttacccacacgggatcactgacgttaggcctttgtatagcagaagacttcccaaaggcgtgaagcatctcaaagacttccccattttgccaggcgagatctttaagtacaaatggaccgtcacagtggaagatggaccgactaaatcagaccctcgatgccttacgcggtactattcctccttcgtgaatatggagagagatttggcaagcggactcataggaccactcctcatctgttacaaggaatctgtagaccagaggggtaaccagattatgagtgataaacgcaatgtgatcctttttagcgtcttcgacgagaaccggtcctggtacttgaccgagaatatacaaaggttccttcccgagcccgcaggcgttcagttggaagaccctgagtttcaggccagcaatattatgcactcaatcaacggctatgtgtttgatagtctccagctttctgtttgcctccatgaagtagcctattggtacatcttgtcaattggtgctcaaacagacttcctctccgtcttcttctccggctacacctttaagcacaagatggtgtatgaggacactctcacactctttccattttctggagaaaccgtgttcatgagcatggagaatccaggcctttggatcttgggttgccacaacagtgattttcgcaatcggggaatgactgctctcctcaaagtcagcagctgtgataagaacacaggcgactattacgaagattcttacgaggacataagtgcctacttgttgtccaagaataacgccattgagcccagatcattctcccagaatcctcccgtgcttaaaaggcatcagcgcgaaatcaccagaactactcttcagtctgatcaagaggagattgactatgacgacaccataagcgtggaaatgaagaaggaggatttcgatatctatgacgaagatgagaaccagtctccgcggagctttcagaagaagacgcgacactacttcattgcagcagtcgaaaggctttgggactacggtatgtcatcatcccctcatgtgttgcgcaatagagctcagagtggaagtgttccacagttcaagaaagtcgtctttcaagagtttacagatggcagcttcacacagcctctctatcggggcgagcttaacgaacatttgggactccttggtccctatatccgagccgaagtggaggacaacattatggttacctttaggaatcaagcctctcgcccctacagcttctactcctccctcatcagttatgaggaggatcagagacaaggcgctgaaccacggaagaactttgtgaaaccgaatgagacgaagacctacttctggaaagtacagcaccacatggcccccacaaaagacgaattcgattgcaaagcatgggcgtatttttcagacgttgacttggagaaagatgtacattcaggacttattggtcctttgttggtgtgtcacactaacactctcaatccagcccatggcaggcaggtgacagtccaggaattcgctcttttctttaccatctttgatgagaccaagtcctggtacttcacggaaaacatggagcgcaattgcagagccccctgtaacatacagatggaggaccctacctttaaggaaaattatcggttccacgcaatcaacggatacattatggatacactccctggccttgtgatggctcaggaccaacgaatcaggtggtacctcctcagcatgggttctaatgagaacatacactccattcacttttcaggacatgtgttcactgtccggaagaaagaagagtataagatggccctctacaatttgtatccaggcgtgtttgagaccgttgaaatgcttccctctaaagctggcatctggagagtagagtgcttgatcggagaacatcttcacgcaggtatgagcaccttgttcctcgtgtacagcaacaaatgtcagaccccacttggcatggccagtggacacattcgcgactttcagatcacagcatctggccagtatggacaatgggccccaaagttggctcgcctccattactccggtagcataaatgcgtggtccactaaagaacctttcagctggattaaggtcgatcttcttgcccccatgatcatccacggcattaagacacagggagcgaggcagaaattctcctccctctacatctcacagttcattattatgtatagtttggacggcaagaagtggcaaacttatagaggtaacagtactggaacactcatggtgttcttcggcaacgttgatagctctggcatcaaacacaacatctttaatcctcccataatagctcggtacatcagattgcatccgacccactacagcattaggagtacactccgaatggagcttatgggttgcgacttgaattcctgttcaatgccactcggaatggagtctaaagccatctctgatgcacagataaccgccagtagctactttacgaacatgtttgctacgtggtcaccctctaaggcaaggcttcatttgcaaggccggtctaatgcctggagacctcaggtgaacaacccgaaagaatggctccaggtggactttcagaagaccatgaaagtaacaggtgtcactactcagggagttaagtccttggataccagcatgtatgtgaaggagttccttatttcctcatcacaagatggccaccagtggaccctcttctttcagaatggtaaggtcaaagtgtttcagggcaatcaagacagcttcacacccgtggtgaacagtcttgatcctccactcttgacacgataccttcgaatccatccacagtcttgggttcaccagattgcattgcgcatggaagtacttggatgcgaggctcaggacctctac

SEQ ID NO: 356 - protein, 1457 aa, synthetic construct
  REGION 1..1457: note = Variant of human B-domain deleted Factor VIII
MQIELSTCFFLCLLRFCFSATRRYYLGAVELSWDYMQSDLGELPVDARFPPRVPKSFPFNTSVVYKKTLFVEFTDHLFNIAKPRPPWMGLLGPTIQAEVYDTVVITLKNMASHPVSLHAVGVSYWKASEGAEYDDQTSQREKEDDKVFPGGSHTYVWQVLKENGPMASDPLCLTYSYLSHVDLVKDLNSGLIGALLVCREGSLAKEKTQTLHKFILLFAVFDEGKSWHSETKNSLMQDRDAASARAWPKMHTVNGYVNRSLPGLIGCHRKSVYWHVIGMGTTPEVHSIFLEGHTFLVRNHRQASLEISPITFLTAQTLLMDLGQFLLFCHISSHQHDGMEAYVKVDSCPEEPQLRMKNNEEAEDYDDDLTDSEMDVVRFDDDNSPSFIQIRSVAKKHPKTWVHYIAAEEEDWDYAPLVLAPDDRSYKSQYLNNGPQRIGRKYKKVRFMAYTDETFKTREAIQHESGILGPLLYGEVGDTLLIIFKNQASRPYNIYPHGITDVRPLYSRRLPKGVKHLKDFPILPGEIFKYKWTVTVEDGPTKSDPRCLTRYYSSFVNMERDLASGLIGPLLICYKESVDQRGNQIMSDKRNVILFSVFDENRSWYLTENIQRFLPEPAGVQLEDPEFQASNIMHSINGYVFDSLQLSVCLHEVAYWYILSIGAQTDFLSVFFSGYTFKHKMVYEDTLTLFPFSGETVFMSMENPGLWILGCHNSDFRNRGMTALLKVSSCDKNTGDYYEDSYEDISAYLLSKNNAIEPRSFSQNPPVLKRHQREITRTTLQSDQEEIDYDDTISVEMKKEDFDIYDEDENQSPRSFQKKTRHYFIAAVERLWDYGMSSSPHVLRNRAQSGSVPQFKKVVFQEFTDGSFTQPLYRGELNEHLGLLGPYIRAEVEDNIMVTFRNQASRPYSFYSSLISYEEDQRQGAEPRKNFVKPNETKTYFWKVQHHMAPTKDEFDCKAWAYFSDVDLEKDVHSGLIGPLLVCHTNTLNPAHGRQVTVQEFALFFTIFDETKSWYFTENMERNCRAPCNIQMEDPTFKENYRFHAINGYIMDTLPGLVMAQDQRIRWYLLSMGSNENIHSIHFSGHVFTVRKKEEYKMALYNLYPGVFETVEMLPSKAGIWRVECLIGEHLHAGMSTLFLVYSNKCQTPLGMASGHIRDFQITASGQYGQWAPKLARLHYSGSINAWSTKEPFSWIKVDLLAPMIIHGIKTQGARQKFSSLYISQFIIMYSLDGKKWQTYRGNSTGTLMVFFGNVDSSGIKHNIFNPPIIARYIRLHPTHYSIRSTLRMELMGCDLNSCSMPLGMESKAISDAQITASSYFTNMFATWSPSKARLHLQGRSNAWRPQVNNPKEWLQVDFQKTMKVTGVTTQGVKSLDTSMYVKEFLISSSQDGHQWTLFFQNGKVKVFQGNQDSFTPVVNSLDPPLLTRYLRIHPQSWVHQIALRMEVLGCEAQDLY

SEQ ID NO: 357 - DNA, 4371 bp, synthetic construct
  misc_feature 1..4371: note = Variant of human B-domain deleted Factor VIII
  source 1..4371: mol_type = other DNA
atgcagattgaactgtctacctgcttcttcctctgtttgctgaggttctgctttagcgccactagacggtactaccttggcgctgtggagctgtcctgggactatatgcagagtgatttgggagagcttcccgtcgacgcacgatttcctcctcgcgttccaaagtcatttcccttcaacacaagcgtggtgtacaagaagacgctcttcgtcgaattcaccgatcacctgttcaatatcgccaaacccagaccaccatggatgggtcttttggggcctaccatacaagcggaggtgtatgacacagttgttatcactctcaagaacatggcttctcatccggtaagtcttcacgcagtgggcgtgtcctactggaaagcttcagaaggagccgagtatgatgatcagacatcccagagggagaaagaagacgacaaggtatttccaggtgggtctcatacctatgtgtggcaagtgctcaaagagaatggccctatggcaagcgatccgctctgtttgacttacagctacctttcacacgttgacctcgtcaaggacctcaactccgggttgattggagccttgttggtatgcagggaaggatctcttgccaaagagaagacacagaccctccacaagtttatccttctctttgctgtgttcgatgagggcaaaagttggcatagcgaaacgaagaattccctcatgcaggatcgcgacgcagccagcgccagagcttggcccaagatgcacactgtgaacggatatgtcaataggtcacttcctggcttgattgggtgtcatcggaaaagtgtctactggcacgtgatcggaatggggacaacaccagaggtccactccatatttctcgaaggccataccttccttgttcgaaaccacagacaggcatccttggagatctctcccattacctttctcactgcccaaacgctccttatggacttgggtcagttccttctcttctgccatatcagctcacaccagcatgatggtatggaagcttatgtgaaagtcgacagttgtcctgaggagccacagttgcgcatgaagaataatgaagaagccgaggattacgacgacgatctcaccgattctgagatggacgtggtgaggtttgatgacgacaactctccctccttcattcaaatccggagcgtggcgaagaaacaccccaagacttgggtccactatatagcggcggaagaggaggattgggattacgctcctcttgtattggcaccagatgaccgctcatacaaaagccagtacctcaacaacggaccgcagagaattggccggaagtataagaaagtgcgatttatggcctatacagacgaaacctttaagacaagggaggccatccagcatgagagtgggattttgggacctcttctttacggcgaagttggtgataccctcctcatcatcttcaagaatcaagcttctcgcccctataacatttacccacacgggatcactgacgttaggcctttgtatagcagaagacttcccaaaggcgtgaagcatctcaaagacttccccattttgccaggcgagatctttaagtacaaatggaccgtcacagtggaagatggaccgactaaatcagaccctcgatgccttacgcggtactattcctccttcgtgaatatggagagagatttggcaagcggactcataggaccactcctcatctgttacaaggaatctgtagaccagaggggtaaccagattatgagtgataaacgcaatgtgatcctttttagcgtcttcgacgagaaccggtcctggtacttgaccgagaatatacaaaggttccttcccaaccccgcaggcgttcagttggaagaccctgagtttcaggccagcaatattatgcactcaatcaacggctatgtgtttgatagtctccagctttctgtttgcctccatgaagtagcctattggtacatcttgtcaattggtgctcaaacagacttcctctccgtcttcttctccggctacacctttaagcacaagatggtgtatgaggacactctcacactctttccattttctggagaaaccgtgttcatgagcatggagaatccaggcctttggatcttgggttgccacaacagtgattttcgcaatcggggaatgactgctctcctcaaagtcagcagctgtgataagaacacaggcgactattacgaagattcttacgaggacataagtgcctacttgttgtccaagaataacgccattgagcccagatcattctcccagaatcctcccgtgcttaaaaggcatcagcgcgaaatcaccagaactactcttcagtctgatcaagaggagattgactatgacgacaccataagcgtggaaatgaagaaggaggatttcgatatctatgacgaagatgagaaccagtctccgcggagctttcagaagaagacgcgacactacttcattgcagcagtcgaaaggctttgggactacggtatgtcatcatcccctcatgtgttgcgcaatagagctcagagtggaagtgttccacagttcaagaaagtcgtctttcaagagtttacagatggcagcttcacacagcctctctatcggggcgagcttaacgaacatttgggactccttggtccctatatccgagccgaagtggaggacaacattatggttacctttaggaatcaagcctctcgcccctacagcttctactcctccctcatcagttatgaggaggatcagagacaaggcgctgaaccacggaagaactttgtgaaaccgaatgagacgaagacctacttctggaaagtacagcaccacatggcccccacaaaagacgaattcgattgcaaagcatgggcgtatttttcagacgttgacttggagaaagatgtacattcaggacttattggtcctttgttggtgtgtcacactaacactctcaatccagcccatggcaggcaggtgacagtccaggaattcgctcttttctttaccatctttgatgagaccaagtcctggtacttcacggaaaacatggagcgcaattgcagagccccctgtaacatacagatggaggaccctacctttaaggaaaatcatcggttccacgcaatcaacggatacattatggatacactccctggccttgtgatggctcaggaccaacgaatcaggtggtacctcctcagcatgggttctaatgagaacatacactccattcacttttcaggacatgtgttcactgtccggaagaaagaagagtataagatggccctctacaatttgtatccaggcgtgtttgagaccgttgaaatgcttccctctaaagctggcatctggagagtagagtgcttgatcggagaacatcttcacgcaggtatgagcaccttgttcctcgtgtacagcaacaaatgtcagaccccacttggcatggccagtggacacattcgcgactttcagatcacagcatctggccagtatggacaatgggccccaaagttggctcgcctccattactccggtagcataaatgcgtggtccactaaagaacctttcagctggattaaggtcgatcttcttgcccccatgatcatccacggcattaagacacagggagcgaggcagaaattctcctccctctacatctcacagttcattattatgtatagtttggacggcaagaagtggcaaacttatagaggtaacagtactggaacactcatggtgttcttcggcaacgttgatagctctggcatcaaacacaacatctttaatcctcccataatagctcggtacatcagattgcatccgacccactacagcattaggagtacactccgaatggagcttatgggttgcgacttgaattcctgttcaatgccactcggaatggagtctaaagccatctctgatgcacagataaccgccagtagctactttacgaacatgtttgctacgtggtcaccctctaaggcaaggcttcatttgcaaggccggtctaatgcctggagacctcaggtgaacaacccgaaagaatggctccaggtggactttcagaagaccatgaaagtaacaggtgtcactactcagggagttaagtccttggataccagcatgtatgtgaaggagttccttatttcctcatcacaagatggccaccagtggaccctcttctttcagaatggtaaggtcaaagtgtttcagggcaatcaagacagcttcacacccgtggtgaacagtcttgatcctccactcttgacacgataccttcgaatccatccacagtcttgggttcaccagattgcattgcgcatggaagtacttggatgcgaggctcaggacctctac

SEQ ID NO: 358 - protein, 1457 aa, synthetic construct
  REGION 1..1457: note = Variant of human B-domain deleted Factor VIII
MQIELSTCFFLCLLRFCFSATRRYYLGAVELSWDYMQSDLGELPVDARFPPRVPKSFPFNTSVVYKKTLFVEFTDHLFNIAKPRPPWMGLLGPTIQAEVYDTVVITLKNMASHPVSLHAVGVSYWKASEGAEYDDQTSQREKEDDKVFPGGSHTYVWQVLKENGPMASDPLCLTYSYLSHVDLVKDLNSGLIGALLVCREGSLAKEKTQTLHKFILLFAVFDEGKSWHSETKNSLMQDRDAASARAWPKMHTVNGYVNRSLPGLIGCHRKSVYWHVIGMGTTPEVHSIFLEGHTFLVRNHRQASLEISPITFLTAQTLLMDLGQFLLFCHISSHQHDGMEAYVKVDSCPEEPQLRMKNNEEAEDYDDDLTDSEMDVVRFDDDNSPSFIQIRSVAKKHPKTWVHYIAAEEEDWDYAPLVLAPDDRSYKSQYLNNGPQRIGRKYKKVRFMAYTDETFKTREAIQHESGILGPLLYGEVGDTLLIIFKNQASRPYNIYPHGITDVRPLYSRRLPKGVKHLKDFPILPGEIFKYKWTVTVEDGPTKSDPRCLTRYYSSFVNMERDLASGLIGPLLICYKESVDQRGNQIMSDKRNVILFSVFDENRSWYLTENIQRFLPNPAGVQLEDPEFQASNIMHSINGYVFDSLQLSVCLHEVAYWYILSIGAQTDFLSVFFSGYTFKHKMVYEDTLTLFPFSGETVFMSMENPGLWILGCHNSDFRNRGMTALLKVSSCDKNTGDYYEDSYEDISAYLLSKNNAIEPRSFSQNPPVLKRHQREITRTTLQSDQEEIDYDDTISVEMKKEDFDIYDEDENQSPRSFQKKTRHYFIAAVERLWDYGMSSSPHVLRNRAQSGSVPQFKKVVFQEFTDGSFTQPLYRGELNEHLGLLGPYIRAEVEDNIMVTFRNQASRPYSFYSSLISYEEDQRQGAEPRKNFVKPNETKTYFWKVQHHMAPTKDEFDCKAWAYFSDVDLEKDVHSGLIGPLLVCHTNTLNPAHGRQVTVQEFALFFTIFDETKSWYFTENMERNCRAPCNIQMEDPTFKENHRFHAINGYIMDTLPGLVMAQDQRIRWYLLSMGSNENIHSIHFSGHVFTVRKKEEYKMALYNLYPGVFETVEMLPSKAGIWRVECLIGEHLHAGMSTLFLVYSNKCQTPLGMASGHIRDFQITASGQYGQWAPKLARLHYSGSINAWSTKEPFSWIKVDLLAPMIIHGIKTQGARQKFSSLYISQFIIMYSLDGKKWQTYRGNSTGTLMVFFGNVDSSGIKHNIFNPPIIARYIRLHPTHYSIRSTLRMELMGCDLNSCSMPLGMESKAISDAQITASSYFTNMFATWSPSKARLHLQGRSNAWRPQVNNPKEWLQVDFQKTMKVTGVTTQGVKSLDTSMYVKEFLISSSQDGHQWTLFFQNGKVKVFQGNQDSFTPVVNSLDPPLLTRYLRIHPQSWVHQIALRMEVLGCEAQDLY

SEQ ID NO: 359 - DNA, 4371 bp, synthetic construct
  misc_feature 1..4371: note = Variant of human B-domain deleted Factor VIII
  source 1..4371: mol_type = other DNA
atgcagattgaactgtctacctgcttcttcctctgtttgctgaggttctgctttagcgccactagacggtactaccttggcgctgtggagctgtcctgggactatatgcagagtgatttgggagagcttcccgtcgacgcacgatttcctcctcgcgttccaaagtcatttcccttcaacacaagcgtggtgtacaagaagacgctcttcgtcgaattcaccgatcacctgttcaatatcgccaaacccagaccaccatggatgggtcttttggggcctaccatacaagcggaggtgtatgacacagttgttatcactctcaagaacatggcttctcatccggtaagtcttcacgcagtgggcgtgtcctactggaaagcttcagaaggagccgagtatgatgatcagacatcccagagggagaaagaagacgacaaggtatttccaggtgggtctcatacctatgtgtggcaagtgctcaaagagaatggccctatggcaagcgatccgctctgtttgacttacagctacctttcacacgttgacctcgtcaaggacctcaactccgggttgattggagccttgttggtatgcagggaaggatctcttgccaaagagaagacacagaccctccacaagtttatccttctctttgctgtgttcgatgagggcaaaagttggcatagcgaaacgaagaattccctcatgcaggatcgcgacgcagccagcgccagagcttggcccaagatgcacactgtgaacggatatgtcaataggtcacttcctggcttgattgggtgtcatcggaaaagtgtctactggcacgtgatcggaatggggacaacaccagaggtccactccatatttctcgaaggccataccttccttgttcgaaaccacagacaggcatccttggagatctctcccattacctttctcactgcccaaacgctccttatggacttgggtcagttccttctcttctgccatatcagctcacaccagcatgatggtatggaagcttatgtgaaagtcgacagttgtcctgaggagccacagttgcgcatgaagaataatgaagaagccgaggattacgacgacgatctcaccgattctgagatggacgtggtgaggtttgatgacgacaactctccctcctcgattcaaatccggagcgtggcgaagaaacaccccaagacttgggtccactatatagcggcggaagaggaggattgggattacgctcctcttgtattggcaccagatgaccgctcatacaaaagccagtacctcaacaacggaccgcagagaattggccggaagtataagaaagtgcgatttatggcctatacagacgaaacctttaagacaagggaggccatccagcatgagagtgggattttgggacctcttctttacggcgaagttggtgataccctcctcatcatcttcaagaatcaagcttctcgcccctataacatttacccacacgggatcactgacgttaggcctttgtatagcagaagacttcccaaaggcgtgaagcatctcaaagacttccccattttgccaggcgagatctttaagtacaaatggaccgtcacagtggaagatggaccgactaaatcagaccctcgatgccttacgcggtactattcctccttcgtgaatatggagagagatttggcaagcggactcataggaccactcctcatctgttacaaggaatctgtagaccagaggggtaaccagattatgagtgataaacgcaatgtgatcctttttagcgtcttcgacgagaaccggtcctggtacttgaccgagaatatacaaaggttccttcccaaccccgcaggcgttcagttggaagaccctgagtttcaggccagcaatattatgcactcaatcaacggctatgtgtttgatagtctccagctttctgtttgcctccatgaagtagcctattggtacatcttgtcaattggtgctcaaacagacttcctctccgtcttcttctccggctacacctttaagcacaagatggtgtatgaggacactctcacactctttccattttctggagaaaccgtgttcatgagcatggagaatccaggcctttggatcttgggttgccacaacagtgattttcgcaatcggggaatgactgctctcctcaaagtcagcagctgtgataagaacacaggcgactattacgaagattcttacgaggacataagtgcctacttgttgtccaagaataacgccattgagcccagatcattctcccagaatcctcccgtgcttaaaaggcatcagcgcgaaatcaccagaactactcttcagtctgatcaagaggagattgactatgacgacaccataagcgtggaaatgaagaaggaggatttcgatatctatgacgaagatgagaaccagtctccgcggagctttcagaagaagacgcgacactacttcattgcagcagtcgaaaggctttgggactacggtatgtcatcatcccctcatgtgttgcgcaatagagctcagagtggaagtgttccacagttcaagaaagtcgtctttcaagagtttacagatggcagcttcacacagcctctctatcggggcgagcttaacgaacatttgggactccttggtccctatatccgagccgaagtggaggacaacattatggttacctttaggaatcaagcctctcgcccctacagcttctactcctccctcatcagttatgaggaggatcagagacaaggcgctgaaccacggaagaactttgtgaaaccgaatgagacgaagacctacttctggaaagtacagcaccacatggcccccacaaaagacgaattcgattgcaaagcatgggcgtatttttcagacgttgacttggagaaagatgtacattcaggacttattggtcctttgttggtgtgtcacactaacactctcaatccagcccatggcaggcaggtgacagtccaggaattcgctcttttctttaccatctttgatgagaccaagtcctggtacttcacggaaaacatggagcgcaattgcagagccccctgtaacatacagatggaggaccctacctttaaggaaaattatcggttccacgcaatcaacggatacattatggatacactccctggccttgtgatggctcaggaccaacgaatcaggtggtacctcctcagcatgggttctaatgagaacatacactccattcacttttcaggacatgtgttcactgtccggaagaaagaagagtataagatggccctctacaatttgtatccaggcgtgtttgagaccgttgaaatgcttccctctaaagctggcatctggagagtagagtgcttgatcggagaacatcttcacgcaggtatgagcaccttgttcctcgtgtacagcaacaaatgtcagaccccacttggcatggccagtggacacattcgcgactttcagatcacagcatctggccagtatggacaatgggccccaaagttggctcgcctccattactccggtagcataaatgcgtggtccactaaagaacctttcagctggattaaggtcgatcttcttgcccccatgatcatccacggcattaagacacagggagcgaggcagaaattctcctccctctacatctcacagttcattattatgtatagtttggacggcaagaagtggcaaacttatagaggtaacagtactggaacactcatggtgttcttcggcaacgttgatagctctggcatcaaacacaacatctttaatcctcccataatagctcggtacatcagattgcatccgacccactacagcattaggagtacactccgaatggagcttatgggttgcgacttgaattcctgttcaatgccactcggaatggagtctaaagccatctctgatgcacagataaccgccagtagctactttacgaacatgtttgctacgtggtcaccctctaaggcaaggcttcatttgcaaggccggtctaatgcctggagacctcaggtgaacaacccgaaagaatggctccaggtggactttcagaagaccatgaaagtaacaggtgtcactactcagggagttaagtccttggataccagcatgtatgtgaaggagttccttatttcctcatcacaagatggccaccagtggaccctcttctttcagaatggtaaggtcaaagtgtttcagggcaatcaagacagcttcacacccgtggtgaacagtcttgatcctccactcttgacacgataccttcgaatccatccacagtcttgggttcaccagattgcattgcgcatggaagtacttggatgcgaggctcaggacctctac

SEQ ID NO: 360 - protein, 1457 aa, synthetic construct
  REGION 1..1457: note = Variant of human B-domain deleted Factor VIII
MQIELSTCFFLCLLRFCFSATRRYYLGAVELSWDYMQSDLGELPVDARFPPRVPKSFPFNTSVVYKKTLFVEFTDHLFNIAKPRPPWMGLLGPTIQAEVYDTVVITLKNMASHPVSLHAVGVSYWKASEGAEYDDQTSQREKEDDKVFPGGSHTYVWQVLKENGPMASDPLCLTYSYLSHVDLVKDLNSGLIGALLVCREGSLAKEKTQTLHKFILLFAVFDEGKSWHSETKNSLMQDRDAASARAWPKMHTVNGYVNRSLPGLIGCHRKSVYWHVIGMGTTPEVHSIFLEGHTFLVRNHRQASLEISPITFLTAQTLLMDLGQFLLFCHISSHQHDGMEAYVKVDSCPEEPQLRMKNNEEAEDYDDDLTDSEMDVVRFDDDNSPSSIQIRSVAKKHPKTWVHYIAAEEEDWDYAPLVLAPDDRSYKSQYLNNGPQRIGRKYKKVRFMAYTDETFKTREAIQHESGILGPLLYGEVGDTLLIIFKNQASRPYNIYPHGITDVRPLYSRRLPKGVKHLKDFPILPGEIFKYKWTVTVEDGPTKSDPRCLTRYYSSFVNMERDLASGLIGPLLICYKESVDQRGNQIMSDKRNVILFSVFDENRSWYLTENIQRFLPNPAGVQLEDPEFQASNIMHSINGYVFDSLQLSVCLHEVAYWYILSIGAQTDFLSVFFSGYTFKHKMVYEDTLTLFPFSGETVFMSMENPGLWILGCHNSDFRNRGMTALLKVSSCDKNTGDYYEDSYEDISAYLLSKNNAIEPRSFSQNPPVLKRHQREITRTTLQSDQEEIDYDDTISVEMKKEDFDIYDEDENQSPRSFQKKTRHYFIAAVERLWDYGMSSSPHVLRNRAQSGSVPQFKKVVFQEFTDGSFTQPLYRGELNEHLGLLGPYIRAEVEDNIMVTFRNQASRPYSFYSSLISYEEDQRQGAEPRKNFVKPNETKTYFWKVQHHMAPTKDEFDCKAWAYFSDVDLEKDVHSGLIGPLLVCHTNTLNPAHGRQVTVQEFALFFTIFDETKSWYFTENMERNCRAPCNIQMEDPTFKENYRFHAINGYIMDTLPGLVMAQDQRIRWYLLSMGSNENIHSIHFSGHVFTVRKKEEYKMALYNLYPGVFETVEMLPSKAGIWRVECLIGEHLHAGMSTLFLVYSNKCQTPLGMASGHIRDFQITASGQYGQWAPKLARLHYSGSINAWSTKEPFSWIKVDLLAPMIIHGIKTQGARQKFSSLYISQFIIMYSLDGKKWQTYRGNSTGTLMVFFGNVDSSGIKHNIFNPPIIARYIRLHPTHYSIRSTLRMELMGCDLNSCSMPLGMESKAISDAQITASSYFTNMFATWSPSKARLHLQGRSNAWRPQVNNPKEWLQVDFQKTMKVTGVTTQGVKSLDTSMYVKEFLISSSQDGHQWTLFFQNGKVKVFQGNQDSFTPVVNSLDPPLLTRYLRIHPQSWVHQIALRMEVLGCEAQDLY

SEQ ID NO: 361 - DNA, 4371 bp, synthetic construct
  misc_feature 1..4371: note = Variant of human B-domain deleted Factor VIII
  source 1..4371: mol_type = other DNA
atgcagattgaactgtctacctgcttcttcctctgtttgctgaggttctgctttagcgccactagacggtactaccttggcgctgtggagctgtcctgggactatatgcagagtgatttgggagagcttcccgtcgacgcacgatttcctcctcgcgttccaaagtcatttcccttcaacacaagcgtggtgtacaagaagacgctcttcgtcgaattcaccgatcacctgttcaatatcgccaaacccagaccaccatggatgggtcttttggggcctaccatacaagcggaggtgtatgacacagttgttatcactctcaagaacatggcttctcatccggtaagtcttcacgcagtgggcgtgtcctactggaaagcttcagaaggagccgagtatgatgatcagacatcccagagggagaaagaagacgacaaggtatttccaggtgggtctcatacctatgtgtggcaagtgctcaaagagaatggccctatggcaagcgatccgctctgtttgacttacagctacctttcacacgttgacctcgtcaaggacctcaactccgggttgattggagccttgttggtatgcagggaaggatctcttgccaaagagaagacacagaccctccacaagtttatccttctctttgctgtgttcgatgagggcaaaagttggcatagcgaaacgaagaattccctcatgcaggatcgcgacgcagccagcgccagagcttggcccaagatgcacactgtgaacggatatgtcaataggtcacttcctggcttgattgggtgtcatcggaaaagtgtctactggcacgtgatcggaatggggacaacaccagaggtccactccatatttctcgaaggccataccttccttgttcgaaaccacagacaggcatccttggagatctctcccattacctttctcactgcccaaacgctccttatggacttgggtcagttccttctcttctgccatatcagctcacaccagcatgatggtatggaagcttatgtgaaagtcgacagttgtcctgaggagccacagttgcgcatgaagaataatgaagaagccgaggattacgacgacgatctcaccgattctgagatggacgtggtgaggtttgatgacgacaactctccctccttcattcaaatccggagcgtggcgaagaaacaccccaagacttgggtccactatatagcggcggaagaggaggattgggattacgctcctcttgtattggcaccagatgaccgctcatacaaaagccagtacctcaacaacggaccgcagagaattggccggaagtataagaaagtgcgatttatggcctatacagacgaaacctttaagacaagggaggccatccagcatgagagtgggattttgggacctcttctttacggcgaagttggtgataccctcctcatcatcttcaagaatcaagctcggcgcccctataacatttacccacacgggatcactgacgttaggcctttgtatagcagaagacttcccaaaggcgtgaagcatctcaaagacttccccattttgccaggcgagatctttaagtacaaatggaccgtcacagtggaagatggaccgactaaatcagaccctcgatgccttacgcggtactattcctccttcgtgaatatggagagagatttggcaagcggactcataggaccactcctcatctgttacaaggaatctgtagaccagaggggtaaccagattatgagtgataaacgcaatgtgatcctttttagcgtcttcgacgagaaccggtcctggtacttgaccgagaatatacaaaggttccttcccaaccccgcaggcgttcagttggaagaccctgagtttcaggccagcaatattatgcactcaatcaacggctatgtgtttgatagtctccagctttctgtttgcctccatgaagtagcctattggtacatcttgtcaattggtgctcaaacagacttcctctccgtcttcttctccggctacacctttaagcacaagatggtgtatgaggacactctcacactctttccattttctggagaaaccgtgttcatgagcatggagaatccaggcctttggatcttgggttgccacaacagtgattttcgcaatcggggaatgactgctctcctcaaagtcagcagctgtgataagaacacaggcgactattacgaagattcttacgaggacataagtgcctacttgttgtccaagaataacgccattgagcccagatcattctcccagaatcctcccgtgcttaaaaggcatcagcgcgaaatcaccagaactactcttcagtctgatcaagaggagattgactatgacgacaccataagcgtggaaatgaagaaggaggatttcgatatctatgacgaagatgagaaccagtctccgcggagctttcagaagaagacgcgacactacttcattgcagcagtcgaaaggctttgggactacggtatgtcatcatcccctcatgtgttgcgcaatagagctcagagtggaagtgttccacagttcaagaaagtcgtctttcaagagtttacagatggcagcttcacacagcctctctatcggggcgagcttaacgaacatttgggactccttggtccctatatccgagccgaagtggaggacaacattatggttacctttaggaatcaagcctctcgcccctacagcttctactcctccctcatcagttatgaggaggatcagagacaaggcgctgaaccacggaagaactttgtgaaaccgaatgagacgaagacctacttctggaaagtacagcaccacatggcccccacaaaagacgaattcgattgcaaagcatgggcgtatttttcagacgttgacttggagaaagatgtacattcaggacttattggtcctttgttggtgtgtcacactaacactctcaatccagcccatggcaggcaggtgacagtccaggaattcgctcttttctttaccatctttgatgagaccaagtcctggtacttcacggaaaacatggagcgcaattgcagagccccctgtaacatacagatggaggaccctacctttaaggaaaattatcggttccacgcaatcaacggatacattatggatacactccctggccttgtgatggctcaggaccaacgaatcaggtggtacctcctcagcatgggttctaatgagaacatacactccattcacttttcaggacatgtgttcactgtccggaagaaagaagagtataagatggccctctacaatttgtatccaggcgtgtttgagaccgttgaaatgcttccctctaaagctggcatctggagagtagagtgcttgatcggagaacatcttcacgcaggtatgagcaccttgttcctcgtgtacagcaacaaatgtcagaccccacttggcatggccagtggacacattcgcgactttcagatcacagcatctggccagtatggacaatgggccccaaagttggctcgcctccattactccggtagcataaatgcgtggtccactaaagaacctttcagctggattaaggtcgatcttcttgcccccatgatcatccacggcattaagacacagggagcgaggcagaaattctcctccctctacatctcacagttcattattatgtatagtttggacggcaagaagtggcaaacttatagaggtaacagtactggaacactcatggtgttcttcggcaacgttgatagctctggcatcaaacacaacatctttaatcctcccataatagctcggtacatcagattgcatccgacccactacagcattaggagtacactccgaatggagcttatgggttgcgacttgaattcctgttcaatgccactcggaatggagtctaaagccatctctgatgcacagataaccgccagtagctactttacgaacatgtttgctacgtggtcaccctctaaggcaaggcttcatttgcaaggccggtctaatgcctggagacctcaggtgaacaacccgaaagaatggctccaggtggactttcagaagaccatgaaagtaacaggtgtcactactcagggagttaagtccttggataccagcatgtatgtgaaggagttccttatttcctcatcacaagatggccaccagtggaccctcttctttcagaatggtaaggtcaaagtgtttcagggcaatcaagacagcttcacacccgtggtgaacagtcttgatcctccactcttgacacgataccttcgaatccatccacagtcttgggttcaccagattgcattgcgcatggaagtacttggatgcgaggctcaggacctctac

SEQ ID NO: 362 - protein, 1457 aa, synthetic construct
  REGION 1..1457: note = Variant of human B-domain deleted Factor VIII
MQIELSTCFFLCLLRFCFSATRRYYLGAVELSWDYMQSDLGELPVDARFPPRVPKSFPFNTSVVYKKTLFVEFTDHLFNIAKPRPPWMGLLGPTIQAEVYDTVVITLKNMASHPVSLHAVGVSYWKASEGAEYDDQTSQREKEDDKVFPGGSHTYVWQVLKENGPMASDPLCLTYSYLSHVDLVKDLNSGLIGALLVCREGSLAKEKTQTLHKFILLFAVFDEGKSWHSETKNSLMQDRDAASARAWPKMHTVNGYVNRSLPGLIGCHRKSVYWHVIGMGTTPEVHSIFLEGHTFLVRNHRQASLEISPITFLTAQTLLMDLGQFLLFCHISSHQHDGMEAYVKVDSCPEEPQLRMKNNEEAEDYDDDLTDSEMDVVRFDDDNSPSFIQIRSVAKKHPKTWVHYIAAEEEDWDYAPLVLAPDDRSYKSQYLNNGPQRIGRKYKKVRFMAYTDETFKTREAIQHESGILGPLLYGEVGDTLLIIFKNQARRPYNIYPHGITDVRPLYSRRLPKGVKHLKDFPILPGEIFKYKWTVTVEDGPTKSDPRCLTRYYSSFVNMERDLASGLIGPLLICYKESVDQRGNQIMSDKRNVILFSVFDENRSWYLTENIQRFLPNPAGVQLEDPEFQASNIMHSINGYVFDSLQLSVCLHEVAYWYILSIGAQTDFLSVFFSGYTFKHKMVYEDTLTLFPFSGETVFMSMENPGLWILGCHNSDFRNRGMTALLKVSSCDKNTGDYYEDSYEDISAYLLSKNNAIEPRSFSQNPPVLKRHQREITRTTLQSDQEEIDYDDTISVEMKKEDFDIYDEDENQSPRSFQKKTRHYFIAAVERLWDYGMSSSPHVLRNRAQSGSVPQFKKVVFQEFTDGSFTQPLYRGELNEHLGLLGPYIRAEVEDNIMVTFRNQASRPYSFYSSLISYEEDQRQGAEPRKNFVKPNETKTYFWKVQHHMAPTKDEFDCKAWAYFSDVDLEKDVHSGLIGPLLVCHTNTLNPAHGRQVTVQEFALFFTIFDETKSWYFTENMERNCRAPCNIQMEDPTFKENYRFHAINGYIMDTLPGLVMAQDQRIRWYLLSMGSNENIHSIHFSGHVFTVRKKEEYKMALYNLYPGVFETVEMLPSKAGIWRVECLIGEHLHAGMSTLFLVYSNKCQTPLGMASGHIRDFQITASGQYGQWAPKLARLHYSGSINAWSTKEPFSWIKVDLLAPMIIHGIKTQGARQKFSSLYISQFIIMYSLDGKKWQTYRGNSTGTLMVFFGNVDSSGIKHNIFNPPIIARYIRLHPTHYSIRSTLRMELMGCDLNSCSMPLGMESKAISDAQITASSYFTNMFATWSPSKARLHLQGRSNAWRPQVNNPKEWLQVDFQKTMKVTGVTTQGVKSLDTSMYVKEFLISSSQDGHQWTLFFQNGKVKVFQGNQDSFTPVVNSLDPPLLTRYLRIHPQSWVHQIALRMEVLGCEAQDLY

SEQ ID NO: 363 - DNA, 4371 bp, synthetic construct
  misc_feature 1..4371: note = Variant of human B-domain deleted Factor VIII
  source 1..4371: mol_type = other DNA
atgcagattgaactgtctacctgcttcttcctctgtttgctgaggttctgctttagcgccactagacggtactaccttggcgctgtggagctgtcctgggactatatgcagagtgatttgggagagcttcccgtcgacgcacgatttcctcctcgcgttccaaagtcatttcccttcaacacaagcgtggtgtacaagaagacgctcttcgtcgaattcaccgatcacctgttcaatatcgccaaacccagaccaccatggatgggtcttttggggcctaccatacaagcggaggtgtatgacacagttgttatcactctcaagaacatggcttctcatccggtaagtcttcacgcagtgggcgtgtcctactggaaagcttcagaaggagccgagtatgatgatcagacatcccagagggagaaagaagacgacaaggtatttccaggtgggtctcatacctatgtgtggcaagtgctcaaagagaatggccctatggcaagcgatccgctctgtttgacttacagctacctttcacacgttgacctcgtcaaggacctcaactccgggttgattggagccttgttggtatgcagggaaggatctcttgccaaagagaagacacagaccctccacaagtttatccttctctttgctgtgttcgatgagggcaaaagttggcatagcgaaacgaagaattccctcatgcaggatcgcgacgcagccagcgccagagcttggcccaagatgcacactgtgaacggatatgtcaataggtcacttcctggcttgattgggtgtcatcggaaaagtgtctactggcacgtgatcggaatggggacaacaccagaggtccactccatatttctcgaaggccataccttccttgttcgaaaccacagacaggcatccttggagatctctcccattacctttctcactgcccaaacgctccttatggacttgggtcagttccttctcttctgccatatcagctcacaccagcatgatggtatggaagcttatgtgaaagtcgacagttgtcctgaggagccacagttgcgcatgaagaataatgaagaagccgaggattacgacgacgatctcaccgattctgagatggacgtggtgaggtttgatgacgacaactctccctccttcattcaaatccggagcgtggcgaagaaacaccccaagacttgggtccactatatagcggcggaagaggaggattgggattacgctcctcttgtattggcaccagatgaccgctcatacaaaagccagtacctcaacaacggaccgcagagaattggccggaagtataagaaagtgcgatttatggcctatacagacgaaacctttaagacaagggaggccatccagcatgagagtgggattttgggacctcttctttacggcgaagttggtgataccctcctcatcatcttcaagaatcaagcttctcgcccctataacatttacccacacgggatcactgacgttaggcctttgtatagcagaagacttcccaaaggcgtgaagcatctcaaagacttccccattttgccaggcgagatctttaagtacaaatggaccgtcacagtggaagatggaccgactaaatcagaccctcgatgccttacgcggtactattcctccttcgtgaatatggagagagatttggcaagcggactcataggaccactcctcatctgttacaaggaatctgtagaccagaggggtaaccagattatgagtgataaacgcaatgtgatcctttttagcgtcttcgacgagaaccggtcctggtacttgaccgagaatatacaaaggttccttcccaaccccgcaggcgttatgttggaagaccctgagtttcaggccagcaatattatgcactcaatcaacggctatgtgtttgatagtctccagctttctgtttgcctccatgaagtagcctattggtacatcttgtcaattggtgctcaaacagacttcctctccgtcttcttctccggctacacctttaagcacaagatggtgtatgaggacactctcacactctttccattttctggagaaaccgtgttcatgagcatggagaatccaggcctttggatcttgggttgccacaacagtgattttcgcaatcggggaatgactgctctcctcaaagtcagcagctgtgataagaacacaggcgactattacgaagattcttacgaggacataagtgcctacttgttgtccaagaataacgccattgagcccagatcattctcccagaatcctcccgtgcttaaaaggcatcagcgcgaaatcaccagaactactcttcagtctgatcaagaggagattgactatgacgacaccataagcgtggaaatgaagaaggaggatttcgatatctatgacgaagatgagaaccagtctccgcggagctttcagaagaagacgcgacactacttcattgcagcagtcgaaaggctttgggactacggtatgtcatcatcccctcatgtgttgcgcaatagagctcagagtggaagtgttccacagttcaagaaagtcgtctttcaagagtttacagatggcagcttcacacagcctctctatcggggcgagcttaacgaacatttgggactccttggtccctatatccgagccgaagtggaggacaacattatggttacctttaggaatcaagcctctcgcccctacagcttctactcctccctcatcagttatgaggaggatcagagacaaggcgctgaaccacggaagaactttgtgaaaccgaatgagacgaagacctacttctggaaagtacagcaccacatggcccccacaaaagacgaattcgattgcaaagcatgggcgtatttttcagacgttgacttggagaaagatgtacattcaggacttattggtcctttgttggtgtgtcacactaacactctcaatccagcccatggcaggcaggtgacagtccaggaattcgctcttttctttaccatctttgatgagaccaagtcctggtacttcacggaaaacatggagcgcaattgcagagccccctgtaacatacagatggaggaccctacctttaaggaaaattatcggttccacgcaatcaacggatacattatggatacactccctggccttgtgatggctcaggaccaacgaatcaggtggtacctcctcagcatgggttctaatgagaacatacactccattcacttttcaggacatgtgttcactgtccggaagaaagaagagtataagatggccctctacaatttgtatccaggcgtgtttgagaccgttgaaatgcttccctctaaagctggcatctggagagtagagtgcttgatcggagaacatcttcacgcaggtatgagcaccttgttcctcgtgtacagcaacaaatgtcagaccccacttggcatggccagtggacacattcgcgactttcagatcacagcatctggccagtatggacaatgggccccaaagttggctcgcctccattactccggtagcataaatgcgtggtccactaaagaacctttcagctggattaaggtcgatcttcttgcccccatgatcatccacggcattaagacacagggagcgaggcagaaattctcctccctctacatctcacagttcattattatgtatagtttggacggcaagaagtggcaaacttatagaggtaacagtactggaacactcatggtgttcttcggcaacgttgatagctctggcatcaaacacaacatctttaatcctcccataatagctcggtacatcagattgcatccgacccactacagcattaggagtacactccgaatggagcttatgggttgcgacttgaattcctgttcaatgccactcggaatggagtctaaagccatctctgatgcacagataaccgccagtagctactttacgaacatgtttgctacgtggtcaccctctaaggcaaggcttcatttgcaaggccggtctaatgcctggagacctcaggtgaacaacccgaaagaatggctccaggtggactttcagaagaccatgaaagtaacaggtgtcactactcagggagttaagtccttggataccagcatgtatgtgaaggagttccttatttcctcatcacaagatggccaccagtggaccctcttctttcagaatggtaaggtcaaagtgtttcagggcaatcaagacagcttcacacccgtggtgaacagtcttgatcctccactcttgacacgataccttcgaatccatccacagtcttgggttcaccagattgcattgcgcatggaagtacttggatgcgaggctcaggacctctac

SEQ ID NO: 364 - protein, 1457 aa, synthetic construct
  REGION 1..1457: note = Variant of human B-domain deleted Factor VIII
MQIELSTCFFLCLLRFCFSATRRYYLGAVELSWDYMQSDLGELPVDARFPPRVPKSFPFNTSVVYKKTLFVEFTDHLFNIAKPRPPWMGLLGPTIQAEVYDTVVITLKNMASHPVSLHAVGVSYWKASEGAEYDDQTSQREKEDDKVFPGGSHTYVWQVLKENGPMASDPLCLTYSYLSHVDLVKDLNSGLIGALLVCREGSLAKEKTQTLHKFILLFAVFDEGKSWHSETKNSLMQDRDAASARAWPKMHTVNGYVNRSLPGLIGCHRKSVYWHVIGMGTTPEVHSIFLEGHTFLVRNHRQASLEISPITFLTAQTLLMDLGQFLLFCHISSHQHDGMEAYVKVDSCPEEPQLRMKNNEEAEDYDDDLTDSEMDVVRFDDDNSPSFIQIRSVAKKHPKTWVHYIAAEEEDWDYAPLVLAPDDRSYKSQYLNNGPQRIGRKYKKVRFMAYTDETFKTREAIQHESGILGPLLYGEVGDTLLIIFKNQASRPYNIYPHGITDVRPLYSRRLPKGVKHLKDFPILPGEIFKYKWTVTVEDGPTKSDPRCLTRYYSSFVNMERDLASGLIGPLLICYKESVDQRGNQIMSDKRNVILFSVFDENRSWYLTENIQRFLPNPAGVMLEDPEFQASNIMHSINGYVFDSLQLSVCLHEVAYWYILSIGAQTDFLSVFFSGYTFKHKMVYEDTLTLFPFSGETVFMSMENPGLWILGCHNSDFRNRGMTALLKVSSCDKNTGDYYEDSYEDISAYLLSKNNAIEPRSFSQNPPVLKRHQREITRTTLQSDQEEIDYDDTISVEMKKEDFDIYDEDENQSPRSFQKKTRHYFIAAVERLWDYGMSSSPHVLRNRAQSGSVPQFKKVVFQEFTDGSFTQPLYRGELNEHLGLLGPYIRAEVEDNIMVTFRNQASRPYSFYSSLISYEEDQRQGAEPRKNFVKPNETKTYFWKVQHHMAPTKDEFDCKAWAYFSDVDLEKDVHSGLIGPLLVCHTNTLNPAHGRQVTVQEFALFFTIFDETKSWYFTENMERNCRAPCNIQMEDPTFKENYRFHAINGYIMDTLPGLVMAQDQRIRWYLLSMGSNENIHSIHFSGHVFTVRKKEEYKMALYNLYPGVFETVEMLPSKAGIWRVECLIGEHLHAGMSTLFLVYSNKCQTPLGMASGHIRDFQITASGQYGQWAPKLARLHYSGSINAWSTKEPFSWIKVDLLAPMIIHGIKTQGARQKFSSLYISQFIIMYSLDGKKWQTYRGNSTGTLMVFFGNVDSSGIKHNIFNPPIIARYIRLHPTHYSIRSTLRMELMGCDLNSCSMPLGMESKAISDAQITASSYFTNMFATWSPSKARLHLQGRSNAWRPQVNNPKEWLQVDFQKTMKVTGVTTQGVKSLDTSMYVKEFLISSSQDGHQWTLFFQNGKVKVFQGNQDSFTPVVNSLDPPLLTRYLRIHPQSWVHQIALRMEVLGCEAQDLY

SEQ ID NO: 365 - DNA, 4371 bp, synthetic construct
  misc_feature 1..4371: note = Variant of human B-domain deleted Factor VIII
  source 1..4371: mol_type = other DNA
atgcagattgaactgtctacctgcttcttcctctgtttgctgaggttctgctttagcgccactagacggtactaccttggcgctgtggagctgtcctgggactatatgcagagtgatttgggagagcttcccgtcgacgcacgatttcctcctcgcgttccaaagtcatttcccttcaacacaagcgtggtgtacaagaagacgctcttcgtcgaattcaccgatcacctgttcaatatcgccaaacccagaccaccatggatgggtcttttggggcctaccatacaagcggaggtgtatgacacagttgttatcactctcaagaacatggcttctcatccggtaagtcttcacgcagtgggcgtgtcctactggaaagcttcagaaggagccgagtatgatgatcagacatcccagagggagaaagaagacgacaaggtatttccaggtgggtctcatacctatgtgtggcaagtgctcaaagagaatggccctatggcaagcgatccgctctgtttgacttacagctacctttcacacgttgacctcgtcaaggacctcaactccgggttgattggagccttgttggtatgcagggaaggatctcttgccaaagagaagacacagaccctccacaagtttatccttctctttgctgtgttcgatgagggcaaaagttggcatagcgaaacgaagaattccctcatgcaggatcgcgacgcagccagcgccagagcttggcccaagatgcacactgtgaacggatatgtcaataggtcacttcctggcttgattgggtgtcatcggaaaagtgtctactggcacgtgatcggaatggggacaacaccagaggtccactccatatttctcgaaggccataccttccttgttcgaaaccacagacaggcatccttggagatctctcccattacctttctcactgcccaaacgctccttatggacttgggtcagttccttctcttctgccatatcagctcacaccagcatgatggtatggaagcttatgtgaaagtcgacagttgtcctgaggagccacagttgcgcatgaagaataatgaagaagccgaggattacgacgacgatctcaccgattctgagatggacgtggtgaggtttgatgacgacaactctccctccttcattcaaatccggagcgtggcgaagaaacaccccaagacttgggtccactatatagcggcggaagaggaggattgggattacgctcctcttgtattggcaccagatgaccgctcatacaaaagccagtacctcaacaacggaccgcagagaattggccggaagtataagaaagtgcgatttatggcctatacagacgaaacctttaagacaagggaggccatccagcatgagagtgggattttgggacctcttctttacggcgaagttggtgataccctcctcatcatcttcaagaatcaagctcagcgcccctataacatttacccacacgggatcactgacgttaggcctttgtatagcagaagacttcccaaaggcgtgaagcatctcaaagacttccccattttgccaggcgagatctttaagtacaaatggaccgtcacagtggaagatggaccgactaaatcagaccctcgatgccttacgcggtactattcctccttcgtgaatatggagagagatttggcaagcggactcataggaccactcctcatctgttacaaggaatctgtagaccagaggggtaaccagattatgagtgataaacgcaatgtgatcctttttagcgtcttcgacgagaaccggtcctggtacttgaccgagaatatacaaaggttccttcccaaccccgcaggcgttcagttggaagaccctgagtttcaggccagcaatattatgcactcaatcaacggctatgtgtttgatagtctccagctttctgtttgcctccatgaagtagcctattggtacatcttgtcaattggtgctcaaacagacttcctctccgtcttcttctccggctacacctttaagcacaagatggtgtatgaggacactctcacactctttccattttctggagaaaccgtgttcatgagcatggagaatccaggcctttggatcttgggttgccacaacagtgattttcgcaatcggggaatgactgctctcctcaaagtcagcagctgtgataagaacacaggcgactattacgaagattcttacgaggacataagtgcctacttgttgtccaagaataacgccattgagcccagatcattctcccagaatcctcccgtgcttaaaaggcatcagcgcgaaatcaccagaactactcttcagtctgatcaagaggagattgactatgacgacaccataagcgtggaaatgaagaaggaggatttcgatatctatgacgaagatgagaaccagtctccgcggagctttcagaagaagacgcgacactacttcattgcagcagtcgaaaggctttgggactacggtatgtcatcatcccctcatgtgttgcgcaatagagctcagagtggaagtgttccacagttcaagaaagtcgtctttcaagagtttacagatggcagcttcacacagcctctctatcggggcgagcttaacgaacatttgggactccttggtccctatatccgagccgaagtggaggacaacattatggttacctttaggaatcaagcctctcgcccctacagcttctactcctccctcatcagttatgaggaggatcagagacaaggcgctgaaccacggaagaactttgtgaaaccgaatgagacgaagacctacttctggaaagtacagcaccacatggcccccacaaaagacgaattcgattgcaaagcatgggcgtatttttcagacgttgacttggagaaagatgtacattcaggacttattggtcctttgttggtgtgtcacactaacactctcaatccagcccatggcaggcaggtgacagtccaggaattcgctcttttctttaccatctttgatgagaccaagtcctggtacttcacggaaaacatggagcgcaattgcagagccccctgtaacatacagatggaggaccctacctttaaggaaaattatcggttccacgcaatcaacggatacattatggatacactccctggccttgtgatggctcaggaccaacgaatcaggtggtacctcctcagcatgggttctaatgagaacatacactccattcacttttcaggacatgtgttcactgtccggaagaaagaagagtataagatggccctctacaatttgtatccaggcgtgtttgagaccgttgaaatgcttccctctaaagctggcatctggagagtagagtgcttgatcggagaacatcttcacgcaggtatgagcaccttgttcctcgtgtacagcaacaaatgtcagaccccacttggcatggccagtggacacattcgcgactttcagatcacagcatctggccagtatggacaatgggccccaaagttggctcgcctccattactccggtagcataaatgcgtggtccactaaagaacctttcagctggattaaggtcgatcttcttgcccccatgatcatccacggcattaagacacagggagcgaggcagaaattctcctccctctacatctcacagttcattattatgtatagtttggacggcaagaagtggcaaacttatagaggtaacagtactggaacactcatggtgttcttcggcaacgttgatagctctggcatcaaacacaacatctttaatcctcccataatagctcggtacatcagattgcatccgacccactacagcattaggagtacactccgaatggagcttatgggttgcgacttgaattcctgttcaatgccactcggaatggagtctaaagccatctctgatgcacagataaccgccagtagctactttacgaacatgtttgctacgtggtcaccctctaaggcaaggcttcatttgcaaggccggtctaatgcctggagacctcaggtgaacaacccgaaagaatggctccaggtggactttcagaagaccatgaaagtaacaggtgtcactactcagggagttaagtccttggataccagcatgtatgtgaaggagttccttatttcctcatcacaagatggccaccagtggaccctcttctttcagaatggtaaggtcaaagtgtttcagggcaatcaagacagcttcacacccgtggtgaacagtcttgatcctccactcttgacacgataccttcgaatccatccacagtcttgggttcaccagattgcattgcgcatggaagtacttggatgcgaggctcaggacctctac

SEQ ID NO: 366 - protein, 1457 aa, synthetic construct
  REGION 1..1457: note = Variant of human B-domain deleted Factor VIII
MQIELSTCFFLCLLRFCFSATRRYYLGAVELSWDYMQSDLGELPVDARFPPRVPKSFPFNTSVVYKKTLFVEFTDHLFNIAKPRPPWMGLLGPTIQAEVYDTVVITLKNMASHPVSLHAVGVSYWKASEGAEYDDQTSQREKEDDKVFPGGSHTYVWQVLKENGPMASDPLCLTYSYLSHVDLVKDLNSGLIGALLVCREGSLAKEKTQTLHKFILLFAVFDEGKSWHSETKNSLMQDRDAASARAWPKMHTVNGYVNRSLPGLIGCHRKSVYWHVIGMGTTPEVHSIFLEGHTFLVRNHRQASLEISPITFLTAQTLLMDLGQFLLFCHISSHQHDGMEAYVKVDSCPEEPQLRMKNNEEAEDYDDDLTDSEMDVVRFDDDNSPSFIQIRSVAKKHPKTWVHYIAAEEEDWDYAPLVLAPDDRSYKSQYLNNGPQRIGRKYKKVRFMAYTDETFKTREAIQHESGILGPLLYGEVGDTLLIIFKNQAQRPYNIYPHGITDVRPLYSRRLPKGVKHLKDFPILPGEIFKYKWTVTVEDGPTKSDPRCLTRYYSSFVNMERDLASGLIGPLLICYKESVDQRGNQIMSDKRNVILFSVFDENRSWYLTENIQRFLPNPAGVQLEDPEFQASNIMHSINGYVFDSLQLSVCLHEVAYWYILSIGAQTDFLSVFFSGYTFKHKMVYEDTLTLFPFSGETVFMSMENPGLWILGCHNSDFRNRGMTALLKVSSCDKNTGDYYEDSYEDISAYLLSKNNAIEPRSFSQNPPVLKRHQREITRTTLQSDQEEIDYDDTISVEMKKEDFDIYDEDENQSPRSFQKKTRHYFIAAVERLWDYGMSSSPHVLRNRAQSGSVPQFKKVVFQEFTDGSFTQPLYRGELNEHLGLLGPYIRAEVEDNIMVTFRNQASRPYSFYSSLISYEEDQRQGAEPRKNFVKPNETKTYFWKVQHHMAPTKDEFDCKAWAYFSDVDLEKDVHSGLIGPLLVCHTNTLNPAHGRQVTVQEFALFFTIFDETKSWYFTENMERNCRAPCNIQMEDPTFKENYRFHAINGYIMDTLPGLVMAQDQRIRWYLLSMGSNENIHSIHFSGHVFTVRKKEEYKMALYNLYPGVFETVEMLPSKAGIWRVECLIGEHLHAGMSTLFLVYSNKCQTPLGMASGHIRDFQITASGQYGQWAPKLARLHYSGSINAWSTKEPFSWIKVDLLAPMIIHGIKTQGARQKFSSLYISQFIIMYSLDGKKWQTYRGNSTGTLMVFFGNVDSSGIKHNIFNPPIIARYIRLHPTHYSIRSTLRMELMGCDLNSCSMPLGMESKAISDAQITASSYFTNMFATWSPSKARLHLQGRSNAWRPQVNNPKEWLQVDFQKTMKVTGVTTQGVKSLDTSMYVKEFLISSSQDGHQWTLFFQNGKVKVFQGNQDSFTPVVNSLDPPLLTRYLRIHPQSWVHQIALRMEVLGCEAQDLY

SEQ ID NO: 367 - DNA, 4371 bp, synthetic construct
  misc_feature 1..4371: note = Variant of human B-domain deleted Factor VIII
  source 1..4371: mol_type = other DNA
atgcagattgaactgtctacctgcttcttcctctgtttgctgaggttctgctttagcgccactagacggtactaccttggcgctgtggagctgtcctgggactatatgcagagtgatttgggagagcttcccgtcgacgcacgatttcctcctcgcgttccaaagtcatttcccttcaacacaagcgtggtgtacaagaagacgctcttcgtcgaattcaccgatcacctgttcaatatcgccaaacccagaccaccatggatgggtcttttggggcctaccatacaagcggaggtgtatgacacagttgttatcactctcaagaacatggcttctcatccggtaagtcttcacgcagtgggcgtgtcctactggaaagcttcagaaggagccgagtatgatgatcagacatcccagagggagaaagaagacgacaaggtatttccaggtgggtctcatacctatgtgtggcaagtgctcaaagagaatggccctatggcaagcgatccgctctgtttgacttacagctacctttcacacgttgacctcgtcaaggacctcaactccgggttgattggagccttgttggtatgcagggaaggatctcttgccaaagagaagacacagaccctccacaagtttatccttctctttgctgtgttcgatgagggcaaaagttggcatagcgaaacgaagaattccctcatgcaggatcgcgacgcagccagcgccagagcttggcccaagatgcacactgtgaacggatatgtcaataggtcacttcctggcttgattgggtgtcatcggaaaagtgtctactggcacgtgatcggaatggggacaacaccagaggtccactccatatttctcgaaggccataccttccttgttcgaaaccacagacaggcatccttggagatctctcccattacctttctcactgcccaaacgctccttatggacttgggtcagttccttctcttctgccatatcagctcacaccagcatgatggtatggaagcttatgtgaaagtcgacagttgtcctgaggagccacagttgcgcatgaagaataatgaagaagccgaggattacgacgacgatctcaccgattctgagatggacgtggtgaggtttgatgacgacaactctccctccttcattcaaatccggagcgtggcgaagaaacaccccaagacttgggtccactatatagcggcggaagaggaggattgggattacgctcctcttgtattggcaccagatgaccgctcatacaaaagccagtacctcaacaacggaccgcagagaattggccggaagtataagaaagtgcgatttatggcctatacagacgaaacctttaagacaagggaggccatccagcatgagagtgggattttgggacctcttctttacggcgaagttggtgataccctcctcatcatcttcaagaatcaagcttctcgcccctataacatttacccacacgggatcactgacgttaggcctttgtatagcagaagacttcccaaaggcgtgaagcatctcaaagacttccccattttgccaggcgagatctttaagtacaaatggaccgtcacagtggaagatggaccgactaaatcagaccctcgatgccttacgcggtactattcctccttcgtgaatatggagagagatttggcaagcggactcataggaccactcctcatctgttacaaggaatctgtagaccagaggggtaaccagattatgagtgataaacgcaatgtgatcctttttagcgtcttcgacgagaaccggtcctggtacttgaccgagaatatacaaaggttccttcccaaccccgcaggcgttcagttggaagaccctgagtttcaggccagcaatattatgcactcaatcaacggctatgtgtttgatagtctccagctttctgtttgcctccatgaagtagcctattggtacatcttgtcaattggtgctcaaacagacttcctctccgtcttcttctccggctacacctttaagcacaagatggtgtatgaggacactctcacactctttccattttctggagaaaccgtgttcatgagcatggagaatccaggcctttggatcttgggttgccacaacagtgattttcgcaatcggggaatgactgctctcctcaaagtcagcagctgtgataagaacacaggcgactattacgaagattcttacgaggacataagtgcctacttggggtccaagaataacgccattgagcccagatcattctcccagaatcctcccgtgcttaaaaggcatcagcgcgaaatcaccagaactactcttcagtctgatcaagaggagattgactatgacgacaccataagcgtggaaatgaagaaggaggatttcgatatctatgacgaagatgagaaccagtctccgcggagctttcagaagaagacgcgacactacttcattgcagcagtcgaaaggctttgggactacggtatgtcatcatcccctcatgtgttgcgcaatagagctcagagtggaagtgttccacagttcaagaaagtcgtctttcaagagtttacagatggcagcttcacacagcctctctatcggggcgagcttaacgaacatttgggactccttggtccctatatccgagccgaagtggaggacaacattatggttacctttaggaatcaagcctctcgcccctacagcttctactcctccctcatcagttatgaggaggatcagagacaaggcgctgaaccacggaagaactttgtgaaaccgaatgagacgaagacctacttctggaaagtacagcaccacatggcccccacaaaagacgaattcgattgcaaagcatgggcgtatttttcagacgttgacttggagaaagatgtacattcaggacttattggtcctttgttggtgtgtcacactaacactctcaatccagcccatggcaggcaggtgacagtccaggaattcgctcttttctttaccatctttgatgagaccaagtcctggtacttcacggaaaacatggagcgcaattgcagagccccctgtaacatacagatggaggaccctacctttaaggaaaattatcggttccacgcaatcaacggatacattatggatacactccctggccttgtgatggctcaggaccaacgaatcaggtggtacctcctcagcatgggttctaatgagaacatacactccattcacttttcaggacatgtgttcactgtccggaagaaagaagagtataagatggccctctacaatttgtatccaggcgtgtttgagaccgttgaaatgcttccctctaaagctggcatctggagagtagagtgcttgatcggagaacatcttcacgcaggtatgagcaccttgttcctcgtgtacagcaacaaatgtcagaccccacttggcatggccagtggacacattcgcgactttcagatcacagcatctggccagtatggacaatgggccccaaagttggctcgcctccattactccggtagcataaatgcgtggtccactaaagaacctttcagctggattaaggtcgatcttcttgcccccatgatcatccacggcattaagacacagggagcgaggcagaaattctcctccctctacatctcacagttcattattatgtatagtttggacggcaagaagtggcaaacttatagaggtaacagtactggaacactcatggtgttcttcggcaacgttgatagctctggcatcaaacacaacatctttaatcctcccataatagctcggtacatcagattgcatccgacccactacagcattaggagtacactccgaatggagcttatgggttgcgacttgaattcctgttcaatgccactcggaatggagtctaaagccatctctgatgcacagataaccgccagtagctactttacgaacatgtttgctacgtggtcaccctctaaggcaaggcttcatttgcaaggccggtctaatgcctggagacctcaggtgaacaacccgaaagaatggctccaggtggactttcagaagaccatgaaagtaacaggtgtcactactcagggagttaagtccttggataccagcatgtatgtgaaggagttccttatttcctcatcacaagatggccaccagtggaccctcttctttcagaatggtaaggtcaaagtgtttcagggcaatcaagacagcttcacacccgtggtgaacagtcttgatcctccactcttgacacgataccttcgaatccatccacagtcttgggttcaccagattgcattgcgcatggaagtacttggatgcgaggctcaggacctctac

SEQ ID NO: 368 - protein, 1457 aa, synthetic construct
  REGION 1..1457: note = Variant of human B-domain deleted Factor VIII
MQIELSTCFFLCLLRFCFSATRRYYLGAVELSWDYMQSDLGELPVDARFPPRVPKSFPFNTSVVYKKTLFVEFTDHLFNIAKPRPPWMGLLGPTIQAEVYDTVVITLKNMASHPVSLHAVGVSYWKASEGAEYDDQTSQREKEDDKVFPGGSHTYVWQVLKENGPMASDPLCLTYSYLSHVDLVKDLNSGLIGALLVCREGSLAKEKTQTLHKFILLFAVFDEGKSWHSETKNSLMQDRDAASARAWPKMHTVNGYVNRSLPGLIGCHRKSVYWHVIGMGTTPEVHSIFLEGHTFLVRNHRQASLEISPITFLTAQTLLMDLGQFLLFCHISSHQHDGMEAYVKVDSCPEEPQLRMKNNEEAEDYDDDLTDSEMDVVRFDDDNSPSFIQIRSVAKKHPKTWVHYIAAEEEDWDYAPLVLAPDDRSYKSQYLNNGPQRIGRKYKKVRFMAYTDETFKTREAIQHESGILGPLLYGEVGDTLLIIFKNQASRPYNIYPHGITDVRPLYSRRLPKGVKHLKDFPILPGEIFKYKWTVTVEDGPTKSDPRCLTRYYSSFVNMERDLASGLIGPLLICYKESVDQRGNQIMSDKRNVILFSVFDENRSWYLTENIQRFLPNPAGVQLEDPEFQASNIMHSINGYVFDSLQLSVCLHEVAYWYILSIGAQTDFLSVFFSGYTFKHKMVYEDTLTLFPFSGETVFMSMENPGLWILGCHNSDFRNRGMTALLKVSSCDKNTGDYYEDSYEDISAYLGSKNNAIEPRSFSQNPPVLKRHQREITRTTLQSDQEEIDYDDTISVEMKKEDFDIYDEDENQSPRSFQKKTRHYFIAAVERLWDYGMSSSPHVLRNRAQSGSVPQFKKVVFQEFTDGSFTQPLYRGELNEHLGLLGPYIRAEVEDNIMVTFRNQASRPYSFYSSLISYEEDQRQGAEPRKNFVKPNETKTYFWKVQHHMAPTKDEFDCKAWAYFSDVDLEKDVHSGLIGPLLVCHTNTLNPAHGRQVTVQEFALFFTIFDETKSWYFTENMERNCRAPCNIQMEDPTFKENYRFHAINGYIMDTLPGLVMAQDQRIRWYLLSMGSNENIHSIHFSGHVFTVRKKEEYKMALYNLYPGVFETVEMLPSKAGIWRVECLIGEHLHAGMSTLFLVYSNKCQTPLGMASGHIRDFQITASGQYGQWAPKLARLHYSGSINAWSTKEPFSWIKVDLLAPMIIHGIKTQGARQKFSSLYISQFIIMYSLDGKKWQTYRGNSTGTLMVFFGNVDSSGIKHNIFNPPIIARYIRLHPTHYSIRSTLRMELMGCDLNSCSMPLGMESKAISDAQITASSYFTNMFATWSPSKARLHLQGRSNAWRPQVNNPKEWLQVDFQKTMKVTGVTTQGVKSLDTSMYVKEFLISSSQDGHQWTLFFQNGKVKVFQGNQDSFTPVVNSLDPPLLTRYLRIHPQSWVHQIALRMEVLGCEAQDLY

SEQ ID NO: 369 - DNA, 4371 bp, synthetic construct
  misc_feature 1..4371: note = Variant of human B-domain deleted Factor VIII
  source 1..4371: mol_type = other DNA
atgcagattgaactgtctacctgcttcttcctctgtttgctgaggttctgctttagcgccactagacggtactaccttggcgctgtggagctgtcctgggactatatgcagagtgatttgggagagcttcccgtcgacgcacgatttcctcctcgcgttccaaagtcatttcccttcaacacaagcgtggtgtacaagaagacgctcttcgtcgaattcaccgatcacctgttcaatatcgccaaacccagaccaccatggatgggtcttttggggcctaccatacaagcggaggtgtatgacacagttgttatcactctcaagaacatggcttctcatccggtaagtcttcacgcagtgggcgtgtcctactggaaagcttcagaaggagccgagtatgatgatcagacatcccagagggagaaagaagacgacaaggtatttccaggtgggtctcatacctatgtgtggcaagtgctcaaagagaatggccctatggcaagcgatccgctctgtttgacttacagctacctttcacacgttgacctcgtcaaggacctcaactccgggttgattggagccttgttggtatgcagggaaggatctcttgccaaagagaagacacagaccctccacaagtttatccttctctttgctgtgttcgatgagggcaaaagttggcatagcgaaacgaagaattccctcatgcaggatcgcgacgcagccagcgccagagcttggcccaagatgcacactgtgaacggatatgtcaataggtcacttcctggcttgattgggtgtcatcggaaaagtgtctactggcacgtgatcggaatggggacaacaccagaggtccactccatatttctcgaaggccataccttccttgttcgaaaccacagacaggcatccttggagatctctcccattacctttctcactgcccaaacgctccttatggacttgggtcagttccttctcttctgccatatcagctcacaccagcatgatggtatggaagcttatgtgaaagtcgacagttgtcctgaggagccacagttgcgcatgaagaataatgaagaagccgaggattacgacgacgatctcaccgattctgagatggacgtggtgaggtttgatgacgacaactctccctccttcattcaaatccggagcgtggcgaagaaacaccccaagacttgggtccactatatagcggcggaagaggaggattgggattacgctcctcttgtattggcaccagatgaccgctcatacaaaagccagtacctcaacaacggaccgcagagaattggccggaagtataagaaagtgcgatttatggcctatacagacgaaacctttaagacaagggaggccatccagcatgagagtgggattttgggacctcttctttacggcgaagttggtgataccctcctcatcatcttcaagaatcaagcttctcgcccctataacatttacccacacgggatcactgacgttaggcctttgtatagcagaagacttcccaaaggcgtgaagcatctcaaagacttccccattttgccaggcgagatctttaagtacaaatggaccgtcacagtggaagatggaccgactaaatcagaccctcgatgccttacgcggtactattcctccttcgtgaatatggagagagatttggcaagcggactcataggaccactcctcatctgttacaaggaatctgtagaccagaggggtaaccagattatgagtgataaacgcaatgtgatcctttttagcgtcttcgacgagaaccggtcctggtacttgaccgagaatatacaaaggttccttcccaaccccgcaggcgttcagttggaagaccctgagtttcaggccagcaatattatgcactcaatcaacggctatgtgtttgatagtctccagctttctgtttgcctccatgaagtagcctattggtacatcttgtcaattggtgctcaaacagacttcctctccgtcttcttctccggctacacctttaagcacaagatggtgtatgaggacactctcacactctttccattttctggagaaaccgtgttcatgagcatggagaatccaggcctttggatcttgggttgccacaacagtgattttcgcaatcggggaatgactgctctcctcaaagtcagcagctgtgataagaacacaggcgactattacgaagattcttacgaggacataagtgcctacttgttgtccaagaataacgccattgagcccagatcattctcccagaatcctcccgtgcttaaaaggcatcagcgcgaaatcaccagaactactcttcagtctgatcaagaggagattgactatgacgacaccataagcgtggaaatgaagaaggaggatttcgatatctatgacgaagatgagaaccagtctccgcggagctttcagaagaagacgcgacactacttcattgcagcagtcgaaaggctttgggactacggtatgtcatcatcccctcatgtgttgcgcaatagagctcagagtggaagtgttccacagttcaagaaagtcgtctttcaagagtttacagatggcagcttcacacagcctctctatcggggcgagcttaacgaacatttgggactccttggtccctatatccgagccgaagtggaggacaacattatggttacctttaggaatcaagcctctcgcccctacagcttctactcctccctcatcagttatgaggaggatcagagacaaggcgctgaaccacggaagaactttgtgaaaccgaatgagacgaagacctacttctggaaagtacagcaccacatggcccccacaaaagacgaattcgattgcaaagcatgggcgtatttttcagacgttgacttggagaaagatgtacattcaggacttattggtcctttgttggtgtgtcacactaacactctcaatccagcccatggcaggcaggtgacagtccaggaattcgctcttttctttaccatctttgatgagaccaagtcctggtacttcacggaaaacatggagcgcaattgcagagccccctgtaacatacagatggaggaccctacctttaaggaaaattatcggttccacgcaatcaacggatacattatggatacactccctggccttgtgatggctcaggaccaacgaatcaggtggtacctcctcagcatgggttctaatgagaacatacactccattcacttttcaggacatgtgttcactgtccggaagaaagaagagtataagatggccctctacaatttgtatccaggcgtgtttgagaccgttgaaatgcttccctctaaagctggcatctggagagtagagtgcttgatcggagaacatcttcacgcaggtatgagcaccttgttcctcgtgtacagcaacaaatgtcagaccccacttggcatggccagtggacacattcgcgactttcagatcacagcatctggccagtatggacaatgggccccaaagttggctcgcctccattactccggtagcataaatgcgtggtccactaaagaacctttcagctggattaaggtcgatcttcttgcccccatgatcatccacggcattaagacacagggagcgaggcagaaattctcctccctctacatcccgcagttcattattatgtatagtttggacggcaagaagtggcaaacttatagaggtaacagtactggaacactcatggtgttcttcggcaacgttgatagctctggcatcaaacacaacatctttaatcctcccataatagctcggtacatcagattgcatccgacccactacagcattaggagtacactccgaatggagcttatgggttgcgacttgaattcctgttcaatgccactcggaatggagtctaaagccatctctgatgcacagataaccgccagtagctactttacgaacatgtttgctacgtggtcaccctctaaggcaaggcttcatttgcaaggccggtctaatgcctggagacctcaggtgaacaacccgaaagaatggctccaggtggactttcagaagaccatgaaagtaacaggtgtcactactcagggagttaagtccttggataccagcatgtatgtgaaggagttccttatttcctcatcacaagatggccaccagtggaccctcttctttcagaatggtaaggtcaaagtgtttcagggcaatcaagacagcttcacacccgtggtgaacagtcttgatcctccactcttgacacgataccttcgaatccatccacagtcttgggttcaccagattgcattgcgcatggaagtacttggatgcgaggctcaggacctctac

SEQ ID NO: 370 - protein, 1457 aa, synthetic construct
  REGION 1..1457: note = Variant of human B-domain deleted Factor VIII
MQIELSTCFFLCLLRFCFSATRRYYLGAVELSWDYMQSDLGELPVDARFPPRVPKSFPFNTSVVYKKTLFVEFTDHLFNIAKPRPPWMGLLGPTIQAEVYDTVVITLKNMASHPVSLHAVGVSYWKASEGAEYDDQTSQREKEDDKVFPGGSHTYVWQVLKENGPMASDPLCLTYSYLSHVDLVKDLNSGLIGALLVCREGSLAKEKTQTLHKFILLFAVFDEGKSWHSETKNSLMQDRDAASARAWPKMHTVNGYVNRSLPGLIGCHRKSVYWHVIGMGTTPEVHSIFLEGHTFLVRNHRQASLEISPITFLTAQTLLMDLGQFLLFCHISSHQHDGMEAYVKVDSCPEEPQLRMKNNEEAEDYDDDLTDSEMDVVRFDDDNSPSFIQIRSVAKKHPKTWVHYIAAEEEDWDYAPLVLAPDDRSYKSQYLNNGPQRIGRKYKKVRFMAYTDETFKTREAIQHESGILGPLLYGEVGDTLLIIFKNQASRPYNIYPHGITDVRPLYSRRLPKGVKHLKDFPILPGEIFKYKWTVTVEDGPTKSDPRCLTRYYSSFVNMERDLASGLIGPLLICYKESVDQRGNQIMSDKRNVILFSVFDENRSWYLTENIQRFLPNPAGVQLEDPEFQASNIMHSINGYVFDSLQLSVCLHEVAYWYILSIGAQTDFLSVFFSGYTFKHKMVYEDTLTLFPFSGETVFMSMENPGLWILGCHNSDFRNRGMTALLKVSSCDKNTGDYYEDSYEDISAYLLSKNNAIEPRSFSQNPPVLKRHQREITRTTLQSDQEEIDYDDTISVEMKKEDFDIYDEDENQSPRSFQKKTRHYFIAAVERLWDYGMSSSPHVLRNRAQSGSVPQFKKVVFQEFTDGSFTQPLYRGELNEHLGLLGPYIRAEVEDNIMVTFRNQASRPYSFYSSLISYEEDQRQGAEPRKNFVKPNETKTYFWKVQHHMAPTKDEFDCKAWAYFSDVDLEKDVHSGLIGPLLVCHTNTLNPAHGRQVTVQEFALFFTIFDETKSWYFTENMERNCRAPCNIQMEDPTFKENYRFHAINGYIMDTLPGLVMAQDQRIRWYLLSMGSNENIHSIHFSGHVFTVRKKEEYKMALYNLYPGVFETVEMLPSKAGIWRVECLIGEHLHAGMSTLFLVYSNKCQTPLGMASGHIRDFQITASGQYGQWAPKLARLHYSGSINAWSTKEPFSWIKVDLLAPMIIHGIKTQGARQKFSSLYIPQFIIMYSLDGKKWQTYRGNSTGTLMVFFGNVDSSGIKHNIFNPPIIARYIRLHPTHYSIRSTLRMELMGCDLNSCSMPLGMESKAISDAQITASSYFTNMFATWSPSKARLHLQGRSNAWRPQVNNPKEWLQVDFQKTMKVTGVTTQGVKSLDTSMYVKEFLISSSQDGHQWTLFFQNGKVKVFQGNQDSFTPVVNSLDPPLLTRYLRIHPQSWVHQIALRMEVLGCEAQDLY

SEQ ID NO: 371 - DNA, 4371 bp, synthetic construct
  misc_feature 1..4371: note = Variant of human B-domain deleted Factor VIII
  source 1..4371: mol_type = other DNA
atgcagattgaactgtctacctgcttcttcctctgtttgctgaggttctgctttagcgccactagacggtactaccttggcgctgtggagctgtcctgggactatatgcagagtgatttgggagagcttcccgtcgacgcacgatttcctcctcgcgttccaaagtcatttcccttcaacacaagcgtggtgtacaagaagacgctcttcgtcgaattcaccgatcacctgttcaatatcgccaaacccagaccaccatggatgggtcttttggggcctaccatacaagcggaggtgtatgacacagttgttatcactctcaagaacatggcttctcatccggtaagtcttcacgcagtgggcgtgtcctactggaaagcttcagaaggagccgagtatgatgatcagacatcccagagggagaaagaagacgacaaggtatttccaggtgggtctcatacctatgtgtggcaagtgctcaaagagaatggccctatggcaagcgatccgctctgtttgacttacagctacctttcacacgttgacctcgtcaaggacctcaactccgggttgattggagccttgttggtatgcagggaaggatctcttgccaaagagaagacacagaccctccacaagtttatccttctctttgctgtgttcgatgagggcaaaagttggcatagcgaaacgaagaattccctcatgcaggatcgcgacgcagccagcgccagagcttggcccaagatgcacactgtgaacggatatgtcaataggtcacttcctggcttgattgggtgtcatcggaaaagtgtctactggcacgtgatcggaatggggacaacaccagaggtccactccatatttctcgaaggccataccttccttgttcgaaaccacagacaggcatccttggagatctctcccattacctttctcactgcccaaacgctccttatggacttgggtcagttccttctcttctgccatatcagctcacaccagcatgatggtatggaagcttatgtgaaagtcgacagttgtcctgaggagccacagttgcgcatgaagaataatgaagaagccgaggattacgacgacgatctcaccgattctgagatggacgtggtgaggtttgatgacgacaactctccctccttcattcaaatccggagcgtggcgaagaaacaccccaagacttgggtccactatatagcggcggaagaggaggattgggattacgctcctcttgtattggcaccagatgaccgctcatacaaaagccagtacctcaacaacggaccgcagagaattggccggaagtataagaaagtgcgatttatggcctatacagacgaaacctttaagacaagggaggccatccagcatgagagtgggattttgggacctcttctttacggcgaagttggtgataccctcctcatcatcttcaagaatcaagcttctcgcccctataacatttacccacacgggatcactgacgttaggcctttgtatagcagaagacttcccaaaggcgtgaagcatctcaaagacttccccattttgccaggcgagatctttaagtacaaatggaccgtcacagtggaagatggaccgactaaatcagaccctcgatgccttacgcggtactattcctccttcgtgaatatggagagagatttggcaagcggactcataggaccactcctcatctgttacaaggaatctgtagaccagaggggtaaccagattatgagtgataaacgcaatgtgatcctttttagcgtcttcgacgagaaccggtcctggtacttgaccgagaatatacaaaggttccttcccaacccctgtggcgttcagttggaagaccctgagtttcaggccagcaatattatgcactcaatcaacggctatgtgtttgatagtctccagctttctgtttgcctccatgaagtagcctattggtacatcttgtcaattggtgctcaaacagacttcctctccgtcttcttctccggctacacctttaagcacaagatggtgtatgaggacactctcacactctttccattttctggagaaaccgtgttcatgagcatggagaatccaggcctttggatcttgggttgccacaacagtgattttcgcaatcggggaatgactgctctcctcaaagtcagcagctgtgataagaacacaggcgactattacgaagattcttacgaggacataagtgcctacttgttgtccaagaataacgccattgagcccagatcattctcccagaatcctcccgtgcttaaaaggcatcagcgcgaaatcaccagaactactcttcagtctgatcaagaggagattgactatgacgacaccataagcgtggaaatgaagaaggaggatttcgatatctatgacgaagatgagaaccagtctccgcggagctttcagaagaagacgcgacactacttcattgcagcagtcgaaaggctttgggactacggtatgtcatcatcccctcatgtgttgcgcaatagagctcagagtggaagtgttccacagttcaagaaagtcgtctttcaagagtttacagatggcagcttcacacagcctctctatcggggcgagcttaacgaacatttgggactccttggtccctatatccgagccgaagtggaggacaacattatggttacctttaggaatcaagcctctcgcccctacagcttctactcctccctcatcagttatgaggaggatcagagacaaggcgctgaaccacggaagaactttgtgaaaccgaatgagacgaagacctacttctggaaagtacagcaccacatggcccccacaaaagacgaattcgattgcaaagcatgggcgtatttttcagacgttgacttggagaaagatgtacattcaggacttattggtcctttgttggtgtgtcacactaacactctcaatccagcccatggcaggcaggtgacagtccaggaattcgctcttttctttaccatctttgatgagaccaagtcctggtacttcacggaaaacatggagcgcaattgcagagccccctgtaacatacagatggaggaccctacctttaaggaaaattatcggttccacgcaatcaacggatacattatggatacactccctggccttgtgatggctcaggaccaacgaatcaggtggtacctcctcagcatgggttctaatgagaacatacactccattcacttttcaggacatgtgttcactgtccggaagaaagaagagtataagatggccctctacaatttgtatccaggcgtgtttgagaccgttgaaatgcttccctctaaagctggcatctggagagtagagtgcttgatcggagaacatcttcacgcaggtatgagcaccttgttcctcgtgtacagcaacaaatgtcagaccccacttggcatggccagtggacacattcgcgactttcagatcacagcatctggccagtatggacaatgggccccaaagttggctcgcctccattactccggtagcataaatgcgtggtccactaaagaacctttcagctggattaaggtcgatcttcttgcccccatgatcatccacggcattaagacacagggagcgaggcagaaattctcctccctctacatctcacagttcattattatgtatagtttggacggcaagaagtggcaaacttatagaggtaacagtactggaacactcatggtgttcttcggcaacgttgatagctctggcatcaaacacaacatctttaatcctcccataatagctcggtacatcagattgcatccgacccactacagcattaggagtacactccgaatggagcttatgggttgcgacttgaattcctgttcaatgccactcggaatggagtctaaagccatctctgatgcacagataaccgccagtagctactttacgaacatgtttgctacgtggtcaccctctaaggcaaggcttcatttgcaaggccggtctaatgcctggagacctcaggtgaacaacccgaaagaatggctccaggtggactttcagaagaccatgaaagtaacaggtgtcactactcagggagttaagtccttggataccagcatgtatgtgaaggagttccttatttcctcatcacaagatggccaccagtggaccctcttctttcagaatggtaaggtcaaagtgtttcagggcaatcaagacagcttcacacccgtggtgaacagtcttgatcctccactcttgacacgataccttcgaatccatccacagtcttgggttcaccagattgcattgcgcatggaagtacttggatgcgaggctcaggacctctac

SEQ ID NO: 372 - protein, 1457 aa, synthetic construct
  REGION 1..1457: note = Variant of human B-domain deleted Factor VIII
MQIELSTCFFLCLLRFCFSATRRYYLGAVELSWDYMQSDLGELPVDARFPPRVPKSFPFNTSVVYKKTLFVEFTDHLFNIAKPRPPWMGLLGPTIQAEVYDTVVITLKNMASHPVSLHAVGVSYWKASEGAEYDDQTSQREKEDDKVFPGGSHTYVWQVLKENGPMASDPLCLTYSYLSHVDLVKDLNSGLIGALLVCREGSLAKEKTQTLHKFILLFAVFDEGKSWHSETKNSLMQDRDAASARAWPKMHTVNGYVNRSLPGLIGCHRKSVYWHVIGMGTTPEVHSIFLEGHTFLVRNHRQASLEISPITFLTAQTLLMDLGQFLLFCHISSHQHDGMEAYVKVDSCPEEPQLRMKNNEEAEDYDDDLTDSEMDVVRFDDDNSPSFIQIRSVAKKHPKTWVHYIAAEEEDWDYAPLVLAPDDRSYKSQYLNNGPQRIGRKYKKVRFMAYTDETFKTREAIQHESGILGPLLYGEVGDTLLIIFKNQASRPYNIYPHGITDVRPLYSRRLPKGVKHLKDFPILPGEIFKYKWTVTVEDGPTKSDPRCLTRYYSSFVNMERDLASGLIGPLLICYKESVDQRGNQIMSDKRNVILFSVFDENRSWYLTENIQRFLPNPCGVQLEDPEFQASNIMHSINGYVFDSLQLSVCLHEVAYWYILSIGAQTDFLSVFFSGYTFKHKMVYEDTLTLFPFSGETVFMSMENPGLWILGCHNSDFRNRGMTALLKVSSCDKNTGDYYEDSYEDISAYLLSKNNAIEPRSFSQNPPVLKRHQREITRTTLQSDQEEIDYDDTISVEMKKEDFDIYDEDENQSPRSFQKKTRHYFIAAVERLWDYGMSSSPHVLRNRAQSGSVPQFKKVVFQEFTDGSFTQPLYRGELNEHLGLLGPYIRAEVEDNIMVTFRNQASRPYSFYSSLISYEEDQRQGAEPRKNFVKPNETKTYFWKVQHHMAPTKDEFDCKAWAYFSDVDLEKDVHSGLIGPLLVCHTNTLNPAHGRQVTVQEFALFFTIFDETKSWYFTENMERNCRAPCNIQMEDPTFKENYRFHAINGYIMDTLPGLVMAQDQRIRWYLLSMGSNENIHSIHFSGHVFTVRKKEEYKMALYNLYPGVFETVEMLPSKAGIWRVECLIGEHLHAGMSTLFLVYSNKCQTPLGMASGHIRDFQITASGQYGQWAPKLARLHYSGSINAWSTKEPFSWIKVDLLAPMIIHGIKTQGARQKFSSLYISQFIIMYSLDGKKWQTYRGNSTGTLMVFFGNVDSSGIKHNIFNPPIIARYIRLHPTHYSIRSTLRMELMGCDLNSCSMPLGMESKAISDAQITASSYFTNMFATWSPSKARLHLQGRSNAWRPQVNNPKEWLQVDFQKTMKVTGVTTQGVKSLDTSMYVKEFLISSSQDGHQWTLFFQNGKVKVFQGNQDSFTPVVNSLDPPLLTRYLRIHPQSWVHQIALRMEVLGCEAQDLY

SEQ ID NO: 373 - DNA, 4371 bp, synthetic construct
  misc_feature 1..4371: note = Variant of human B-domain deleted Factor VIII
  source 1..4371: mol_type = other DNA
atgcagattgaactgtctacctgcttcttcctctgtttgctgaggttctgctttagcgccactagacggtactaccttggcgctgtggagctgtcctgggactatatgcagagtgatttgggagagcttcccgtcgacgcacgatttcctcctcgcgttccaaagtcatttcccttcaacacaagcgtggtgtacaagaagacgctcttcgtcgaattcaccgatcacctgttcaatatcgccaaacccagaccaccatggatgggtcttttggggcctaccatacaagcggaggtgtatgacacagttgttatcactctcaagaacatggcttctcatccggtaagtcttcacgcagtgggcgtgtcctactggaaagcttcagaaggagccgagtatgatgatcagacatcccagagggagaaagaagacgacaaggtatttccaggtgggtctcatacctatgtgtggcaagtgctcaaagagaatggccctatggcaagcgatccgctctgtttgacttacagctacctttcacacgttgacctcgtcaaggacctcaactccgggttgattggagccttgttggtatgcagggaaggatctcttgccaaagagaagacacagaccctccacaagtttatccttctctttgctgtgttcgatgagggcaaaagttggcatagcgaaacgaagaattccctcatgcaggatcgcgacgcagccagcgccagagcttggcccaagatgcacactgtgaacggatatgtcaataggtcacttcctggcttgattgggtgtcatcggaaaagtgtctactggcacgtgatcggaatggggacaacaccagaggtccactccatatttctcgaaggccataccttccttgttcgaaaccacagacaggcatccttggagatctctcccattacctttctcactgcccaaacgctccttatggacttgggtcagttccttctcttctgccatatcagctcacaccagcatgatggtatggaagcttatgtgaaagtcgacagttgtcctgaggagccacagttgcgcatgaagaataatgaagaagccgaggattacgacgacgatctcaccgattctgagatggacgtggtgaggtttgatgacgacaactctccctccttcattcaaatccggagcgtggcgaagaaacaccccaagacttgggtccactatatagcggcggaagaggaggattgggattacgctcctcttgtattggcaccagatgaccgctcatacaaaagccagtacctcaacaacggaccgcagagaattggccggaagtataagaaagtgcgatttatggcctatacagacgaaacctttaagacaagggaggccatccagcatgagagtgggattttgggacctcttctttacggcgaagttggtgataccctcctcatcatcttcaagaatcaagcttctcgcccctataacatttacccacacgggatcactgacgttaggcctttgtatagcagaagacttcccaaaggcgtgaagcatctcaaagacttccccattttgccaggcgagatctttaagtacaaatggaccgtcacagtggaagatggaccgactaaatcagaccctcgatgccttacgcggtactattcctccttcgtgaatatggagagagatttggcaagcggactcataggaccactcctcatctgttacaaggaatctgtagaccagaggggtaaccagattatgagtgataaacgcaatgtgatcctttttagcgtcttcgacgagaaccggtcctggtacttgaccgagaatatacaaaggttccttcccgggcccgcaggcgttcagttggaagaccctgagtttcaggccagcaatattatgcactcaatcaacggctatgtgtttgatagtctccagctttctgtttgcctccatgaagtagcctattggtacatcttgtcaattggtgctcaaacagacttcctctccgtcttcttctccggctacacctttaagcacaagatggtgtatgaggacactctcacactctttccattttctggagaaaccgtgttcatgagcatggagaatccaggcctttggatcttgggttgccacaacagtgattttcgcaatcggggaatgactgctctcctcaaagtcagcagctgtgataagaacacaggcgactattacgaagattcttacgaggacataagtgcctacttgttgtccaagaataacgccattgagcccagatcattctcccagaatcctcccgtgcttaaaaggcatcagcgcgaaatcaccagaactactcttcagtctgatcaagaggagattgactatgacgacaccataagcgtggaaatgaagaaggaggatttcgatatctatgacgaagatgagaaccagtctccgcggagctttcagaagaagacgcgacactacttcattgcagcagtcgaaaggctttgggactacggtatgtcatcatcccctcatgtgttgcgcaatagagctcagagtggaagtgttccacagttcaagaaagtcgtctttcaagagtttacagatggcagcttcacacagcctctctatcggggcgagcttaacgaacatttgggactccttggtccctatatccgagccgaagtggaggacaacattatggttacctttaggaatcaagcctctcgcccctacagcttctactcctccctcatcagttatgaggaggatcagagacaaggcgctgaaccacggaagaactttgtgaaaccgaatgagacgaagacctacttctggaaagtacagcaccacatggcccccacaaaagacgaattcgattgcaaagcatgggcgtatttttcagacgttgacttggagaaagatgtacattcaggacttattggtcctttgttggtgtgtcacactaacactctcaatccagcccatggcaggcaggtgacagtccaggaattcgctcttttctttaccatctttgatgagaccaagtcctggtacttcacggaaaacatggagcgcaattgcagagccccctgtaacatacagatggaggaccctacctttaaggaaaattatcggttccacgcaatcaacggatacattatggatacactccctggccttgtgatggctcaggaccaacgaatcaggtggtacctcctcagcatgggttctaatgagaacatacactccattcacttttcaggacatgtgttcactgtccggaagaaagaagagtataagatggccctctacaatttgtatccaggcgtgtttgagaccgttgaaatgcttccctctaaagctggcatctggagagtagagtgcttgatcggagaacatcttcacgcaggtatgagcaccttgttcctcgtgtacagcaacaaatgtcagaccccacttggcatggccagtggacacattcgcgactttcagatcacagcatctggccagtatggacaatgggccccaaagttggctcgcctccattactccggtagcataaatgcgtggtccactaaagaacctttcagctggattaaggtcgatcttcttgcccccatgatcatccacggcattaagacacagggagcgaggcagaaattctcctccctctacatctcacagttcattattatgtatagtttggacggcaagaagtggcaaacttatagaggtaacagtactggaacactcatggtgttcttcggcaacgttgatagctctggcatcaaacacaacatctttaatcctcccataatagctcggtacatcagattgcatccgacccactacagcattaggagtacactccgaatggagcttatgggttgcgacttgaattcctgttcaatgccactcggaatggagtctaaagccatctctgatgcacagataaccgccagtagctactttacgaacatgtttgctacgtggtcaccctctaaggcaaggcttcatttgcaaggccggtctaatgcctggagacctcaggtgaacaacccgaaagaatggctccaggtggactttcagaagaccatgaaagtaacaggtgtcactactcagggagttaagtccttggataccagcatgtatgtgaaggagttccttatttcctcatcacaagatggccaccagtggaccctcttctttcagaatggtaaggtcaaagtgtttcagggcaatcaagacagcttcacacccgtggtgaacagtcttgatcctccactcttgacacgataccttcgaatccatccacagtcttgggttcaccagattgcattgcgcatggaagtacttggatgcgaggctcaggacctctac

SEQ ID NO: 374 - protein, 1457 aa, synthetic construct
  REGION 1..1457: note = Variant of human B-domain deleted Factor VIII
MQIELSTCFFLCLLRFCFSATRRYYLGAVELSWDYMQSDLGELPVDARFPPRVPKSFPFNTSVVYKKTLFVEFTDHLFNIAKPRPPWMGLLGPTIQAEVYDTVVITLKNMASHPVSLHAVGVSYWKASEGAEYDDQTSQREKEDDKVFPGGSHTYVWQVLKENGPMASDPLCLTYSYLSHVDLVKDLNSGLIGALLVCREGSLAKEKTQTLHKFILLFAVFDEGKSWHSETKNSLMQDRDAASARAWPKMHTVNGYVNRSLPGLIGCHRKSVYWHVIGMGTTPEVHSIFLEGHTFLVRNHRQASLEISPITFLTAQTLLMDLGQFLLFCHISSHQHDGMEAYVKVDSCPEEPQLRMKNNEEAEDYDDDLTDSEMDVVRFDDDNSPSFIQIRSVAKKHPKTWVHYIAAEEEDWDYAPLVLAPDDRSYKSQYLNNGPQRIGRKYKKVRFMAYTDETFKTREAIQHESGILGPLLYGEVGDTLLIIFKNQASRPYNIYPHGITDVRPLYSRRLPKGVKHLKDFPILPGEIFKYKWTVTVEDGPTKSDPRCLTRYYSSFVNMERDLASGLIGPLLICYKESVDQRGNQIMSDKRNVILFSVFDENRSWYLTENIQRFLPGPAGVQLEDPEFQASNIMHSINGYVFDSLQLSVCLHEVAYWYILSIGAQTDFLSVFFSGYTFKHKMVYEDTLTLFPFSGETVFMSMENPGLWILGCHNSDFRNRGMTALLKVSSCDKNTGDYYEDSYEDISAYLLSKNNAIEPRSFSQNPPVLKRHQREITRTTLQSDQEEIDYDDTISVEMKKEDFDIYDEDENQSPRSFQKKTRHYFIAAVERLWDYGMSSSPHVLRNRAQSGSVPQFKKVVFQEFTDGSFTQPLYRGELNEHLGLLGPYIRAEVEDNIMVTFRNQASRPYSFYSSLISYEEDQRQGAEPRKNFVKPNETKTYFWKVQHHMAPTKDEFDCKAWAYFSDVDLEKDVHSGLIGPLLVCHTNTLNPAHGRQVTVQEFALFFTIFDETKSWYFTENMERNCRAPCNIQMEDPTFKENYRFHAINGYIMDTLPGLVMAQDQRIRWYLLSMGSNENIHSIHFSGHVFTVRKKEEYKMALYNLYPGVFETVEMLPSKAGIWRVECLIGEHLHAGMSTLFLVYSNKCQTPLGMASGHIRDFQITASGQYGQWAPKLARLHYSGSINAWSTKEPFSWIKVDLLAPMIIHGIKTQGARQKFSSLYISQFIIMYSLDGKKWQTYRGNSTGTLMVFFGNVDSSGIKHNIFNPPIIARYIRLHPTHYSIRSTLRMELMGCDLNSCSMPLGMESKAISDAQITASSYFTNMFATWSPSKARLHLQGRSNAWRPQVNNPKEWLQVDFQKTMKVTGVTTQGVKSLDTSMYVKEFLISSSQDGHQWTLFFQNGKVKVFQGNQDSFTPVVNSLDPPLLTRYLRIHPQSWVHQIALRMEVLGCEAQDLY

SEQ ID NO: 375 - DNA, 4371 bp, synthetic construct
  misc_feature 1..4371: note = Variant of human B-domain deleted Factor VIII
  source 1..4371: mol_type = other DNA
atgcagattgaactgtctacctgcttcttcctctgtttgctgaggttctgctttagcgccactagacggtactaccttggcgctgtggagctgtcctgggactatatgcagagtgatttgggagagcttcccgtcgacgcacgatttcctcctcgcgttccaaagtcatttcccttcaacacaagcgtggtgtacaagaagacgctcttcgtcgaattcaccgatcacctgttcaatatcgccaaacccagaccaccatggatgggtcttttggggcctaccatacaagcggaggtgtatgacacagttgttatcactctcaagaacatggcttctcatccggtaagtcttcacgcagtgggcgtgtcctactggaaagcttcagaaggagccgagtatgatgatcagacatcccagagggagaaagaagacgacaaggtatttccaggtgggtctcatacctatgtgtggcaagtgctcaaagagaatggccctatggcaagcgatccgctctgtttgacttacagctacctttcacacgttgacctcgtcaaggacctcaactccgggttgattggagccttgttggtatgcagggaaggatctcttgccaaagagaagacacagaccctccacaagtttatccttctctttgctgtgttcgatgagggcaaaagttggcatagcgaaacgaagaattccctcatgcaggatcgcgacgcagccagcgccagagcttggcccaagatgcacactgtgaacggatatgtcaataggtcacttcctggcttgattgggtgtcatcggaaaagtgtctactggcacgtgatcggaatggggacaacaccagaggtccactccatatttctcgaaggccataccttccttgttcgaaaccacagacaggcatccttggagatctctcccattacctttctcactgcccaaacgctccttatggacttgggtcagttccttctcttctgccatatcagctcacaccagcatgatggtatggaagcttatgtgaaagtcgacagttgtcctgaggagccacagttgcgcatgaagaataatgaagaagccgaggattacgacgacgatctcaccgattctgagatggacgtggtgaggtttgatgacgacaactctccctccttcattcaaatccggagcgtggcgaagaaacaccccaagacttgggtccactatatagcggcggaagaggaggattgggattacgctcctcttgtattggcaccagatgaccgctcatacaaaagccagtacctcaacaacggaccgcagagaattggccggaagtataagaaagtgcgatttatggcctatacagacgaaacctttaagacaagggaggccatccagcatgagagtgggattttgggacctcttctttacggcgaagttggtgataccctcctcatcatcttcaagaatcaagcttctcgcccctataacatttacccacacgggatcactgacgttaggcctttgtatagcagaagacttcccaaaggcgtgaagcatctcaaagacttccccattttgccaggcgagatctttaagtacaaatggaccgtcacagtggaagatggaccgactaaatcagaccctcgatgccttacgcggtactattcctccttcgtgaatatggagagagatttggcaagcggactcataggaccactcctcatctgttacaaggaatctgtagaccagaggggtaaccagattatgagtgataaacgcaatgtgatcctttttagcgtcttcgacgagaaccggtcctggtacttgaccgagaatatacaaacgttccttcccaaccccgcaggcgttcagttggaagaccctgagtttcaggccagcaatattatgcactcaatcaacggctatgtgtttgatagtctccagctttctgtttgcctccatgaagtagcctattggtacatcttgtcaattggtgctcaaacagacttcctctccgtcttcttctccggctacacctttaagcacaagatggtgtatgaggacactctcacactctttccattttctggagaaaccgtgttcatgagcatggagaatccaggcctttggatcttgggttgccacaacagtgattttcgcaatcggggaatgactgctctcctcaaagtcagcagctgtgataagaacacaggcgactattacgaagattcttacgaggacataagtgcctacttgttgtccaagaataacgccattgagcccagatcattctcccagaatcctcccgtgcttaaaaggcatcagcgcgaaatcaccagaactactcttcagtctgatcaagaggagattgactatgacgacaccataagcgtggaaatgaagaaggaggatttcgatatctatgacgaagatgagaaccagtctccgcggagctttcagaagaagacgcgacactacttcattgcagcagtcgaaaggctttgggactacggtatgtcatcatcccctcatgtgttgcgcaatagagctcagagtggaagtgttccacagttcaagaaagtcgtctttcaagagtttacagatggcagcttcacacagcctctctatcggggcgagcttaacgaacatttgggactccttggtccctatatccgagccgaagtggaggacaacattatggttacctttaggaatcaagcctctcgcccctacagcttctactcctccctcatcagttatgaggaggatcagagacaaggcgctgaaccacggaagaactttgtgaaaccgaatgagacgaagacctacttctggaaagtacagcaccacatggcccccacaaaagacgaattcgattgcaaagcatgggcgtatttttcagacgttgacttggagaaagatgtacattcaggacttattggtcctttgttggtgtgtcacactaacactctcaatccagcccatggcaggcaggtgacagtccaggaattcgctcttttctttaccatctttgatgagaccaagtcctggtacttcacggaaaacatggagcgcaattgcagagccccctgtaacatacagatggaggaccctacctttaaggaaaattatcggttccacgcaatcaacggatacattatggatacactccctggccttgtgatggctcaggaccaacgaatcaggtggtacctcctcagcatgggttctaatgagaacatacactccattcacttttcaggacatgtgttcactgtccggaagaaagaagagtataagatggccctctacaatttgtatccaggcgtgtttgagaccgttgaaatgcttccctctaaagctggcatctggagagtagagtgcttgatcggagaacatcttcacgcaggtatgagcaccttgttcctcgtgtacagcaacaaatgtcagaccccacttggcatggccagtggacacattcgcgactttcagatcacagcatctggccagtatggacaatgggccccaaagttggctcgcctccattactccggtagcataaatgcgtggtccactaaagaacctttcagctggattaaggtcgatcttcttgcccccatgatcatccacggcattaagacacagggagcgaggcagaaattctcctccctctacatctcacagttcattattatgtatagtttggacggcaagaagtggcaaacttatagaggtaacagtactggaacactcatggtgttcttcggcaacgttgatagctctggcatcaaacacaacatctttaatcctcccataatagctcggtacatcagattgcatccgacccactacagcattaggagtacactccgaatggagcttatgggttgcgacttgaattcctgttcaatgccactcggaatggagtctaaagccatctctgatgcacagataaccgccagtagctactttacgaacatgtttgctacgtggtcaccctctaaggcaaggcttcatttgcaaggccggtctaatgcctggagacctcaggtgaacaacccgaaagaatggctccaggtggactttcagaagaccatgaaagtaacaggtgtcactactcagggagttaagtccttggataccagcatgtatgtgaaggagttccttatttcctcatcacaagatggccaccagtggaccctcttctttcagaatggtaaggtcaaagtgtttcagggcaatcaagacagcttcacacccgtggtgaacagtcttgatcctccactcttgacacgataccttcgaatccatccacagtcttgggttcaccagattgcattgcgcatggaagtacttggatgcgaggctcaggacctctac

SEQ ID NO: 376 - protein, 1457 aa, synthetic construct
  REGION 1..1457: note = Variant of human B-domain deleted Factor VIII
MQIELSTCFFLCLLRFCFSATRRYYLGAVELSWDYMQSDLGELPVDARFPPRVPKSFPFNTSVVYKKTLFVEFTDHLFNIAKPRPPWMGLLGPTIQAEVYDTVVITLKNMASHPVSLHAVGVSYWKASEGAEYDDQTSQREKEDDKVFPGGSHTYVWQVLKENGPMASDPLCLTYSYLSHVDLVKDLNSGLIGALLVCREGSLAKEKTQTLHKFILLFAVFDEGKSWHSETKNSLMQDRDAASARAWPKMHTVNGYVNRSLPGLIGCHRKSVYWHVIGMGTTPEVHSIFLEGHTFLVRNHRQASLEISPITFLTAQTLLMDLGQFLLFCHISSHQHDGMEAYVKVDSCPEEPQLRMKNNEEAEDYDDDLTDSEMDVVRFDDDNSPSFIQIRSVAKKHPKTWVHYIAAEEEDWDYAPLVLAPDDRSYKSQYLNNGPQRIGRKYKKVRFMAYTDETFKTREAIQHESGILGPLLYGEVGDTLLIIFKNQASRPYNIYPHGITDVRPLYSRRLPKGVKHLKDFPILPGEIFKYKWTVTVEDGPTKSDPRCLTRYYSSFVNMERDLASGLIGPLLICYKESVDQRGNQIMSDKRNVILFSVFDENRSWYLTENIQTFLPNPAGVQLEDPEFQASNIMHSINGYVFDSLQLSVCLHEVAYWYILSIGAQTDFLSVFFSGYTFKHKMVYEDTLTLFPFSGETVFMSMENPGLWILGCHNSDFRNRGMTALLKVSSCDKNTGDYYEDSYEDISAYLLSKNNAIEPRSFSQNPPVLKRHQREITRTTLQSDQEEIDYDDTISVEMKKEDFDIYDEDENQSPRSFQKKTRHYFIAAVERLWDYGMSSSPHVLRNRAQSGSVPQFKKVVFQEFTDGSFTQPLYRGELNEHLGLLGPYIRAEVEDNIMVTFRNQASRPYSFYSSLISYEEDQRQGAEPRKNFVKPNETKTYFWKVQHHMAPTKDEFDCKAWAYFSDVDLEKDVHSGLIGPLLVCHTNTLNPAHGRQVTVQEFALFFTIFDETKSWYFTENMERNCRAPCNIQMEDPTFKENYRFHAINGYIMDTLPGLVMAQDQRIRWYLLSMGSNENIHSIHFSGHVFTVRKKEEYKMALYNLYPGVFETVEMLPSKAGIWRVECLIGEHLHAGMSTLFLVYSNKCQTPLGMASGHIRDFQITASGQYGQWAPKLARLHYSGSINAWSTKEPFSWIKVDLLAPMIIHGIKTQGARQKFSSLYISQFIIMYSLDGKKWQTYRGNSTGTLMVFFGNVDSSGIKHNIFNPPIIARYIRLHPTHYSIRSTLRMELMGCDLNSCSMPLGMESKAISDAQITASSYFTNMFATWSPSKARLHLQGRSNAWRPQVNNPKEWLQVDFQKTMKVTGVTTQGVKSLDTSMYVKEFLISSSQDGHQWTLFFQNGKVKVFQGNQDSFTPVVNSLDPPLLTRYLRIHPQSWVHQIALRMEVLGCEAQDLY

SEQ ID NO: 377 - DNA, 4371 bp, synthetic construct
  misc_feature 1..4371: note = Variant of human B-domain deleted Factor VIII
  source 1..4371: mol_type = other DNA
atgcagattgaactgtctacctgcttcttcctctgtttgctgaggttctgctttagcgccactagacggtactaccttggcgctgtggagctgtcctgggactatatgcagagtgatttgggagagcttcccgtcgacgcacgatttcctcctcgcgttccaaagtcatttcccttcaacacaagcgtggtgtacaagaagacgctcttcgtcgaattcaccgatcacctgttcaatatcgccaaacccagaccaccatggatgggtcttttggggcctaccatacaagcggaggtgtatgacacagttgttatcactctcaagaacatggcttctcatccggtaagtcttcacgcagtgggcgtgtcctactggaaagcttcagaaggagccgagtatgatgatcagacatcccagagggagaaagaagacgacaaggtatttccaggtgggtctcatacctatgtgtggcaagtgctcaaagagaatggccctatggcaagcgatccgctctgtttgacttacagctacctttcacacgttgacctcgtcaaggacctcaactccgggttgattggagccttgttggtatgcagggaaggatctcttgccaaagagaagacacagaccctccacaagtttatccttctctttgctgtgttcgatgagggcaaaagttggcatagcgaaacgaagaattccctcatgcaggatcgcgacgcagccagcgccagagcttggcccaagatgcacactgtgaacggatatgtcaataggtcacttcctggcttgattgggtgtcatcggaaaagtgtctactggcacgtgatcggaatggggacaacaccagaggtccactccatatttctcgaaggccataccttccttgttcgaaaccacagacaggcatccttggagatctctcccattacctttctcactgcccaaacgctccttatggacttgggtcagttccttctcttctgccatatcagctcacaccagcatgatggtatggaagcttatgtgaaagtcgacagttgtcctgaggagccacagttgcgcatgaagaataatgaagaagccgaggattacgacgacgatctcaccgattctgagatggacgtggtgaggtttgatgacgacaactctccctccttcattcaaatccggagcgtggcgaagaaacaccccaagacttgggtccactatatagcggcggaagaggaggattgggattacgctcctcttgtattggcaccagatgaccgctcatacaaaagccagtacctcaacaacggaccgcagagaattggccggaagtataagaaagtgcgatttatggcctatacagacgaaacctttaagacaagggaggccatccagcatgagagtgggattttgggacctcttctttacggcgaagttggtgataccctcctcatcatcttcaagaatcaagcttctcgcccctataacatttacccacacgggatcactgacgttaggcctttgtatagcagaagacttcccaaaggcgtgaagcatctcaaagacttccccattttgccaggcgagatctttaagtacaaatggaccgtcacagtggaagatggaccgactaaatcagaccctcgatgccttacgcggtactattcctccttcgtgaatatggagagagatttggcaagcggactcataggaccactcctcatctgttacaaggaatctgtagaccagaggggtaaccagattatgagtgataaacgcaatgtgatcctttttagcgtcttcgacgagaaccggtcctggtacttgaccgagaatatacaaaggttccttcccaaccccgcaggcgttcagttggaagaccctgagtttcaggccagcaatattatgcactcaatcaacggctatgtgtttgatagtctccagctttctgtttgcctccatgaagtagcctattggtacatcttgtcaattggtgctcaaacagacttcctctccgtcttcttctccggctacacctttaagcacaagatggtgtatgaggacactctcacactctttccattttctggagaaaccgtgttcatgagcatggagaatccaggcctttggatcttgggttgccacaacagtgattttcgcaatcggggaatgactgctctcctcaaagtcagcagctgtgataagaacacaggcgactattacgaagattcttacgaggacataagtgcctacttgttgtccaagaataacgccattgagcccagatcattctcccagaatcctcccgtgcttaaaaggcatcagcgcgaaatcaccagaactactcttcagtctgatcaagaggagattgactatgacgacaccataagcgtggaaatgaagaaggaggatttcgatatctatgacgaagatgagaaccagtctccgcggagctttcagaagaagacgcgacactacttcattgcagcagtcgaaaggctttgggactacggtatgtcatcatcccctcatgtgttgcgcaatagagctcagagtggaagtgttccacagttcaagaaagtcgtctttcaagagtttacagatggcagcttcacacagcctctctatcggggcgagcttaacgaacatttgggactccttggtccctatatccgagccgaagtggaggacaacattatggttacctttaggaatcaagcctctcgcccctacagcttctactcctccctcatcagttatgaggaggatcagagacaaggcgctgaaccacggaagaactttgtgaaaccgaatgagacgaagacctacttctggaaagtacagcaccacatggcccccacaaaagacgaattcgattgcaaagcatgggcgtatttttcagacgttgacttggagaaagatgtacattcaggacttattggtcctttgttggtgtgtcacactaacactctcaatccagcccatggcaggcaggtgacagtccaggaattcgctcttttctttaccatctttgatgagaccaagtcctggtacttcacggaaaacatggagcgcaattgcagagccccctgtaacatacagatggaggaccctacctttaaggaaaattatcggttccacgcaatcaacggataccagatggatacactccctggccttgtgatggctcaggaccaacgaatcaggtggtacctcctcagcatgggttctaatgagaacatacactccattcacttttcaggacatgtgttcactgtccggaagaaagaagagtataagatggccctctacaatttgtatccaggcgtgtttgagaccgttgaaatgcttccctctaaagctggcatctggagagtagagtgcttgatcggagaacatcttcacgcaggtatgagcaccttgttcctcgtgtacagcaacaaatgtcagaccccacttggcatggccagtggacacattcgcgactttcagatcacagcatctggccagtatggacaatgggccccaaagttggctcgcctccattactccggtagcataaatgcgtggtccactaaagaacctttcagctggattaaggtcgatcttcttgcccccatgatcatccacggcattaagacacagggagcgaggcagaaattctcctccctctacatctcacagttcattattatgtatagtttggacggcaagaagtggcaaacttatagaggtaacagtactggaacactcatggtgttcttcggcaacgttgatagctctggcatcaaacacaacatctttaatcctcccataatagctcggtacatcagattgcatccgacccactacagcattaggagtacactccgaatggagcttatgggttgcgacttgaattcctgttcaatgccactcggaatggagtctaaagccatctctgatgcacagataaccgccagtagctactttacgaacatgtttgctacgtggtcaccctctaaggcaaggcttcatttgcaaggccggtctaatgcctggagacctcaggtgaacaacccgaaagaatggctccaggtggactttcagaagaccatgaaagtaacaggtgtcactactcagggagttaagtccttggataccagcatgtatgtgaaggagttccttatttcctcatcacaagatggccaccagtggaccctcttctttcagaatggtaaggtcaaagtgtttcagggcaatcaagacagcttcacacccgtggtgaacagtcttgatcctccactcttgacacgataccttcgaatccatccacagtcttgggttcaccagattgcattgcgcatggaagtacttggatgcgaggctcaggacctctac

SEQ ID NO: 378 - protein, 1457 aa, synthetic construct
  REGION 1..1457: note = Variant of human B-domain deleted Factor VIII
MQIELSTCFFLCLLRFCFSATRRYYLGAVELSWDYMQSDLGELPVDARFPPRVPKSFPFNTSVVYKKTLFVEFTDHLFNIAKPRPPWMGLLGPTIQAEVYDTVVITLKNMASHPVSLHAVGVSYWKASEGAEYDDQTSQREKEDDKVFPGGSHTYVWQVLKENGPMASDPLCLTYSYLSHVDLVKDLNSGLIGALLVCREGSLAKEKTQTLHKFILLFAVFDEGKSWHSETKNSLMQDRDAASARAWPKMHTVNGYVNRSLPGLIGCHRKSVYWHVIGMGTTPEVHSIFLEGHTFLVRNHRQASLEISPITFLTAQTLLMDLGQFLLFCHISSHQHDGMEAYVKVDSCPEEPQLRMKNNEEAEDYDDDLTDSEMDVVRFDDDNSPSFIQIRSVAKKHPKTWVHYIAAEEEDWDYAPLVLAPDDRSYKSQYLNNGPQRIGRKYKKVRFMAYTDETFKTREAIQHESGILGPLLYGEVGDTLLIIFKNQASRPYNIYPHGITDVRPLYSRRLPKGVKHLKDFPILPGEIFKYKWTVTVEDGPTKSDPRCLTRYYSSFVNMERDLASGLIGPLLICYKESVDQRGNQIMSDKRNVILFSVFDENRSWYLTENIQRFLPNPAGVQLEDPEFQASNIMHSINGYVFDSLQLSVCLHEVAYWYILSIGAQTDFLSVFFSGYTFKHKMVYEDTLTLFPFSGETVFMSMENPGLWILGCHNSDFRNRGMTALLKVSSCDKNTGDYYEDSYEDISAYLLSKNNAIEPRSFSQNPPVLKRHQREITRTTLQSDQEEIDYDDTISVEMKKEDFDIYDEDENQSPRSFQKKTRHYFIAAVERLWDYGMSSSPHVLRNRAQSGSVPQFKKVVFQEFTDGSFTQPLYRGELNEHLGLLGPYIRAEVEDNIMVTFRNQASRPYSFYSSLISYEEDQRQGAEPRKNFVKPNETKTYFWKVQHHMAPTKDEFDCKAWAYFSDVDLEKDVHSGLIGPLLVCHTNTLNPAHGRQVTVQEFALFFTIFDETKSWYFTENMERNCRAPCNIQMEDPTFKENYRFHAINGYQMDTLPGLVMAQDQRIRWYLLSMGSNENIHSIHFSGHVFTVRKKEEYKMALYNLYPGVFETVEMLPSKAGIWRVECLIGEHLHAGMSTLFLVYSNKCQTPLGMASGHIRDFQITASGQYGQWAPKLARLHYSGSINAWSTKEPFSWIKVDLLAPMIIHGIKTQGARQKFSSLYISQFIIMYSLDGKKWQTYRGNSTGTLMVFFGNVDSSGIKHNIFNPPIIARYIRLHPTHYSIRSTLRMELMGCDLNSCSMPLGMESKAISDAQITASSYFTNMFATWSPSKARLHLQGRSNAWRPQVNNPKEWLQVDFQKTMKVTGVTTQGVKSLDTSMYVKEFLISSSQDGHQWTLFFQNGKVKVFQGNQDSFTPVVNSLDPPLLTRYLRIHPQSWVHQIALRMEVLGCEAQDLY

SEQ ID NO: 379 - DNA, 4371 bp, synthetic construct
  misc_feature 1..4371: note = Variant of human B-domain deleted Factor VIII
  source 1..4371: mol_type = other DNA
atgcagattgaactgtctacctgcttcttcctctgtttgctgaggttctgctttagcgccactagacggtactaccttggcgctgtggagctgtcctgggactatatgcagagtgatttgggagagcttcccgtcgacgcacgatttcctcctcgcgttccaaagtcatttcccttcaacacaagcgtggtgtacaagaagacgctcttcgtcgaattcaccgatcacctgttcaatatcgccaaacccagaccaccatggatgggtcttttggggcctaccatacaagcggaggtgtatgacacagttgttatcactctcaagaacatggcttctcatccggtaagtcttcacgcagtgggcgtgtcctactggaaagcttcagaaggagccgagtatgatgatcagacatcccagagggagaaagaagacgacaaggtatttccaggtgggtctcatacctatgtgtggcaagtgctcaaagagaatggccctatggcaagcgatccgctctgtttgacttacagctacctttcacacgttgacctcgtcaaggacctcaactccgggttgattggagccttgttggtatgcagggaaggatctcttgccaaagagaagacacagaccctccacaagtttatccttctctttgctgtgttcgatgagggcaaaagttggcatagcgaaacgaagaattccctcatgcaggatcgcgacgcagccagcgccagagcttggcccaagatgcacactgtgaacggatatgtcaataggtcacttcctggcttgattgggtgtcatcggaaaagtgtctactggcacgtgatcggaatggggacaacaccagaggtccactccatatttctcgaaggccataccttccttgttcgaaaccacagacaggcatccttggagatctctcccattacctttctcactgcccaaacgctccttatggacttgggtcagttccttctcttctgccatatcagctcacaccagcatgatggtatggaagcttatgtgaaagtcgacagttgtcctgaggagccacagttgcgcatgaagaataatgaagaagccgaggattacgacgacgatctcaccgattctgagatggacgtggtgaggtttgatgacgacaactctccctccttcattcaaatccggagcgtggcgaagaaacaccccaagacttgggtccactatatagcggcggaagaggaggattgggattacgctcctcttgtattggcaccagatgaccgctcatacaaaagccagtacctcaacaacggaccgcagagaattggccggaagtataagaaagtgcgatttatggcctatacagacgaaacctttaagacaagggaggccatccagcatgagagtgggattttgggacctcttctttacggcgaagttggtgataccctcctcatcatcttcaagaatcaagcttctcgcccctataacatttacccacacgggatcactgacgttaggcctttgtatagcagaagacttcccaaaggcgtgaagcatctcaaagacttccccattttgccaggcgagatctttaagtacaaatggaccgtcacagtggaagatggaccgactaaatcagaccctcgatgccttacgcggtactattcctccttcgtgaatatggagagagatttggcaagcggactcataggaccactcctcatctgttacaaggaatctgtagaccagaggggtaaccagattatgagtgataaacgcaatgtgatcctttttagcgtcttcgacgagaaccggtcctggtacttgaccgagaatatacaaaggttccttcccaaccccgcaggcgttcagttggaagaccctgagtttcaggccagcaatattatgcactcaatcaacggctatgtgtttgatagtctccagctttctgtttgcctccatgaagtagcctattggtacatcttgtcaattggtgctcaaacagacttcctctccgtcttcttctccggctacacctttaagcacaagatggtgtatgaggacactctcacactctttccattttctggagaaaccgtgttcatgagcatggagaatccaggcctttggatcttgggttgccacaacagtgattttcgcaatcggggaatgactgctctcctcaaagtcagcagctgtgataagaacacaggcgactattacgaagattcttacgaggacataagtgcctacttgttgtccaagaataacgccattgagcccagatcattctcccagaatcctcccgtgcttaaaaggcatcagcgcgaaatcaccagaactactcttcagtctgatcaagaggagattgactatgacgacaccataagcgtggaaatgaagaaggaggatttcgatatctatgacgaagatgagaaccagtctccgcggagctttcagaagaagacgcgacactacttcattgcagcagtcgaaaggctttgggactacggtatgtcatcatcccctcatgtgttgcgcaatagagctcagagtggaagtgttccacagttcaagaaagtcgtctttcaagagtttacagatggcagcttcacacagcctctctatcggggcgagcttaacgaacatttgggactccttggtccctatatccgagccgaagtggaggacaacattatggttacctttaggaatcaagcctctcgcccctacagcttctactcctccctcatcagttatgaggaggatcagagacaaggcgctgaaccacggaagaactttgtgaaaccgaatgagacgaagacctacttctggaaagtacagcaccacatggcccccacaaaagacgaattcgattgcaaagcatgggcgtatttttcagacgttgacttggagaaagatgtacattcaggacttattggtcctttgttggtgtgtcacactaacactctcaatccagcccatggcaggcaggtgacagtccaggaattcgctcttttctttaccatctttgatgagaccaagtcctggtacttcacggaaaacatggagcgcaattgcagagccccctgtaacatacagatggaggaccctacctttaaggaaaattatcggttccacgcaatcaacggatacattatggatgcgctccctggccttgtgatggctcaggaccaacgaatcaggtggtacctcctcagcatgggttctaatgagaacatacactccattcacttttcaggacatgtgttcactgtccggaagaaagaagagtataagatggccctctacaatttgtatccaggcgtgtttgagaccgttgaaatgcttccctctaaagctggcatctggagagtagagtgcttgatcggagaacatcttcacgcaggtatgagcaccttgttcctcgtgtacagcaacaaatgtcagaccccacttggcatggccagtggacacattcgcgactttcagatcacagcatctggccagtatggacaatgggccccaaagttggctcgcctccattactccggtagcataaatgcgtggtccactaaagaacctttcagctggattaaggtcgatcttcttgcccccatgatcatccacggcattaagacacagggagcgaggcagaaattctcctccctctacatctcacagttcattattatgtatagtttggacggcaagaagtggcaaacttatagaggtaacagtactggaacactcatggtgttcttcggcaacgttgatagctctggcatcaaacacaacatctttaatcctcccataatagctcggtacatcagattgcatccgacccactacagcattaggagtacactccgaatggagcttatgggttgcgacttgaattcctgttcaatgccactcggaatggagtctaaagccatctctgatgcacagataaccgccagtagctactttacgaacatgtttgctacgtggtcaccctctaaggcaaggcttcatttgcaaggccggtctaatgcctggagacctcaggtgaacaacccgaaagaatggctccaggtggactttcagaagaccatgaaagtaacaggtgtcactactcagggagttaagtccttggataccagcatgtatgtgaaggagttccttatttcctcatcacaagatggccaccagtggaccctcttctttcagaatggtaaggtcaaagtgtttcagggcaatcaagacagcttcacacccgtggtgaacagtcttgatcctccactcttgacacgataccttcgaatccatccacagtcttgggttcaccagattgcattgcgcatggaagtacttggatgcgaggctcaggacctctac

SEQ ID NO: 380 - protein, 1457 aa, synthetic construct
  REGION 1..1457: note = Variant of human B-domain deleted Factor VIII
MQIELSTCFFLCLLRFCFSATRRYYLGAVELSWDYMQSDLGELPVDARFPPRVPKSFPFNTSVVYKKTLFVEFTDHLFNIAKPRPPWMGLLGPTIQAEVYDTVVITLKNMASHPVSLHAVGVSYWKASEGAEYDDQTSQREKEDDKVFPGGSHTYVWQVLKENGPMASDPLCLTYSYLSHVDLVKDLNSGLIGALLVCREGSLAKEKTQTLHKFILLFAVFDEGKSWHSETKNSLMQDRDAASARAWPKMHTVNGYVNRSLPGLIGCHRKSVYWHVIGMGTTPEVHSIFLEGHTFLVRNHRQASLEISPITFLTAQTLLMDLGQFLLFCHISSHQHDGMEAYVKVDSCPEEPQLRMKNNEEAEDYDDDLTDSEMDVVRFDDDNSPSFIQIRSVAKKHPKTWVHYIAAEEEDWDYAPLVLAPDDRSYKSQYLNNGPQRIGRKYKKVRFMAYTDETFKTREAIQHESGILGPLLYGEVGDTLLIIFKNQASRPYNIYPHGITDVRPLYSRRLPKGVKHLKDFPILPGEIFKYKWTVTVEDGPTKSDPRCLTRYYSSFVNMERDLASGLIGPLLICYKESVDQRGNQIMSDKRNVILFSVFDENRSWYLTENIQRFLPNPAGVQLEDPEFQASNIMHSINGYVFDSLQLSVCLHEVAYWYILSIGAQTDFLSVFFSGYTFKHKMVYEDTLTLFPFSGETVFMSMENPGLWILGCHNSDFRNRGMTALLKVSSCDKNTGDYYEDSYEDISAYLLSKNNAIEPRSFSQNPPVLKRHQREITRTTLQSDQEEIDYDDTISVEMKKEDFDIYDEDENQSPRSFQKKTRHYFIAAVERLWDYGMSSSPHVLRNRAQSGSVPQFKKVVFQEFTDGSFTQPLYRGELNEHLGLLGPYIRAEVEDNIMVTFRNQASRPYSFYSSLISYEEDQRQGAEPRKNFVKPNETKTYFWKVQHHMAPTKDEFDCKAWAYFSDVDLEKDVHSGLIGPLLVCHTNTLNPAHGRQVTVQEFALFFTIFDETKSWYFTENMERNCRAPCNIQMEDPTFKENYRFHAINGYIMDALPGLVMAQDQRIRWYLLSMGSNENIHSIHFSGHVFTVRKKEEYKMALYNLYPGVFETVEMLPSKAGIWRVECLIGEHLHAGMSTLFLVYSNKCQTPLGMASGHIRDFQITASGQYGQWAPKLARLHYSGSINAWSTKEPFSWIKVDLLAPMIIHGIKTQGARQKFSSLYISQFIIMYSLDGKKWQTYRGNSTGTLMVFFGNVDSSGIKHNIFNPPIIARYIRLHPTHYSIRSTLRMELMGCDLNSCSMPLGMESKAISDAQITASSYFTNMFATWSPSKARLHLQGRSNAWRPQVNNPKEWLQVDFQKTMKVTGVTTQGVKSLDTSMYVKEFLISSSQDGHQWTLFFQNGKVKVFQGNQDSFTPVVNSLDPPLLTRYLRIHPQSWVHQIALRMEVLGCEAQDLY

SEQ ID NO: 381 - DNA, 4371 bp, synthetic construct
  misc_feature 1..4371: note = Variant of human B-domain deleted Factor VIII
  source 1..4371: mol_type = other DNA
atgcagattgaactgtctacctgcttcttcctctgtttgctgaggttctgctttagcgccactagacggtactaccttggcgctgtggagctgtcctgggactatatgcagagtgatttgggagagcttcccgtcgacgcacgatttcctcctcgcgttccaaagtcatttcccttcaacacaagcgtggtgtacaagaagacgctcttcgtcgaattcaccgatcacctgttcaatatcgccaaacccagaccaccatggatgggtcttttggggcctaccatacaagcggaggtgtatgacacagttgttatcactctcaagaacatggcttctcatccggtaagtcttcacgcagtgggcgtgtcctactggaaagcttcagaaggagccgagtatgatgatcagacatcccagagggagaaagaagacgacaaggtatttccaggtgggtctcatacctatgtgtggcaagtgctcaaagagaatggccctatggcaagcgatccgctctgtttgacttacagctacctttcacacgttgacctcgtcaaggacctcaactccgggttgattggagccttgttggtatgcagggaaggatctcttgccaaagagaagacacagaccctccacaagtttatccttctctttgctgtgttcgatgagggcaaaagttggcatagcgaaacgaagaattccctcatgcaggatcgcgacgcagccagcgccagagcttggcccaagatgcacactgtgaacggatatgtcaataggtcacttcctggcttgattgggtgtcatcggaaaagtgtctactggcacgtgatcggaatggggacaacaccagaggtccactccatatttctcgaaggccataccttccttgttcgaaaccacagacaggcatccttggagatctctcccattacctttctcactgcccaaacgctccttatggacttgggtcagttccttctcttctgccatatcagctcacaccagcatgatggtatggaagcttatgtgaaagtcgacagttgtcctgaggagccacagttgcgcatgaagaataatgaagaagccgaggattacgacgacgatctcaccgattctgagatggacgtggtgaggtttgatgacgacaactctccctccttcattcaaatccggagcgtggcgaagaaacaccccaagacttgggtccactatatagcggcggaagaggaggattgggattacgctcctcttgtattggcaccagatgaccgctcatacaaaagccagtacctcaacaacggaccgcagagaattggccggaagtataagaaagtgcgatttatggcctatacagacgaaacctttaagacaagggaggccatccagcatgagagtgggattttgggacctcttctttacggcgaagttggtgataccctcctcatcatcttcaagaatcaagcttctcgcccctataacatttacccacacgggatcactgacgttaggcctttgtatagcagaagacttcccaaaggcgtgaagcatctcaaagacttccccattttgccaggcgagatctttaagtacaaatggaccgtcacagtggaagatggaccgactaaatcagaccctcgatgccttacgcggtactattcctccttcgtgaatatggagagagatttggcaagcggactcataggaccactcctcatctgttacaaggaatctgtagaccagaggggtaaccagattatgagtgataaacgcaatgtgatcctttttagcgtcttcgacgagaaccggtcctggtacttgaccgagaatatacaaaggttccttccctggcccgcaggcgttcagttggaagaccctgagtttcaggccagcaatattatgcactcaatcaacggctatgtgtttgatagtctccagctttctgtttgcctccatgaagtagcctattggtacatcttgtcaattggtgctcaaacagacttcctctccgtcttcttctccggctacacctttaagcacaagatggtgtatgaggacactctcacactctttccattttctggagaaaccgtgttcatgagcatggagaatccaggcctttggatcttgggttgccacaacagtgattttcgcaatcggggaatgactgctctcctcaaagtcagcagctgtgataagaacacaggcgactattacgaagattcttacgaggacataagtgcctacttgttgtccaagaataacgccattgagcccagatcattctcccagaatcctcccgtgcttaaaaggcatcagcgcgaaatcaccagaactactcttcagtctgatcaagaggagattgactatgacgacaccataagcgtggaaatgaagaaggaggatttcgatatctatgacgaagatgagaaccagtctccgcggagctttcagaagaagacgcgacactacttcattgcagcagtcgaaaggctttgggactacggtatgtcatcatcccctcatgtgttgcgcaatagagctcagagtggaagtgttccacagttcaagaaagtcgtctttcaagagtttacagatggcagcttcacacagcctctctatcggggcgagcttaacgaacatttgggactccttggtccctatatccgagccgaagtggaggacaacattatggttacctttaggaatcaagcctctcgcccctacagcttctactcctccctcatcagttatgaggaggatcagagacaaggcgctgaaccacggaagaactttgtgaaaccgaatgagacgaagacctacttctggaaagtacagcaccacatggcccccacaaaagacgaattcgattgcaaagcatgggcgtatttttcagacgttgacttggagaaagatgtacattcaggacttattggtcctttgttggtgtgtcacactaacactctcaatccagcccatggcaggcaggtgacagtccaggaattcgctcttttctttaccatctttgatgagaccaagtcctggtacttcacggaaaacatggagcgcaattgcagagccccctgtaacatacagatggaggaccctacctttaaggaaaattatcggttccacgcaatcaacggatacattatggatacactccctggccttgtgatggctcaggaccaacgaatcaggtggtacctcctcagcatgggttctaatgagaacatacactccattcacttttcaggacatgtgttcactgtccggaagaaagaagagtataagatggccctctacaatttgtatccaggcgtgtttgagaccgttgaaatgcttccctctaaagctggcatctggagagtagagtgcttgatcggagaacatcttcacgcaggtatgagcaccttgttcctcgtgtacagcaacaaatgtcagaccccacttggcatggccagtggacacattcgcgactttcagatcacagcatctggccagtatggacaatgggccccaaagttggctcgcctccattactccggtagcataaatgcgtggtccactaaagaacctttcagctggattaaggtcgatcttcttgcccccatgatcatccacggcattaagacacagggagcgaggcagaaattctcctccctctacatctcacagttcattattatgtatagtttggacggcaagaagtggcaaacttatagaggtaacagtactggaacactcatggtgttcttcggcaacgttgatagctctggcatcaaacacaacatctttaatcctcccataatagctcggtacatcagattgcatccgacccactacagcattaggagtacactccgaatggagcttatgggttgcgacttgaattcctgttcaatgccactcggaatggagtctaaagccatctctgatgcacagataaccgccagtagctactttacgaacatgtttgctacgtggtcaccctctaaggcaaggcttcatttgcaaggccggtctaatgcctggagacctcaggtgaacaacccgaaagaatggctccaggtggactttcagaagaccatgaaagtaacaggtgtcactactcagggagttaagtccttggataccagcatgtatgtgaaggagttccttatttcctcatcacaagatggccaccagtggaccctcttctttcagaatggtaaggtcaaagtgtttcagggcaatcaagacagcttcacacccgtggtgaacagtcttgatcctccactcttgacacgataccttcgaatccatccacagtcttgggttcaccagattgcattgcgcatggaagtacttggatgcgaggctcaggacctctac

SEQ ID NO: 382 - protein, 1457 aa, synthetic construct
  REGION 1..1457: note = Variant of human B-domain deleted Factor VIII
MQIELSTCFFLCLLRFCFSATRRYYLGAVELSWDYMQSDLGELPVDARFPPRVPKSFPFNTSVVYKKTLFVEFTDHLFNIAKPRPPWMGLLGPTIQAEVYDTVVITLKNMASHPVSLHAVGVSYWKASEGAEYDDQTSQREKEDDKVFPGGSHTYVWQVLKENGPMASDPLCLTYSYLSHVDLVKDLNSGLIGALLVCREGSLAKEKTQTLHKFILLFAVFDEGKSWHSETKNSLMQDRDAASARAWPKMHTVNGYVNRSLPGLIGCHRKSVYWHVIGMGTTPEVHSIFLEGHTFLVRNHRQASLEISPITFLTAQTLLMDLGQFLLFCHISSHQHDGMEAYVKVDSCPEEPQLRMKNNEEAEDYDDDLTDSEMDVVRFDDDNSPSFIQIRSVAKKHPKTWVHYIAAEEEDWDYAPLVLAPDDRSYKSQYLNNGPQRIGRKYKKVRFMAYTDETFKTREAIQHESGILGPLLYGEVGDTLLIIFKNQASRPYNIYPHGITDVRPLYSRRLPKGVKHLKDFPILPGEIFKYKWTVTVEDGPTKSDPRCLTRYYSSFVNMERDLASGLIGPLLICYKESVDQRGNQIMSDKRNVILFSVFDENRSWYLTENIQRFLPWPAGVQLEDPEFQASNIMHSINGYVFDSLQLSVCLHEVAYWYILSIGAQTDFLSVFFSGYTFKHKMVYEDTLTLFPFSGETVFMSMENPGLWILGCHNSDFRNRGMTALLKVSSCDKNTGDYYEDSYEDISAYLLSKNNAIEPRSFSQNPPVLKRHQREITRTTLQSDQEEIDYDDTISVEMKKEDFDIYDEDENQSPRSFQKKTRHYFIAAVERLWDYGMSSSPHVLRNRAQSGSVPQFKKVVFQEFTDGSFTQPLYRGELNEHLGLLGPYIRAEVEDNIMVTFRNQASRPYSFYSSLISYEEDQRQGAEPRKNFVKPNETKTYFWKVQHHMAPTKDEFDCKAWAYFSDVDLEKDVHSGLIGPLLVCHTNTLNPAHGRQVTVQEFALFFTIFDETKSWYFTENMERNCRAPCNIQMEDPTFKENYRFHAINGYIMDTLPGLVMAQDQRIRWYLLSMGSNENIHSIHFSGHVFTVRKKEEYKMALYNLYPGVFETVEMLPSKAGIWRVECLIGEHLHAGMSTLFLVYSNKCQTPLGMASGHIRDFQITASGQYGQWAPKLARLHYSGSINAWSTKEPFSWIKVDLLAPMIIHGIKTQGARQKFSSLYISQFIIMYSLDGKKWQTYRGNSTGTLMVFFGNVDSSGIKHNIFNPPIIARYIRLHPTHYSIRSTLRMELMGCDLNSCSMPLGMESKAISDAQITASSYFTNMFATWSPSKARLHLQGRSNAWRPQVNNPKEWLQVDFQKTMKVTGVTTQGVKSLDTSMYVKEFLISSSQDGHQWTLFFQNGKVKVFQGNQDSFTPVVNSLDPPLLTRYLRIHPQSWVHQIALRMEVLGCEAQDLY

SEQ ID NO: 383 - DNA, 4371 bp, synthetic construct
  misc_feature 1..4371: note = Variant of human B-domain deleted Factor VIII
  source 1..4371: mol_type = other DNA
atgcagattgaactgtctacctgcttcttcctctgtttgctgaggttctgctttagcgccactagacggtactaccttggcgctgtggagctgtcctgggactatatgcagagtgatttgggagagcttcccgtcgacgcacgatttcctcctcgcgttccaaagtcatttcccttcaacacaagcgtggtgtacaagaagacgctcttcgtcgaattcaccgatcacctgttcaatatcgccaaacccagaccaccatggatgggtcttttggggcctaccatacaagcggaggtgtatgacacagttgttatcactctcaagaacatggcttctcatccggtaagtcttcacgcagtgggcgtgtcctactggaaagcttcagaaggagccgagtatgatgatcagacatcccagagggagaaagaagacgacaaggtatttccaggtgggtctcatacctatgtgtggcaagtgctcaaagagaatggccctatggcaagcgatccgctctgtttgacttacagctacctttcacacgttgacctcgtcaaggacctcaactccgggttgattggagccttgttggtatgcagggaaggatctcttgccaaagagaagacacagaccctccacaagtttatccttctctttgctgtgttcgatgagggcaaaagttggcatagcgaaacgaagaattccctcatgcaggatcgcgacgcagccagcgccagagcttggcccaagatgcacactgtgaacggatatgtcaataggtcacttcctggcttgattgggtgtcatcggaaaagtgtctactggcacgtgatcggaatggggacaacaccagaggtccactccatatttctcgaaggccataccttccttgttcgaaaccacagacaggcatccttggagatctctcccattacctttctcactgcccaaacgctccttatggacttgggtcagttccttctcttctgccatatcagctcacaccagcatgatggtatggaagcttatgtgaaagtcgacagttgtcctgaggagccacagttgcgcatgaagaataatgaagaagccgaggattacgacgacgatctcaccgattctgagatggacgtggtgaggtttgatgacgacaactctccctccttcattcaaatccggagcgtggcgaagaaacaccccaagacttgggtccactatatagcggcggaagaggaggattgggattacgctcctcttgtattggcaccagatgaccgctcatacaaaagccagtacctcaacaacggaccgcagagaattggccggaagtataagaaagtgcgatttatggcctatacagacgaaacctttaagacaagggaggccatccagcatgagagtgggattttgggacctcttctttacggcgaagttggtgataccctcctcatcatcttcaagaatcaagcttctcgcccctataacatttacccacacgggatcactgacgttaggcctttgtatagcagaagacttcccaaaggcgtgaagcatctcaaagacttccccattttgccaggcgagatctttaagtacaaatggaccgtcacagtggaagatggaccgactaaatcagaccctcgatgccttacgcggtactattcctccttcgtgaatatggagagagatttggcaagcggactcataggaccactcctcatctgttacaaggaatctgtagaccagaggggtaaccagattatgagtgataaacgcaatgtgatcctttttagcgtcttcgacgagaaccggtcctggtacttgaccgagaatatacaaaggttccttcccaaccccgcaggcgttcagttggaagaccctgagtttcaggccagcaatattatgcactcaatcaacggctatgtgtttgatagtctccagctttctgtttgcctccatgaagtagcctattggtacatcttgtcaattggtgctcaaacagacttcctctccgtcttcttctccggctacacctttaagcacaagatggtgtatgaggacactctcacactctttccattttctggagaaaccgtgttcatgagcatggagaatccaggcctttggatcttgggttgccacaacagtgattttcgcaatcggggaatgactgctctcctcaaagtcagcagctgtgataagaacacaggcgactattacgaagattcttacgaggacataagtgcctacttgttgtccaagaataacgccattgagcccagatcattctcccagaatcctcccgtgcttaaaaggcatcagcgcgaaatcaccagaactactcttcagtctgatcaagaggagattgactatgacgacaccataagcgtggaaatgaagaaggaggatttcgatatctatgacgaagatgagaaccagtctccgcggagctttcagaagaagacgcgacactacttcattgcagcagtcgaaaggctttgggactacggtatgtcatcatcccctcatgtgttgcgcaatagagctcagagtggaagtgttccacagttcaagaaagtcgtctttcaagagtttacagatggcagcttcacacagcctctctatcggggcgagcttaacgaacatttgggactccttggtccctatatccgagccgaagtggaggacaacgtgatggttacctttaggaatcaagcctctcgcccctacagcttctactcctccctcatcagttatgaggaggatcagagacaaggcgctgaaccacggaagaactttgtgaaaccgaatgagacgaagacctacttctggaaagtacagcaccacatggcccccacaaaagacgaattcgattgcaaagcatgggcgtatttttcagacgttgacttggagaaagatgtacattcaggacttattggtcctttgttggtgtgtcacactaacactctcaatccagcccatggcaggcaggtgacagtccaggaattcgctcttttctttaccatctttgatgagaccaagtcctggtacttcacggaaaacatggagcgcaattgcagagccccctgtaacatacagatggaggaccctacctttaaggaaaattatcggttccacgcaatcaacggatacattatggatacactccctggccttgtgatggctcaggaccaacgaatcaggtggtacctcctcagcatgggttctaatgagaacatacactccattcacttttcaggacatgtgttcactgtccggaagaaagaagagtataagatggccctctacaatttgtatccaggcgtgtttgagaccgttgaaatgcttccctctaaagctggcatctggagagtagagtgcttgatcggagaacatcttcacgcaggtatgagcaccttgttcctcgtgtacagcaacaaatgtcagaccccacttggcatggccagtggacacattcgcgactttcagatcacagcatctggccagtatggacaatgggccccaaagttggctcgcctccattactccggtagcataaatgcgtggtccactaaagaacctttcagctggattaaggtcgatcttcttgcccccatgatcatccacggcattaagacacagggagcgaggcagaaattctcctccctctacatctcacagttcattattatgtatagtttggacggcaagaagtggcaaacttatagaggtaacagtactggaacactcatggtgttcttcggcaacgttgatagctctggcatcaaacacaacatctttaatcctcccataatagctcggtacatcagattgcatccgacccactacagcattaggagtacactccgaatggagcttatgggttgcgacttgaattcctgttcaatgccactcggaatggagtctaaagccatctctgatgcacagataaccgccagtagctactttacgaacatgtttgctacgtggtcaccctctaaggcaaggcttcatttgcaaggccggtctaatgcctggagacctcaggtgaacaacccgaaagaatggctccaggtggactttcagaagaccatgaaagtaacaggtgtcactactcagggagttaagtccttggataccagcatgtatgtgaaggagttccttatttcctcatcacaagatggccaccagtggaccctcttctttcagaatggtaaggtcaaagtgtttcagggcaatcaagacagcttcacacccgtggtgaacagtcttgatcctccactcttgacacgataccttcgaatccatccacagtcttgggttcaccagattgcattgcgcatggaagtacttggatgcgaggctcaggacctctac

SEQ ID NO: 384 - protein, 1457 aa, synthetic construct
  REGION 1..1457: note = Variant of human B-domain deleted Factor VIII
MQIELSTCFFLCLLRFCFSATRRYYLGAVELSWDYMQSDLGELPVDARFPPRVPKSFPFNTSVVYKKTLFVEFTDHLFNIAKPRPPWMGLLGPTIQAEVYDTVVITLKNMASHPVSLHAVGVSYWKASEGAEYDDQTSQREKEDDKVFPGGSHTYVWQVLKENGPMASDPLCLTYSYLSHVDLVKDLNSGLIGALLVCREGSLAKEKTQTLHKFILLFAVFDEGKSWHSETKNSLMQDRDAASARAWPKMHTVNGYVNRSLPGLIGCHRKSVYWHVIGMGTTPEVHSIFLEGHTFLVRNHRQASLEISPITFLTAQTLLMDLGQFLLFCHISSHQHDGMEAYVKVDSCPEEPQLRMKNNEEAEDYDDDLTDSEMDVVRFDDDNSPSFIQIRSVAKKHPKTWVHYIAAEEEDWDYAPLVLAPDDRSYKSQYLNNGPQRIGRKYKKVRFMAYTDETFKTREAIQHESGILGPLLYGEVGDTLLIIFKNQASRPYNIYPHGITDVRPLYSRRLPKGVKHLKDFPILPGEIFKYKWTVTVEDGPTKSDPRCLTRYYSSFVNMERDLASGLIGPLLICYKESVDQRGNQIMSDKRNVILFSVFDENRSWYLTENIQRFLPNPAGVQLEDPEFQASNIMHSINGYVFDSLQLSVCLHEVAYWYILSIGAQTDFLSVFFSGYTFKHKMVYEDTLTLFPFSGETVFMSMENPGLWILGCHNSDFRNRGMTALLKVSSCDKNTGDYYEDSYEDISAYLLSKNNAIEPRSFSQNPPVLKRHQREITRTTLQSDQEEIDYDDTISVEMKKEDFDIYDEDENQSPRSFQKKTRHYFIAAVERLWDYGMSSSPHVLRNRAQSGSVPQFKKVVFQEFTDGSFTQPLYRGELNEHLGLLGPYIRAEVEDNVMVTFRNQASRPYSFYSSLISYEEDQRQGAEPRKNFVKPNETKTYFWKVQHHMAPTKDEFDCKAWAYFSDVDLEKDVHSGLIGPLLVCHTNTLNPAHGRQVTVQEFALFFTIFDETKSWYFTENMERNCRAPCNIQMEDPTFKENYRFHAINGYIMDTLPGLVMAQDQRIRWYLLSMGSNENIHSIHFSGHVFTVRKKEEYKMALYNLYPGVFETVEMLPSKAGIWRVECLIGEHLHAGMSTLFLVYSNKCQTPLGMASGHIRDFQITASGQYGQWAPKLARLHYSGSINAWSTKEPFSWIKVDLLAPMIIHGIKTQGARQKFSSLYISQFIIMYSLDGKKWQTYRGNSTGTLMVFFGNVDSSGIKHNIFNPPIIARYIRLHPTHYSIRSTLRMELMGCDLNSCSMPLGMESKAISDAQITASSYFTNMFATWSPSKARLHLQGRSNAWRPQVNNPKEWLQVDFQKTMKVTGVTTQGVKSLDTSMYVKEFLISSSQDGHQWTLFFQNGKVKVFQGNQDSFTPVVNSLDPPLLTRYLRIHPQSWVHQIALRMEVLGCEAQDLY

SEQ ID NO: 385 - DNA, 4371 bp, synthetic construct
  misc_feature 1..4371: note = Variant of human B-domain deleted Factor VIII
  source 1..4371: mol_type = other DNA
atgcagattgaactgtctacctgcttcttcctctgtttgctgaggttctgctttagcgccactagacggtactaccttggcgctgtggagctgtcctgggactatatgcagagtgatttgggagagcttcccgtcgacgcacgatttcctcctcgcgttccaaagtcatttcccttcaacacaagcgtggtgtacaagaagacgctcttcgtcgaattcaccgatcacctgttcaatatcgccaaacccagaccaccatggatgggtcttttggggcctaccatacaagcggaggtgtatgacacagttgttatcactctcaagaacatggcttctcatccggtaagtcttcacgcagtgggcgtgtcctactggaaagcttcagaaggagccgagtatgatgatcagacatcccagagggagaaagaagacgacaaggtatttccaggtgggtctcatacctatgtgtggcaagtgctcaaagagaatggccctatggcaagcgatccgctctgtttgacttacagctacctttcacacgttgacctcgtcaaggacctcaactccgggttgattggagccttgttggtatgcagggaaggatctcttgccaaagagaagacacagaccctccacaagtttatccttctctttgctgtgttcgatgagggcaaaagttggcatagcgaaacgaagaattccctcatgcaggatcgcgacgcagccagcgccagagcttggcccaagatgcacactgtgaacggatatgtcaataggtcacttcctggcttgattgggtgtcatcggaaaagtgtctactggcacgtgatcggaatggggacaacaccagaggtccactccatatttctcgaaggccataccttccttgttcgaaaccacagacaggcatccttggagatctctcccattacctttctcactgcccaaacgctccttatggacttgggtcagttccttctcttctgccatatcagctcacaccagcatgatggtatggaagcttatgtgaaagtcgacagttgtcctgaggagccacagttgcgcatgaagaataatgaagaagccgaggattacgacgacgatctcaccgattctgagatggacgtggtgaggtttgatgacgacaactctccctccttcattcaaatccggagcgtggcgaagaaacaccccaagacttgggtccactatatagcggcggaagaggaggattgggattacgctcctcttgtattggcaccagatgaccgctcatacaaaagccagtacctcaacaacggaccgcagagaattggccggaagtataagaaagtgcgatttatggcctatacagacgaaacctttaagacaagggaggccatccagcatgagagtgggattttgggacctcttctttacggcgaagttggtgataccctcctcatcatcttcaagaatcaagcttttcgcccctataacatttacccacacgggatcactgacgttaggcctttgtatagcagaagacttcccaaaggcgtgaagcatctcaaagacttccccattttgccaggcgagatctttaagtacaaatggaccgtcacagtggaagatggaccgactaaatcagaccctcgatgccttacgcggtactattcctccttcgtgaatatggagagagatttggcaagcggactcataggaccactcctcatctgttacaaggaatctgtagaccagaggggtaaccagattatgagtgataaacgcaatgtgatcctttttagcgtcttcgacgagaaccggtcctggtacttgaccgagaatatacaaaggttccttcccaaccccgcaggcgttcagttggaagaccctgagtttcaggccagcaatattatgcactcaatcaacggctatgtgtttgatagtctccagctttctgtttgcctccatgaagtagcctattggtacatcttgtcaattggtgctcaaacagacttcctctccgtcttcttctccggctacacctttaagcacaagatggtgtatgaggacactctcacactctttccattttctggagaaaccgtgttcatgagcatggagaatccaggcctttggatcttgggttgccacaacagtgattttcgcaatcggggaatgactgctctcctcaaagtcagcagctgtgataagaacacaggcgactattacgaagattcttacgaggacataagtgcctacttgttgtccaagaataacgccattgagcccagatcattctcccagaatcctcccgtgcttaaaaggcatcagcgcgaaatcaccagaactactcttcagtctgatcaagaggagattgactatgacgacaccataagcgtggaaatgaagaaggaggatttcgatatctatgacgaagatgagaaccagtctccgcggagctttcagaagaagacgcgacactacttcattgcagcagtcgaaaggctttgggactacggtatgtcatcatcccctcatgtgttgcgcaatagagctcagagtggaagtgttccacagttcaagaaagtcgtctttcaagagtttacagatggcagcttcacacagcctctctatcggggcgagcttaacgaacatttgggactccttggtccctatatccgagccgaagtggaggacaacattatggttacctttaggaatcaagcctctcgcccctacagcttctactcctccctcatcagttatgaggaggatcagagacaaggcgctgaaccacggaagaactttgtgaaaccgaatgagacgaagacctacttctggaaagtacagcaccacatggcccccacaaaagacgaattcgattgcaaagcatgggcgtatttttcagacgttgacttggagaaagatgtacattcaggacttattggtcctttgttggtgtgtcacactaacactctcaatccagcccatggcaggcaggtgacagtccaggaattcgctcttttctttaccatctttgatgagaccaagtcctggtacttcacggaaaacatggagcgcaattgcagagccccctgtaacatacagatggaggaccctacctttaaggaaaattatcggttccacgcaatcaacggatacattatggatacactccctggccttgtgatggctcaggaccaacgaatcaggtggtacctcctcagcatgggttctaatgagaacatacactccattcacttttcaggacatgtgttcactgtccggaagaaagaagagtataagatggccctctacaatttgtatccaggcgtgtttgagaccgttgaaatgcttccctctaaagctggcatctggagagtagagtgcttgatcggagaacatcttcacgcaggtatgagcaccttgttcctcgtgtacagcaacaaatgtcagaccccacttggcatggccagtggacacattcgcgactttcagatcacagcatctggccagtatggacaatgggccccaaagttggctcgcctccattactccggtagcataaatgcgtggtccactaaagaacctttcagctggattaaggtcgatcttcttgcccccatgatcatccacggcattaagacacagggagcgaggcagaaattctcctccctctacatctcacagttcattattatgtatagtttggacggcaagaagtggcaaacttatagaggtaacagtactggaacactcatggtgttcttcggcaacgttgatagctctggcatcaaacacaacatctttaatcctcccataatagctcggtacatcagattgcatccgacccactacagcattaggagtacactccgaatggagcttatgggttgcgacttgaattcctgttcaatgccactcggaatggagtctaaagccatctctgatgcacagataaccgccagtagctactttacgaacatgtttgctacgtggtcaccctctaaggcaaggcttcatttgcaaggccggtctaatgcctggagacctcaggtgaacaacccgaaagaatggctccaggtggactttcagaagaccatgaaagtaacaggtgtcactactcagggagttaagtccttggataccagcatgtatgtgaaggagttccttatttcctcatcacaagatggccaccagtggaccctcttctttcagaatggtaaggtcaaagtgtttcagggcaatcaagacagcttcacacccgtggtgaacagtcttgatcctccactcttgacacgataccttcgaatccatccacagtcttgggttcaccagattgcattgcgcatggaagtacttggatgcgaggctcaggacctctac

SEQ ID NO: 386 - protein, 1457 aa, synthetic construct
  REGION 1..1457: note = Variant of human B-domain deleted Factor VIII
MQIELSTCFFLCLLRFCFSATRRYYLGAVELSWDYMQSDLGELPVDARFPPRVPKSFPFNTSVVYKKTLFVEFTDHLFNIAKPRPPWMGLLGPTIQAEVYDTVVITLKNMASHPVSLHAVGVSYWKASEGAEYDDQTSQREKEDDKVFPGGSHTYVWQVLKENGPMASDPLCLTYSYLSHVDLVKDLNSGLIGALLVCREGSLAKEKTQTLHKFILLFAVFDEGKSWHSETKNSLMQDRDAASARAWPKMHTVNGYVNRSLPGLIGCHRKSVYWHVIGMGTTPEVHSIFLEGHTFLVRNHRQASLEISPITFLTAQTLLMDLGQFLLFCHISSHQHDGMEAYVKVDSCPEEPQLRMKNNEEAEDYDDDLTDSEMDVVRFDDDNSPSFIQIRSVAKKHPKTWVHYIAAEEEDWDYAPLVLAPDDRSYKSQYLNNGPQRIGRKYKKVRFMAYTDETFKTREAIQHESGILGPLLYGEVGDTLLIIFKNQAFRPYNIYPHGITDVRPLYSRRLPKGVKHLKDFPILPGEIFKYKWTVTVEDGPTKSDPRCLTRYYSSFVNMERDLASGLIGPLLICYKESVDQRGNQIMSDKRNVILFSVFDENRSWYLTENIQRFLPNPAGVQLEDPEFQASNIMHSINGYVFDSLQLSVCLHEVAYWYILSIGAQTDFLSVFFSGYTFKHKMVYEDTLTLFPFSGETVFMSMENPGLWILGCHNSDFRNRGMTALLKVSSCDKNTGDYYEDSYEDISAYLLSKNNAIEPRSFSQNPPVLKRHQREITRTTLQSDQEEIDYDDTISVEMKKEDFDIYDEDENQSPRSFQKKTRHYFIAAVERLWDYGMSSSPHVLRNRAQSGSVPQFKKVVFQEFTDGSFTQPLYRGELNEHLGLLGPYIRAEVEDNIMVTFRNQASRPYSFYSSLISYEEDQRQGAEPRKNFVKPNETKTYFWKVQHHMAPTKDEFDCKAWAYFSDVDLEKDVHSGLIGPLLVCHTNTLNPAHGRQVTVQEFALFFTIFDETKSWYFTENMERNCRAPCNIQMEDPTFKENYRFHAINGYIMDTLPGLVMAQDQRIRWYLLSMGSNENIHSIHFSGHVFTVRKKEEYKMALYNLYPGVFETVEMLPSKAGIWRVECLIGEHLHAGMSTLFLVYSNKCQTPLGMASGHIRDFQITASGQYGQWAPKLARLHYSGSINAWSTKEPFSWIKVDLLAPMIIHGIKTQGARQKFSSLYISQFIIMYSLDGKKWQTYRGNSTGTLMVFFGNVDSSGIKHNIFNPPIIARYIRLHPTHYSIRSTLRMELMGCDLNSCSMPLGMESKAISDAQITASSYFTNMFATWSPSKARLHLQGRSNAWRPQVNNPKEWLQVDFQKTMKVTGVTTQGVKSLDTSMYVKEFLISSSQDGHQWTLFFQNGKVKVFQGNQDSFTPVVNSLDPPLLTRYLRIHPQSWVHQIALRMEVLGCEAQDLY

SEQ ID NO: 387 - DNA, 4371 bp, synthetic construct
  misc_feature 1..4371: note = Variant of human B-domain deleted Factor VIII
  source 1..4371: mol_type = other DNA
atgcagattgaactgtctacctgcttcttcctctgtttgctgaggttctgctttagcgccactagacggtactaccttggcgctgtggagctgtcctgggactatatgcagagtgatttgggagagcttcccgtcgacgcacgatttcctcctcgcgttccaaagtcatttcccttcaacacaagcgtggtgtacaagaagacgctcttcgtcgaattcaccgatcacctgttcaatatcgccaaacccagaccaccatggatgggtcttttggggcctaccatacaagcggaggtgtatgacacagttgttatcactctcaagaacatggcttctcatccggtaagtcttcacgcagtgggcgtgtcctactggaaagcttcagaaggagccgagtatgatgatcagacatcccagagggagaaagaagacgacaaggtatttccaggtgggtctcatacctatgtgtggcaagtgctcaaagagaatggccctatggcaagcgatccgctctgtttgacttacagctacctttcacacgttgacctcgtcaaggacctcaactccgggttgattggagccttgttggtatgcagggaaggatctcttgccaaagagaagacacagaccctccacaagtttatccttctctttgctgtgttcgatgagggcaaaagttggcatagcgaaacgaagaattccctcatgcaggatcgcgacgcagccagcgccagagcttggcccaagatgcacactgtgaacggatatgtcaataggtcacttcctggcttgattgggtgtcatcggaaaagtgtctactggcacgtgatcggaatggggacaacaccagaggtccactccatatttctcgaaggccataccttccttgttcgaaaccacagacaggcatccttggagatctctcccattacctttctcactgcccaaacgctccttatggacttgggtcagttccttctcttctgccatatcagctcacaccagcatgatggtatggaagcttatgtgaaagtcgacagttgtcctgaggagccacagttgcgcatgaagaataatgaagaagccgaggattacgacgacgatctcaccgattctgagatggacgtggtgaggtttgatgacgacaactctccctccttcattcaaatccggagcgtggcgaagaaacaccccaagacttgggtccactatatagcggcggaagaggaggattgggattacgctcctcttgtattggcaccagatgaccgctcatacaaaagccagtacctcaacaacggaccgcagagaattggccggaagtataagaaagtgcgatttatggcctatacagacgaaacctttaagacaagggaggccatccagcatgagagtgggattttgggacctcttctttacggcgaagttggtgataccctcctcatcatcttcaagaatcaagcttctcgcccctataacatttacccacacgggatcactgacgttaggcctttgtatagcagaagacttcccaaaggcgtgaagcatctcaaagacttccccattttgccaggcgagatctttaagtacaaatggaccgtcacagtggaagatggaccgactaaatcagaccctcgatgccttacgcggtactattcctccttcgtgaatatggagagagatttggcaagcggactcataggaccactcctcatctgttacaaggaatctgtagaccagaggggtaaccagattatgagtgataaacgcaatgtgatcctttttagcgtcttcgacgagaaccggtcctggtacttgaccgagaatatacaaaggttccttcccaaccccgcaggcgttcagttggaagaccctgagtttcaggccagcaatattatgcactcaatcaacggctatgtgtttgatagtctccagctttctgtttgcctccatgaagtagcctattggtacatcttgtcaattggtgctcaaacagacttcctctccgtcttcttctccggctacacctttaagcacaagatggtgtatgaggacactctcacactctttccattttctggagaaaccgtgttcatgagcatggagaatccaggcctttggatcttgggttgccacaacagtgattttcgcaatcggggaatgactgctctcctcaaagtcagcagctgtgataagaacacaggcgactattacgaagattcttacgaggacataagtgcctacttgttgtccaagaataacgccattgagcccagatcattctcccagaatcctcccgtgcttaaaaggcatcagcgcgaaatcaccagaactactcttcagtctgatcaagaggagattgactatgacgacaccataagcgtggaaatgaagaaggaggatttcgatatctatgacgaagatgagaaccagtctccgcggagctttcagaagaagacgcgacactacttcattgcagcagtcgaaaggctttgggactacggtatgtcatcatcccctcatgtgttgcgcaatagagctcagagtggaagtgttccacagttcaagaaagtcgtctttcaagagtttacagatggcagcttcacacagcctctctatcggggcgagcttaacgaacatttgggactccttggtccctatatccgagccgaagtggaggacaacattatggttacctttaggaatcaagcctctcgcccctacagcttctactcctccctcatcagttatgaggaggatcagagacaaggcgctgaaccacggaagaactttgtgaaaccgaatgagacgaagacctacttctggaaagtacagcaccacatggcccccacaaaagacgaattcgattgcaaagcatgggcgtatttttcagacgttgacttggagaaagatgtacattcaggacttattggtcctttgttggtgtgtcacactaacactctcaatccagcccatggcaggcaggtgacagtccaggaattcgctcttttctttaccatctttgatgagaccaagtcctggtacttcacggaaaacatggagcgcaattgcagagccccctgtaacatacagatggaggaccctacctttaaggaaaattatcggttccacgcaatcaacggatacccgatggatacactccctggccttgtgatggctcaggaccaacgaatcaggtggtacctcctcagcatgggttctaatgagaacatacactccattcacttttcaggacatgtgttcactgtccggaagaaagaagagtataagatggccctctacaatttgtatccaggcgtgtttgagaccgttgaaatgcttccctctaaagctggcatctggagagtagagtgcttgatcggagaacatcttcacgcaggtatgagcaccttgttcctcgtgtacagcaacaaatgtcagaccccacttggcatggccagtggacacattcgcgactttcagatcacagcatctggccagtatggacaatgggccccaaagttggctcgcctccattactccggtagcataaatgcgtggtccactaaagaacctttcagctggattaaggtcgatcttcttgcccccatgatcatccacggcattaagacacagggagcgaggcagaaattctcctccctctacatctcacagttcattattatgtatagtttggacggcaagaagtggcaaacttatagaggtaacagtactggaacactcatggtgttcttcggcaacgttgatagctctggcatcaaacacaacatctttaatcctcccataatagctcggtacatcagattgcatccgacccactacagcattaggagtacactccgaatggagcttatgggttgcgacttgaattcctgttcaatgccactcggaatggagtctaaagccatctctgatgcacagataaccgccagtagctactttacgaacatgtttgctacgtggtcaccctctaaggcaaggcttcatttgcaaggccggtctaatgcctggagacctcaggtgaacaacccgaaagaatggctccaggtggactttcagaagaccatgaaagtaacaggtgtcactactcagggagttaagtccttggataccagcatgtatgtgaaggagttccttatttcctcatcacaagatggccaccagtggaccctcttctttcagaatggtaaggtcaaagtgtttcagggcaatcaagacagcttcacacccgtggtgaacagtcttgatcctccactcttgacacgataccttcgaatccatccacagtcttgggttcaccagattgcattgcgcatggaagtacttggatgcgaggctcaggacctctac

SEQ ID NO: 388 - protein, 1457 aa, synthetic construct
  REGION 1..1457: note = Variant of human B-domain deleted Factor VIII
MQIELSTCFFLCLLRFCFSATRRYYLGAVELSWDYMQSDLGELPVDARFPPRVPKSFPFNTSVVYKKTLFVEFTDHLFNIAKPRPPWMGLLGPTIQAEVYDTVVITLKNMASHPVSLHAVGVSYWKASEGAEYDDQTSQREKEDDKVFPGGSHTYVWQVLKENGPMASDPLCLTYSYLSHVDLVKDLNSGLIGALLVCREGSLAKEKTQTLHKFILLFAVFDEGKSWHSETKNSLMQDRDAASARAWPKMHTVNGYVNRSLPGLIGCHRKSVYWHVIGMGTTPEVHSIFLEGHTFLVRNHRQASLEISPITFLTAQTLLMDLGQFLLFCHISSHQHDGMEAYVKVDSCPEEPQLRMKNNEEAEDYDDDLTDSEMDVVRFDDDNSPSFIQIRSVAKKHPKTWVHYIAAEEEDWDYAPLVLAPDDRSYKSQYLNNGPQRIGRKYKKVRFMAYTDETFKTREAIQHESGILGPLLYGEVGDTLLIIFKNQASRPYNIYPHGITDVRPLYSRRLPKGVKHLKDFPILPGEIFKYKWTVTVEDGPTKSDPRCLTRYYSSFVNMERDLASGLIGPLLICYKESVDQRGNQIMSDKRNVILFSVFDENRSWYLTENIQRFLPNPAGVQLEDPEFQASNIMHSINGYVFDSLQLSVCLHEVAYWYILSIGAQTDFLSVFFSGYTFKHKMVYEDTLTLFPFSGETVFMSMENPGLWILGCHNSDFRNRGMTALLKVSSCDKNTGDYYEDSYEDISAYLLSKNNAIEPRSFSQNPPVLKRHQREITRTTLQSDQEEIDYDDTISVEMKKEDFDIYDEDENQSPRSFQKKTRHYFIAAVERLWDYGMSSSPHVLRNRAQSGSVPQFKKVVFQEFTDGSFTQPLYRGELNEHLGLLGPYIRAEVEDNIMVTFRNQASRPYSFYSSLISYEEDQRQGAEPRKNFVKPNETKTYFWKVQHHMAPTKDEFDCKAWAYFSDVDLEKDVHSGLIGPLLVCHTNTLNPAHGRQVTVQEFALFFTIFDETKSWYFTENMERNCRAPCNIQMEDPTFKENYRFHAINGYPMDTLPGLVMAQDQRIRWYLLSMGSNENIHSIHFSGHVFTVRKKEEYKMALYNLYPGVFETVEMLPSKAGIWRVECLIGEHLHAGMSTLFLVYSNKCQTPLGMASGHIRDFQITASGQYGQWAPKLARLHYSGSINAWSTKEPFSWIKVDLLAPMIIHGIKTQGARQKFSSLYISQFIIMYSLDGKKWQTYRGNSTGTLMVFFGNVDSSGIKHNIFNPPIIARYIRLHPTHYSIRSTLRMELMGCDLNSCSMPLGMESKAISDAQITASSYFTNMFATWSPSKARLHLQGRSNAWRPQVNNPKEWLQVDFQKTMKVTGVTTQGVKSLDTSMYVKEFLISSSQDGHQWTLFFQNGKVKVFQGNQDSFTPVVNSLDPPLLTRYLRIHPQSWVHQIALRMEVLGCEAQDLY

SEQ ID NO: 389 - DNA, 4371 bp, synthetic construct
  misc_feature 1..4371: note = Variant of human B-domain deleted Factor VIII
  source 1..4371: mol_type = other DNA
atgcagattgaactgtctacctgcttcttcctctgtttgctgaggttctgctttagcgccactagacggtactaccttggcgctgtggagctgtcctgggactatatgcagagtgatttgggagagcttcccgtcgacgcacgatttcctcctcgcgttccaaagtcatttcccttcaacacaagcgtggtgtacaagaagacgctcttcgtcgaattcaccgatcacctgttcaatatcgccaaacccagaccaccatggatgggtcttttggggcctaccatacaagcggaggtgtatgacacagttgttatcactctcaagaacatggcttctcatccggtaagtcttcacgcagtgggcgtgtcctactggaaagcttcagaaggagccgagtatgatgatcagacatcccagagggagaaagaagacgacaaggtatttccaggtgggtctcatacctatgtgtggcaagtgctcaaagagaatggccctatggcaagcgatccgctctgtttgacttacagctacctttcacacgttgacctcgtcaaggacctcaactccgggttgattggagccttgttggtatgcagggaaggatctcttgccaaagagaagacacagaccctccacaagtttatccttctctttgctgtgttcgatgagggcaaaagttggcatagcgaaacgaagaattccctcatgcaggatcgcgacgcagccagcgccagagcttggcccaagatgcacactgtgaacggatatgtcaataggtcacttcctggcttgattgggtgtcatcggaaaagtgtctactggcacgtgatcggaatggggacaacaccagaggtccactccatatttctcgaaggccataccttccttgttcgaaaccacagacaggcatccttggagatctctcccattacctttctcactgcccaaacgctccttatggacttgggtcagttccttctcttctgccatatcagctcacaccagcatgatggtatggaagcttatgtgaaagtcgacagttgtcctgaggagccacagttgcgcatgaagaataatgaagaagccgaggattacgacgacgatctcaccgattctgagatggacgtggtgaggtttgatgacgacaactctccctccttcattcaaatccggagcgtggcgaagaaacaccccaagacttgggtccactatatagcggcggaagaggaggattgggattacgctcctcttgtattggcaccagatgaccgctcatacaaaagccagtacctcaacaacggaccgcagagaattggccggaagtataagaaagtgcgatttatggcctatacagacgaaacctttaagacaagggaggccatccagcatgagagtgggattttgggacctcttctttacggcgaagttggtgataccctcctcatcatcttcaagaatcaagcttctcgcccctataacatttacccacacgggatcactgacgttaggcctttgtatagcagaagacttcccaaaggcgtgaagcatctcaaagacttccccattttgccaggcgagatctttaagtacaaatggaccgtcacagtggaagatggaccgactaaatcagaccctcgatgccttacgcggtactattcctccttcgtgaatatggagagagatttggcaagcggactcataggaccactcctcatctgttacaaggaatctgtagaccagaggggtaaccagattatgagtgataaacgcaatgtgatcctttttagcgtcttcgacgagaaccggtcctggtacttgaccgagaatatacaaaggttccttcccaaccccgcaggcgttcagttggaagaccctgagtttcaggccagcaatattatgcactcaatcaacggctatgtgtttgatagtctccagctttctgtttgcctccatgaagtagcctattggtacatcttgtcaattggtgctcaaacagacttcctctccgtcttcttctccggctacacctttaagcacaagatggtgtatgaggacactctcacactctttccattttctggagaaaccgtgttcatgagcatggagaatccaggcctttggatcttgggttgccacaacagtgattttcgcaatcggggaatgactgctctcctcaaagtcagcagctgtgataagaacacaggcgactattacgaagattcttacgaggacataagtgcctacttgttgtccaagaataacgccattgagcccagatcattctcccagaatcctcccgtgcttaaaaggcatcagcgcgaaatcaccagaactactcttcagtctgatcaagaggagattgactatgacgacaccataagcgtggaaatgaagaaggaggatttcgatatctatgacgaagatgagaaccagtctccgcggagctttcagaagaagacgcgacactacttcattgcagcagtcgaaaggctttgggactacggtatgtcatcatcccctcatgtgttgcgcaatagagctcagagtggaagtgttccacagttcaagaaagtcgtctttcaagagtttacagatggcagcttcacacagcctctctatcggggcgagcttaacgaacatttgggactccttggtccctatatccgagccgaagtggaggacaacattggggttacctttaggaatcaagcctctcgcccctacagcttctactcctccctcatcagttatgaggaggatcagagacaaggcgctgaaccacggaagaactttgtgaaaccgaatgagacgaagacctacttctggaaagtacagcaccacatggcccccacaaaagacgaattcgattgcaaagcatgggcgtatttttcagacgttgacttggagaaagatgtacattcaggacttattggtcctttgttggtgtgtcacactaacactctcaatccagcccatggcaggcaggtgacagtccaggaattcgctcttttctttaccatctttgatgagaccaagtcctggtacttcacggaaaacatggagcgcaattgcagagccccctgtaacatacagatggaggaccctacctttaaggaaaattatcggttccacgcaatcaacggatacattatggatacactccctggccttgtgatggctcaggaccaacgaatcaggtggtacctcctcagcatgggttctaatgagaacatacactccattcacttttcaggacatgtgttcactgtccggaagaaagaagagtataagatggccctctacaatttgtatccaggcgtgtttgagaccgttgaaatgcttccctctaaagctggcatctggagagtagagtgcttgatcggagaacatcttcacgcaggtatgagcaccttgttcctcgtgtacagcaacaaatgtcagaccccacttggcatggccagtggacacattcgcgactttcagatcacagcatctggccagtatggacaatgggccccaaagttggctcgcctccattactccggtagcataaatgcgtggtccactaaagaacctttcagctggattaaggtcgatcttcttgcccccatgatcatccacggcattaagacacagggagcgaggcagaaattctcctccctctacatctcacagttcattattatgtatagtttggacggcaagaagtggcaaacttatagaggtaacagtactggaacactcatggtgttcttcggcaacgttgatagctctggcatcaaacacaacatctttaatcctcccataatagctcggtacatcagattgcatccgacccactacagcattaggagtacactccgaatggagcttatgggttgcgacttgaattcctgttcaatgccactcggaatggagtctaaagccatctctgatgcacagataaccgccagtagctactttacgaacatgtttgctacgtggtcaccctctaaggcaaggcttcatttgcaaggccggtctaatgcctggagacctcaggtgaacaacccgaaagaatggctccaggtggactttcagaagaccatgaaagtaacaggtgtcactactcagggagttaagtccttggataccagcatgtatgtgaaggagttccttatttcctcatcacaagatggccaccagtggaccctcttctttcagaatggtaaggtcaaagtgtttcagggcaatcaagacagcttcacacccgtggtgaacagtcttgatcctccactcttgacacgataccttcgaatccatccacagtcttgggttcaccagattgcattgcgcatggaagtacttggatgcgaggctcaggacctctac

SEQ ID NO: 390 - protein, 1457 aa, synthetic construct
  REGION 1..1457: note = Variant of human B-domain deleted Factor VIII
MQIELSTCFFLCLLRFCFSATRRYYLGAVELSWDYMQSDLGELPVDARFPPRVPKSFPFNTSVVYKKTLFVEFTDHLFNIAKPRPPWMGLLGPTIQAEVYDTVVITLKNMASHPVSLHAVGVSYWKASEGAEYDDQTSQREKEDDKVFPGGSHTYVWQVLKENGPMASDPLCLTYSYLSHVDLVKDLNSGLIGALLVCREGSLAKEKTQTLHKFILLFAVFDEGKSWHSETKNSLMQDRDAASARAWPKMHTVNGYVNRSLPGLIGCHRKSVYWHVIGMGTTPEVHSIFLEGHTFLVRNHRQASLEISPITFLTAQTLLMDLGQFLLFCHISSHQHDGMEAYVKVDSCPEEPQLRMKNNEEAEDYDDDLTDSEMDVVRFDDDNSPSFIQIRSVAKKHPKTWVHYIAAEEEDWDYAPLVLAPDDRSYKSQYLNNGPQRIGRKYKKVRFMAYTDETFKTREAIQHESGILGPLLYGEVGDTLLIIFKNQASRPYNIYPHGITDVRPLYSRRLPKGVKHLKDFPILPGEIFKYKWTVTVEDGPTKSDPRCLTRYYSSFVNMERDLASGLIGPLLICYKESVDQRGNQIMSDKRNVILFSVFDENRSWYLTENIQRFLPNPAGVQLEDPEFQASNIMHSINGYVFDSLQLSVCLHEVAYWYILSIGAQTDFLSVFFSGYTFKHKMVYEDTLTLFPFSGETVFMSMENPGLWILGCHNSDFRNRGMTALLKVSSCDKNTGDYYEDSYEDISAYLLSKNNAIEPRSFSQNPPVLKRHQREITRTTLQSDQEEIDYDDTISVEMKKEDFDIYDEDENQSPRSFQKKTRHYFIAAVERLWDYGMSSSPHVLRNRAQSGSVPQFKKVVFQEFTDGSFTQPLYRGELNEHLGLLGPYIRAEVEDNIGVTFRNQASRPYSFYSSLISYEEDQRQGAEPRKNFVKPNETKTYFWKVQHHMAPTKDEFDCKAWAYFSDVDLEKDVHSGLIGPLLVCHTNTLNPAHGRQVTVQEFALFFTIFDETKSWYFTENMERNCRAPCNIQMEDPTFKENYRFHAINGYIMDTLPGLVMAQDQRIRWYLLSMGSNENIHSIHFSGHVFTVRKKEEYKMALYNLYPGVFETVEMLPSKAGIWRVECLIGEHLHAGMSTLFLVYSNKCQTPLGMASGHIRDFQITASGQYGQWAPKLARLHYSGSINAWSTKEPFSWIKVDLLAPMIIHGIKTQGARQKFSSLYISQFIIMYSLDGKKWQTYRGNSTGTLMVFFGNVDSSGIKHNIFNPPIIARYIRLHPTHYSIRSTLRMELMGCDLNSCSMPLGMESKAISDAQITASSYFTNMFATWSPSKARLHLQGRSNAWRPQVNNPKEWLQVDFQKTMKVTGVTTQGVKSLDTSMYVKEFLISSSQDGHQWTLFFQNGKVKVFQGNQDSFTPVVNSLDPPLLTRYLRIHPQSWVHQIALRMEVLGCEAQDLY

SEQ ID NO: 391 - DNA, 4371 bp, synthetic construct
  misc_feature 1..4371: note = Variant of human B-domain deleted Factor VIII
  source 1..4371: mol_type = other DNA
atgcagattgaactgtctacctgcttcttcctctgtttgctgaggttctgctttagcgccactagacggtactaccttggcgctgtggagctgtcctgggactatatgcagagtgatttgggagagcttcccgtcgacgcacgatttcctcctcgcgttccaaagtcatttcccttcaacacaagcgtggtgtacaagaagacgctcttcgtcgaattcaccgatcacctgttcaatatcgccaaacccagaccaccatggatgggtcttttggggcctaccatacaagcggaggtgtatgacacagttgttatcactctcaagaacatggcttctcatccggtaagtcttcacgcagtgggcgtgtcctactggaaagcttcagaaggagccgagtatgatgatcagacatcccagagggagaaagaagacgacaaggtatttccaggtgggtctcatacctatgtgtggcaagtgctcaaagagaatggccctatggcaagcgatccgctctgtttgacttacagctacctttcacacgttgacctcgtcaaggacctcaactccgggttgattggagccttgttggtatgcagggaaggatctcttgccaaagagaagacacagaccctccacaagtttatccttctctttgctgtgttcgatgagggcaaaagttggcatagcgaaacgaagaattccctcatgcaggatcgcgacgcagccagcgccagagcttggcccaagatgcacactgtgaacggatatgtcaataggtcacttcctggcttgattgggtgtcatcggaaaagtgtctactggcacgtgatcggaatggggacaacaccagaggtccactccatatttctcgaaggccataccttccttgttcgaaaccacagacaggcatccttggagatctctcccattacctttctcactgcccaaacgctccttatggacttgggtcagttccttctcttctgccatatcagctcacaccagcatgatggtatggaagcttatgtgaaagtcgacagttgtcctgaggagccacagttgcgcatgaagaataatgaagaagccgaggattacgacgacgatctcaccgattctgagatggacgtggtgaggtttgatgacgacaactctccctccttcattcaaatccggagcgtggcgaagaaacaccccaagacttgggtccactatatagcggcggaagaggaggattgggattacgctcctcttgtattggcaccagatgaccgctcatacaaaagccagtacctcaacaacggaccgcagagaattggccggaagtataagaaagtgcgatttatggcctatacagacgaaacctttaagacaagggaggccatccagcatgagagtgggattttgggacctcttctttacggcgaagttggtgataccctcctcatcatcttcaagaatcaagcttctcgcccctataacatttacccacacgggatcactgacgttaggcctttgtatagcagaagacttcccaaaggcgtgaagcatctcaaagacttccccattttgccaggcgagatctttaagtacaaatggaccgtcacagtggaagatggaccgactaaatcagaccctcgatgccttacgcggtactattcctccttcgtgaatatggagagagatttggcaagcggactcataggaccactcctcatctgttacaaggaatctgtagaccagaggggtaaccagattatgagtgataaacgcaatgtgatcctttttagcgtcttcgacgagaaccggtcctggtacttgaccgagaatatacaaaggttccttcccaaccccgcaggcgttcagttggaagaccctgagtttcaggccagcaatattatgcactcaatcaacggctatgtgtttgatagtctccagctttctgtttgcctccatgaagtagcctattggtacatcttgtcaattggtgctcaaacagacttcctctccgtcttcttctccggctacacctttaagcacaagatggtgtatgaggacactctcacactctttccattttctggagaaaccgtgttcatgagcatggagaatccaggcctttggatcttgggttgccacaacagtgattttcgcaatcggggaatgactgctctcctcaaagtcagcagctgtgataagaacacaggcgactattacgaagattcttacgaggacataagtgcctacactttgtccaagaataacgccattgagcccagatcattctcccagaatcctcccgtgcttaaaaggcatcagcgcgaaatcaccagaactactcttcagtctgatcaagaggagattgactatgacgacaccataagcgtggaaatgaagaaggaggatttcgatatctatgacgaagatgagaaccagtctccgcggagctttcagaagaagacgcgacactacttcattgcagcagtcgaaaggctttgggactacggtatgtcatcatcccctcatgtgttgcgcaatagagctcagagtggaagtgttccacagttcaagaaagtcgtctttcaagagtttacagatggcagcttcacacagcctctctatcggggcgagcttaacgaacatttgggactccttggtccctatatccgagccgaagtggaggacaacattatggttacctttaggaatcaagcctctcgcccctacagcttctactcctccctcatcagttatgaggaggatcagagacaaggcgctgaaccacggaagaactttgtgaaaccgaatgagacgaagacctacttctggaaagtacagcaccacatggcccccacaaaagacgaattcgattgcaaagcatgggcgtatttttcagacgttgacttggagaaagatgtacattcaggacttattggtcctttgttggtgtgtcacactaacactctcaatccagcccatggcaggcaggtgacagtccaggaattcgctcttttctttaccatctttgatgagaccaagtcctggtacttcacggaaaacatggagcgcaattgcagagccccctgtaacatacagatggaggaccctacctttaaggaaaattatcggttccacgcaatcaacggatacattatggatacactccctggccttgtgatggctcaggaccaacgaatcaggtggtacctcctcagcatgggttctaatgagaacatacactccattcacttttcaggacatgtgttcactgtccggaagaaagaagagtataagatggccctctacaatttgtatccaggcgtgtttgagaccgttgaaatgcttccctctaaagctggcatctggagagtagagtgcttgatcggagaacatcttcacgcaggtatgagcaccttgttcctcgtgtacagcaacaaatgtcagaccccacttggcatggccagtggacacattcgcgactttcagatcacagcatctggccagtatggacaatgggccccaaagttggctcgcctccattactccggtagcataaatgcgtggtccactaaagaacctttcagctggattaaggtcgatcttcttgcccccatgatcatccacggcattaagacacagggagcgaggcagaaattctcctccctctacatctcacagttcattattatgtatagtttggacggcaagaagtggcaaacttatagaggtaacagtactggaacactcatggtgttcttcggcaacgttgatagctctggcatcaaacacaacatctttaatcctcccataatagctcggtacatcagattgcatccgacccactacagcattaggagtacactccgaatggagcttatgggttgcgacttgaattcctgttcaatgccactcggaatggagtctaaagccatctctgatgcacagataaccgccagtagctactttacgaacatgtttgctacgtggtcaccctctaaggcaaggcttcatttgcaaggccggtctaatgcctggagacctcaggtgaacaacccgaaagaatggctccaggtggactttcagaagaccatgaaagtaacaggtgtcactactcagggagttaagtccttggataccagcatgtatgtgaaggagttccttatttcctcatcacaagatggccaccagtggaccctcttctttcagaatggtaaggtcaaagtgtttcagggcaatcaagacagcttcacacccgtggtgaacagtcttgatcctccactcttgacacgataccttcgaatccatccacagtcttgggttcaccagattgcattgcgcatggaagtacttggatgcgaggctcaggacctctac

SEQ ID NO: 392 - protein, 1457 aa, synthetic construct
  REGION 1..1457: note = Variant of human B-domain deleted Factor VIII
MQIELSTCFFLCLLRFCFSATRRYYLGAVELSWDYMQSDLGELPVDARFPPRVPKSFPFNTSVVYKKTLFVEFTDHLFNIAKPRPPWMGLLGPTIQAEVYDTVVITLKNMASHPVSLHAVGVSYWKASEGAEYDDQTSQREKEDDKVFPGGSHTYVWQVLKENGPMASDPLCLTYSYLSHVDLVKDLNSGLIGALLVCREGSLAKEKTQTLHKFILLFAVFDEGKSWHSETKNSLMQDRDAASARAWPKMHTVNGYVNRSLPGLIGCHRKSVYWHVIGMGTTPEVHSIFLEGHTFLVRNHRQASLEISPITFLTAQTLLMDLGQFLLFCHISSHQHDGMEAYVKVDSCPEEPQLRMKNNEEAEDYDDDLTDSEMDVVRFDDDNSPSFIQIRSVAKKHPKTWVHYIAAEEEDWDYAPLVLAPDDRSYKSQYLNNGPQRIGRKYKKVRFMAYTDETFKTREAIQHESGILGPLLYGEVGDTLLIIFKNQASRPYNIYPHGITDVRPLYSRRLPKGVKHLKDFPILPGEIFKYKWTVTVEDGPTKSDPRCLTRYYSSFVNMERDLASGLIGPLLICYKESVDQRGNQIMSDKRNVILFSVFDENRSWYLTENIQRFLPNPAGVQLEDPEFQASNIMHSINGYVFDSLQLSVCLHEVAYWYILSIGAQTDFLSVFFSGYTFKHKMVYEDTLTLFPFSGETVFMSMENPGLWILGCHNSDFRNRGMTALLKVSSCDKNTGDYYEDSYEDISAYTLSKNNAIEPRSFSQNPPVLKRHQREITRTTLQSDQEEIDYDDTISVEMKKEDFDIYDEDENQSPRSFQKKTRHYFIAAVERLWDYGMSSSPHVLRNRAQSGSVPQFKKVVFQEFTDGSFTQPLYRGELNEHLGLLGPYIRAEVEDNIMVTFRNQASRPYSFYSSLISYEEDQRQGAEPRKNFVKPNETKTYFWKVQHHMAPTKDEFDCKAWAYFSDVDLEKDVHSGLIGPLLVCHTNTLNPAHGRQVTVQEFALFFTIFDETKSWYFTENMERNCRAPCNIQMEDPTFKENYRFHAINGYIMDTLPGLVMAQDQRIRWYLLSMGSNENIHSIHFSGHVFTVRKKEEYKMALYNLYPGVFETVEMLPSKAGIWRVECLIGEHLHAGMSTLFLVYSNKCQTPLGMASGHIRDFQITASGQYGQWAPKLARLHYSGSINAWSTKEPFSWIKVDLLAPMIIHGIKTQGARQKFSSLYISQFIIMYSLDGKKWQTYRGNSTGTLMVFFGNVDSSGIKHNIFNPPIIARYIRLHPTHYSIRSTLRMELMGCDLNSCSMPLGMESKAISDAQITASSYFTNMFATWSPSKARLHLQGRSNAWRPQVNNPKEWLQVDFQKTMKVTGVTTQGVKSLDTSMYVKEFLISSSQDGHQWTLFFQNGKVKVFQGNQDSFTPVVNSLDPPLLTRYLRIHPQSWVHQIALRMEVLGCEAQDLY

SEQ ID NO: 393 - DNA, 4371 bp, synthetic construct
  misc_feature 1..4371: note = Variant of human B-domain deleted Factor VIII
  source 1..4371: mol_type = other DNA
atgcagattgaactgtctacctgcttcttcctctgtttgctgaggttctgctttagcgccactagacggtactaccttggcgctgtggagctgtcctgggactatatgcagagtgatttgggagagcttcccgtcgacgcacgatttcctcctcgcgttccaaagtcatttcccttcaacacaagcgtggtgtacaagaagacgctcttcgtcgaattcaccgatcacctgttcaatatcgccaaacccagaccaccatggatgggtcttttggggcctaccatacaagcggaggtgtatgacacagttgttatcactctcaagaacatggcttctcatccggtaagtcttcacgcagtgggcgtgtcctactggaaagcttcagaaggagccgagtatgatgatcagacatcccagagggagaaagaagacgacaaggtatttccaggtgggtctcatacctatgtgtggcaagtgctcaaagagaatggccctatggcaagcgatccgctctgtttgacttacagctacctttcacacgttgacctcgtcaaggacctcaactccgggttgattggagccttgttggtatgcagggaaggatctcttgccaaagagaagacacagaccctccacaagtttatccttctctttgctgtgttcgatgagggcaaaagttggcatagcgaaacgaagaattccctcatgcaggatcgcgacgcagccagcgccagagcttggcccaagatgcacactgtgaacggatatgtcaataggtcacttcctggcttgattgggtgtcatcggaaaagtgtctactggcacgtgatcggaatggggacaacaccagaggtccactccatatttctcgaaggccataccttccttgttcgaaaccacagacaggcatccttggagatctctcccattacctttctcactgcccaaacgctccttatggacttgggtcagttccttctcttctgccatatcagctcacaccagcatgatggtatggaagcttatgtgaaagtcgacagttgtcctgaggagccacagttgcgcatgaagaataatgaagaagccgaggattacgacgacgatctcaccgattctgagatggacgtggtgaggtttgatgacgacaactctccctccttcattcaaatccggagcgtggcgaagaaacaccccaagacttgggtccactatatagcggcggaagaggaggattgggattacgctcctcttgtattggcaccagatgaccgctcatacaaaagccagtacctcaacaacggaccgcagagaattggccggaagtataagaaagtgcgatttatggcctatacagacgaaacctttaagacaagggaggccatccagcatgagagtgggattttgggacctcttctttacggcgaagttggtgataccctcctcatcatcttcaagaatcaagcttctcgcccctataacatttacccacacgggatcactgacgttaggcctttgtatagcagaagacttcccaaaggcgtgaagcatctcaaagacttccccattttgccaggcgagatctttaagtacaaatggaccgtcacagtggaagatggaccgactaaatcagaccctcgatgccttacgcggtactattcctccttcgtgaatatggagagagatttggcaagcggactcataggaccactcctcatctgttacaaggaatctgtagaccagaggggtaaccagattatgagtgataaacgcaatgtgatcctttttagcgtcttcgacgagaaccggtcctggtacttgaccgagaatatacaaaggttccttcccaaccccgcaggcgttcagttggaagaccctgagtttcaggccagcaatattatgcactcaatcaacggctatgtgtttgatagtctccagctttctgtttgcctccatgaagtagcctattggtacatcttgtcaattggtgctcaaacagacttcctctccgtcttcttctccggctacacctttaagcacaagatggtgtatgaggacactctcacactctttccattttctggagaaaccgtgttcatgagcatggagaatccaggcctttggatcttgggttgccacaacagtgattttcgcaatcggggaatgactgctctcctcaaagtcagcagctgtgataagaacacaggcgactattacgaagattcttacgaggacataagtgcctacttgttgtccaagaataacgccattgagcccagatcattctcccagaatcctcccgtgcttaaaaggcatcagcgcgaaatcaccagaactactcttcagtctgatcaagaggagattgactatgacgacaccataagcgtggaaatgaagaaggaggatttcgatatctatgacgaagatgagaaccagtctccgcggagctttcagaagaagacgcgacactacttcattgcagcagtcgaaaggctttgggactacggtatgtcatcatcccctcatgtgttgcgcaatagagctcagagtggaagtgttccacagttcaagaaagtcgtctttcaagagtttacagatggcagcttcacacagcctctctatcggggcgagcttaacgaacatttgggactccttggtccctatatccgagccgaagtggaggacaacattatggttacctttaggaatcaagcctctcgcccctacagcttctactcctccctcatcagttatgaggaggatcagagacaaggcgctgaaccacggaagaactttgtgaaaccgaatgagacgaagacctacttctggaaagtacagcaccacatggcccccacaaaagacgaattcgattgcaaagcatgggcgtatttttcagacgttgacttggagaaagatgtacattcaggacttattggtcctttgttggtgtgtcacactaacactctcaatccagcccatggcaggcaggtgacagtccaggaattcgctcttttctttaccatctttgatgagaccaagtcctggtacttcacggaaaacatggagcgcaattgcagagccccctgtaacatacagatggaggaccctacctttaaggaaaattatcggttccacgcaatcaacggatacattatggatacactccctggccttgtgatggctcaggaccaacgaatcaggtggtacctcctcagcatgggttctaatgagaacatacactccattcacttttcaggacatgtgttcactgtccggaagaaagaagagtataagatggccctctacaatttgtatccaggcgtgtttgagaccgttgaaatgcttccctctaaagctggcatctggagagtagagtgcttgatcggagaacatcttcacgcaggtatgagcaccttgttcctcgtgtacagcaacaaatgtcagaccccacttggcatggccagtggacacattcgcgactttcagatcacagcatctggccagtatggacaatgggccccaaagttggctcgcctccattactccggtagcataaatgcgtggtccactaaagaacctttcagctggattaaggtcgatcttcttgcccccatgatcatccacggcattaagacacagggagcgaggcagaaattctcctccctctacatctcacagttcattattatgtatagtttggacggcaagaagtggcaaacttatagaggtaacagtactggaacactcatggtgttcttcggcaacgttgatagctctggcatcaaacacaacatctttaatcctcccataatagctcggtacgtgagattgcatccgacccactacagcattaggagtacactccgaatggagcttatgggttgcgacttgaattcctgttcaatgccactcggaatggagtctaaagccatctctgatgcacagataaccgccagtagctactttacgaacatgtttgctacgtggtcaccctctaaggcaaggcttcatttgcaaggccggtctaatgcctggagacctcaggtgaacaacccgaaagaatggctccaggtggactttcagaagaccatgaaagtaacaggtgtcactactcagggagttaagtccttggataccagcatgtatgtgaaggagttccttatttcctcatcacaagatggccaccagtggaccctcttctttcagaatggtaaggtcaaagtgtttcagggcaatcaagacagcttcacacccgtggtgaacagtcttgatcctccactcttgacacgataccttcgaatccatccacagtcttgggttcaccagattgcattgcgcatggaagtacttggatgcgaggctcaggacctctac

SEQ ID NO: 394 - protein, 1457 aa, synthetic construct
  REGION 1..1457: note = Variant of human B-domain deleted Factor VIII
MQIELSTCFFLCLLRFCFSATRRYYLGAVELSWDYMQSDLGELPVDARFPPRVPKSFPFNTSVVYKKTLFVEFTDHLFNIAKPRPPWMGLLGPTIQAEVYDTVVITLKNMASHPVSLHAVGVSYWKASEGAEYDDQTSQREKEDDKVFPGGSHTYVWQVLKENGPMASDPLCLTYSYLSHVDLVKDLNSGLIGALLVCREGSLAKEKTQTLHKFILLFAVFDEGKSWHSETKNSLMQDRDAASARAWPKMHTVNGYVNRSLPGLIGCHRKSVYWHVIGMGTTPEVHSIFLEGHTFLVRNHRQASLEISPITFLTAQTLLMDLGQFLLFCHISSHQHDGMEAYVKVDSCPEEPQLRMKNNEEAEDYDDDLTDSEMDVVRFDDDNSPSFIQIRSVAKKHPKTWVHYIAAEEEDWDYAPLVLAPDDRSYKSQYLNNGPQRIGRKYKKVRFMAYTDETFKTREAIQHESGILGPLLYGEVGDTLLIIFKNQASRPYNIYPHGITDVRPLYSRRLPKGVKHLKDFPILPGEIFKYKWTVTVEDGPTKSDPRCLTRYYSSFVNMERDLASGLIGPLLICYKESVDQRGNQIMSDKRNVILFSVFDENRSWYLTENIQRFLPNPAGVQLEDPEFQASNIMHSINGYVFDSLQLSVCLHEVAYWYILSIGAQTDFLSVFFSGYTFKHKMVYEDTLTLFPFSGETVFMSMENPGLWILGCHNSDFRNRGMTALLKVSSCDKNTGDYYEDSYEDISAYLLSKNNAIEPRSFSQNPPVLKRHQREITRTTLQSDQEEIDYDDTISVEMKKEDFDIYDEDENQSPRSFQKKTRHYFIAAVERLWDYGMSSSPHVLRNRAQSGSVPQFKKVVFQEFTDGSFTQPLYRGELNEHLGLLGPYIRAEVEDNIMVTFRNQASRPYSFYSSLISYEEDQRQGAEPRKNFVKPNETKTYFWKVQHHMAPTKDEFDCKAWAYFSDVDLEKDVHSGLIGPLLVCHTNTLNPAHGRQVTVQEFALFFTIFDETKSWYFTENMERNCRAPCNIQMEDPTFKENYRFHAINGYIMDTLPGLVMAQDQRIRWYLLSMGSNENIHSIHFSGHVFTVRKKEEYKMALYNLYPGVFETVEMLPSKAGIWRVECLIGEHLHAGMSTLFLVYSNKCQTPLGMASGHIRDFQITASGQYGQWAPKLARLHYSGSINAWSTKEPFSWIKVDLLAPMIIHGIKTQGARQKFSSLYISQFIIMYSLDGKKWQTYRGNSTGTLMVFFGNVDSSGIKHNIFNPPIIARYVRLHPTHYSIRSTLRMELMGCDLNSCSMPLGMESKAISDAQITASSYFTNMFATWSPSKARLHLQGRSNAWRPQVNNPKEWLQVDFQKTMKVTGVTTQGVKSLDTSMYVKEFLISSSQDGHQWTLFFQNGKVKVFQGNQDSFTPVVNSLDPPLLTRYLRIHPQSWVHQIALRMEVLGCEAQDLY

SEQ ID NO: 395 - DNA, 4371 bp, synthetic construct
  misc_feature 1..4371: note = Variant of human B-domain deleted Factor VIII
  source 1..4371: mol_type = other DNA
atgcagattgaactgtctacctgcttcttcctctgtttgctgaggttctgctttagcgccactagacggtactaccttggcgctgtggagctgtcctgggactatatgcagagtgatttgggagagcttcccgtcgacgcacgatttcctcctcgcgttccaaagtcatttcccttcaacacaagcgtggtgtacaagaagacgctcttcgtcgaattcaccgatcacctgttcaatatcgccaaacccagaccaccatggatgggtcttttggggcctaccatacaagcggaggtgtatgacacagttgttatcactctcaagaacatggcttctcatccggtaagtcttcacgcagtgggcgtgtcctactggaaagcttcagaaggagccgagtatgatgatcagacatcccagagggagaaagaagacgacaaggtatttccaggtgggtctcatacctatgtgtggcaagtgctcaaagagaatggccctatggcaagcgatccgctctgtttgacttacagctacctttcacacgttgacctcgtcaaggacctcaactccgggttgattggagccttgttggtatgcagggaaggatctcttgccaaagagaagacacagaccctccacaagtttatccttctctttgctgtgttcgatgagggcaaaagttggcatagcgaaacgaagaattccctcatgcaggatcgcgacgcagccagcgccagagcttggcccaagatgcacactgtgaacggatatgtcaataggtcacttcctggcttgattgggtgtcatcggaaaagtgtctactggcacgtgatcggaatggggacaacaccagaggtccactccatatttctcgaaggccataccttccttgttcgaaaccacagacaggcatccttggagatctctcccattacctttctcactgcccaaacgctccttatggacttgggtcagttccttctcttctgccatatcagctcacaccagcatgatggtatggaagcttatgtgaaagtcgacagttgtcctgaggagccacagttgcgcatgaagaataatgaagaagccgaggattacgacgacgatctcaccgattctgagatggacgtggtgaggtttgatgacgacaactctccctccttcattcaaatccggagcgtggcgaagaaacaccccaagacttgggtccactatatagcggcggaagaggaggattgggattacgctcctcttgtattggcaccagatgaccgctcatacaaaagccagtacctcaacaacggaccgcagagaattggccggaagtataagaaagtgcgatttatggcctatacagacgaaacctttaagacaagggaggccatccagcatgagagtgggattttgggacctcttctttacggcgaagttggtgataccctcctcatcatcttcaagaatcaagcttctcgcccctataacatttacccacacgggatcactgacgttaggcctttgtatagcagaagacttcccaaaggcgtgaagcatctcaaagacttccccattttgccaggcgagatctttaagtacaaatggaccgtcacagtggaagatggaccgactaaatcagaccctcgatgccttacgcggtactattcctccttcgtgaatatggagagagatttggcaagcggactcataggaccactcctcatctgttacaaggaatctgtagaccagaggggtaaccagattatgagtgataaacgcaatgtgatcctttttagcgtcttcgacgagaaccggtcctggtacttgaccgagaatatacaaaggttccttcccaaccccgcaggcgttcagttggaagaccctgagtttcaggccagcaatattatgcactcaatcaacggctatgtgtttgatagtctccagctttctgtttgcctccatgaagtagcctattggtacatcttgtcaattggtgctcaaacagacttcctctccgtcttcttctccggctacacctttaagcacaagatggtgtatgaggacactctcacactctttccattttctggagaaaccgtgttcatgagcatggagaatccaggcctttggatcttgggttgccacaacagtgattttcgcaatcggggaatgactgctctcctcaaagtcagcagctgtgataagaacacaggcgactattacgaagattcttacgaggacataagtgcctacttgttgtccaagaataacgccattgagcccagatcattctcccagaatcctcccgtgcttaaaaggcatcagcgcgaaatcaccagaactactcttcagtctgatcaagaggagattgactatgacgacaccataagcgtggaaatgaagaaggaggatttcgatatctatgacgaagatgagaaccagtctccgcggagctttcagaagaagacgcgacactacttcattgcagcagtcgaaaggctttgggactacggtatgtcatcatcccctcatgtgttgcgcaatagagctcagagtggaagtgttccacagttcaagaaagtcgtctttcaagagtttacagatggcagcttcacacagcctctctatcggggcgagcttaacgaacatttgggactccttggtccctatatccgagccgaagtggaggacaacattatggttacctttaggaatcaagcctctcgcccctacagcttctactcctccctcatcagttatgaggaggatcagagacaaggcgctgaaccacggaagaactttgtgaaaccgaatgagacgaagacctacttctggaaagtacagcaccacatggcccccacaaaagacgaattcgattgcaaagcatgggcgtatttttcagacgttgacttggagaaagatgtacattcaggacttattggtcctttgttggtgtgtcacactaacactctcaatccagcccatggcaggcaggtgacagtccaggaattcgctcttttctttaccatctttgatgagaccaagtcctggtacttcacggaaaacatggagcgcaattgcagagccccctgtaacatacagatggaggaccctacctttaaggaaaattatcggttccacgcaatcaacggatacattatggatacactccctggccttgtgatggctcaggaccaacgaatcaggtggtacctcctcagcatgggttctaatgagaacatacactccattcacttttcaggacatgtgttcactgtccggaagaaagaagagtataagatggccctctacaatttgtatccaggcgtgtttgagaccgttgaaatgcttccctctaaagctggcatctggagagtagagtgcttgatcggagaacatcttcacgcaggtatgagcaccttgttcctcgtgtacagcaacaaatgtcagaccccacttggcatggccagtggacacattcgcgactttcagatcacagcatctggccagtatggacaatgggccccaaagttggctcgcctccattactccggtagcataaatgcgtggtccactaaagaacctttcagctggattaaggtcgatcttcttgcccccatgatcatccacggcattaagacacagggagcgaggcagaaattctccttgctctacatctcacagttcattattatgtatagtttggacggcaagaagtggcaaacttatagaggtaacagtactggaacactcatggtgttcttcggcaacgttgatagctctggcatcaaacacaacatctttaatcctcccataatagctcggtacatcagattgcatccgacccactacagcattaggagtacactccgaatggagcttatgggttgcgacttgaattcctgttcaatgccactcggaatggagtctaaagccatctctgatgcacagataaccgccagtagctactttacgaacatgtttgctacgtggtcaccctctaaggcaaggcttcatttgcaaggccggtctaatgcctggagacctcaggtgaacaacccgaaagaatggctccaggtggactttcagaagaccatgaaagtaacaggtgtcactactcagggagttaagtccttggataccagcatgtatgtgaaggagttccttatttcctcatcacaagatggccaccagtggaccctcttctttcagaatggtaaggtcaaagtgtttcagggcaatcaagacagcttcacacccgtggtgaacagtcttgatcctccactcttgacacgataccttcgaatccatccacagtcttgggttcaccagattgcattgcgcatggaagtacttggatgcgaggctcaggacctctac

SEQ ID NO: 396 - protein, 1457 aa, synthetic construct
  REGION 1..1457: note = Variant of human B-domain deleted Factor VIII
MQIELSTCFFLCLLRFCFSATRRYYLGAVELSWDYMQSDLGELPVDARFPPRVPKSFPFNTSVVYKKTLFVEFTDHLFNIAKPRPPWMGLLGPTIQAEVYDTVVITLKNMASHPVSLHAVGVSYWKASEGAEYDDQTSQREKEDDKVFPGGSHTYVWQVLKENGPMASDPLCLTYSYLSHVDLVKDLNSGLIGALLVCREGSLAKEKTQTLHKFILLFAVFDEGKSWHSETKNSLMQDRDAASARAWPKMHTVNGYVNRSLPGLIGCHRKSVYWHVIGMGTTPEVHSIFLEGHTFLVRNHRQASLEISPITFLTAQTLLMDLGQFLLFCHISSHQHDGMEAYVKVDSCPEEPQLRMKNNEEAEDYDDDLTDSEMDVVRFDDDNSPSFIQIRSVAKKHPKTWVHYIAAEEEDWDYAPLVLAPDDRSYKSQYLNNGPQRIGRKYKKVRFMAYTDETFKTREAIQHESGILGPLLYGEVGDTLLIIFKNQASRPYNIYPHGITDVRPLYSRRLPKGVKHLKDFPILPGEIFKYKWTVTVEDGPTKSDPRCLTRYYSSFVNMERDLASGLIGPLLICYKESVDQRGNQIMSDKRNVILFSVFDENRSWYLTENIQRFLPNPAGVQLEDPEFQASNIMHSINGYVFDSLQLSVCLHEVAYWYILSIGAQTDFLSVFFSGYTFKHKMVYEDTLTLFPFSGETVFMSMENPGLWILGCHNSDFRNRGMTALLKVSSCDKNTGDYYEDSYEDISAYLLSKNNAIEPRSFSQNPPVLKRHQREITRTTLQSDQEEIDYDDTISVEMKKEDFDIYDEDENQSPRSFQKKTRHYFIAAVERLWDYGMSSSPHVLRNRAQSGSVPQFKKVVFQEFTDGSFTQPLYRGELNEHLGLLGPYIRAEVEDNIMVTFRNQASRPYSFYSSLISYEEDQRQGAEPRKNFVKPNETKTYFWKVQHHMAPTKDEFDCKAWAYFSDVDLEKDVHSGLIGPLLVCHTNTLNPAHGRQVTVQEFALFFTIFDETKSWYFTENMERNCRAPCNIQMEDPTFKENYRFHAINGYIMDTLPGLVMAQDQRIRWYLLSMGSNENIHSIHFSGHVFTVRKKEEYKMALYNLYPGVFETVEMLPSKAGIWRVECLIGEHLHAGMSTLFLVYSNKCQTPLGMASGHIRDFQITASGQYGQWAPKLARLHYSGSINAWSTKEPFSWIKVDLLAPMIIHGIKTQGARQKFSLLYISQFIIMYSLDGKKWQTYRGNSTGTLMVFFGNVDSSGIKHNIFNPPIIARYIRLHPTHYSIRSTLRMELMGCDLNSCSMPLGMESKAISDAQITASSYFTNMFATWSPSKARLHLQGRSNAWRPQVNNPKEWLQVDFQKTMKVTGVTTQGVKSLDTSMYVKEFLISSSQDGHQWTLFFQNGKVKVFQGNQDSFTPVVNSLDPPLLTRYLRIHPQSWVHQIALRMEVLGCEAQDLY

SEQ ID NO: 397 - DNA, 4371 bp, synthetic construct
  misc_feature 1..4371: note = Variant of human B-domain deleted Factor VIII
  source 1..4371: mol_type = other DNA
atgcagattgaactgtctacctgcttcttcctctgtttgctgaggttctgctttagcgccactagacggtactaccttggcgctgtggagctgtcctgggactatatgcagagtgatttgggagagcttcccgtcgacgcacgatttcctcctcgcgttccaaagtcatttcccttcaacacaagcgtggtgtacaagaagacgctcttcgtcgaattcaccgatcacctgttcaatatcgccaaacccagaccaccatggatgggtcttttggggcctaccatacaagcggaggtgtatgacacagttgttatcactctcaagaacatggcttctcatccggtaagtcttcacgcagtgggcgtgtcctactggaaagcttcagaaggagccgagtatgatgatcagacatcccagagggagaaagaagacgacaaggtatttccaggtgggtctcatacctatgtgtggcaagtgctcaaagagaatggccctatggcaagcgatccgctctgtttgacttacagctacctttcacacgttgacctcgtcaaggacctcaactccgggttgattggagccttgttggtatgcagggaaggatctcttgccaaagagaagacacagaccctccacaagtttatccttctctttgctgtgttcgatgagggcaaaagttggcatagcgaaacgaagaattccctcatgcaggatcgcgacgcagccagcgccagagcttggcccaagatgcacactgtgaacggatatgtcaatagggagcttcctggcttgattgggtgtcatcggaaaagtgtctactggcacgtgatcggaatggggacaacaccagaggtccactccatatttctcgaaggccataccttccttgttcgaaaccacagacaggcatccttggagatctctcccattacctttctcactgcccaaacgctccttatggacttgggtcagttccttctcttctgccatatcagctcacaccagcatgatggtatggaagcttatgtgaaagtcgacagttgtcctgaggagccacagttgcgcatgaagaataatgaagaagccgaggattacgacgacgatctcaccgattctgagatggacgtggtgaggtttgatgacgacaactctccctccttcattcaaatccggagcgtggcgaagaaacaccccaagacttgggtccactatatagcggcggaagaggaggattgggattacgctcctcttgtattggcaccagatgaccgctcatacaaaagccagtacctcaacaacggaccgcagagaattggccggaagtataagaaagtgcgatttatggcctatacagacgaaacctttaagacaagggaggccatccagcatgagagtgggattttgggacctcttctttacggcgaagttggtgataccctcctcatcatcttcaagaatcaagcttctcgcccctataacatttacccacacgggatcactgacgttaggcctttgtatagcagaagacttcccaaaggcgtgaagcatctcaaagacttccccattttgccaggcgagatctttaagtacaaatggaccgtcacagtggaagatggaccgactaaatcagaccctcgatgccttacgcggtactattcctccttcgtgaatatggagagagatttggcaagcggactcataggaccactcctcatctgttacaaggaatctgtagaccagaggggtaaccagattatgagtgataaacgcaatgtgatcctttttagcgtcttcgacgagaaccggtcctggtacttgaccgagaatatacaaaggttccttcccaaccccgcaggcgttcagttggaagaccctgagtttcaggccagcaatattatgcactcaatcaacggctatgtgtttgatagtctccagctttctgtttgcctccatgaagtagcctattggtacatcttgtcaattggtgctcaaacagacttcctctccgtcttcttctccggctacacctttaagcacaagatggtgtatgaggacactctcacactctttccattttctggagaaaccgtgttcatgagcatggagaatccaggcctttggatcttgggttgccacaacagtgattttcgcaatcggggaatgactgctctcctcaaagtcagcagctgtgataagaacacaggcgactattacgaagattcttacgaggacataagtgcctacttgttgtccaagaataacgccattgagcccagatcattctcccagaatcctcccgtgcttaaaaggcatcagcgcgaaatcaccagaactactcttcagtctgatcaagaggagattgactatgacgacaccataagcgtggaaatgaagaaggaggatttcgatatctatgacgaagatgagaaccagtctccgcggagctttcagaagaagacgcgacactacttcattgcagcagtcgaaaggctttgggactacggtatgtcatcatcccctcatgtgttgcgcaatagagctcagagtggaagtgttccacagttcaagaaagtcgtctttcaagagtttacagatggcagcttcacacagcctctctatcggggcgagcttaacgaacatttgggactccttggtccctatatccgagccgaagtggaggacaacattatggttacctttaggaatcaagcctctcgcccctacagcttctactcctccctcatcagttatgaggaggatcagagacaaggcgctgaaccacggaagaactttgtgaaaccgaatgagacgaagacctacttctggaaagtacagcaccacatggcccccacaaaagacgaattcgattgcaaagcatgggcgtatttttcagacgttgacttggagaaagatgtacattcaggacttattggtcctttgttggtgtgtcacactaacactctcaatccagcccatggcaggcaggtgacagtccaggaattcgctcttttctttaccatctttgatgagaccaagtcctggtacttcacggaaaacatggagcgcaattgcagagccccctgtaacatacagatggaggaccctacctttaaggaaaattatcggttccacgcaatcaacggatacattatggatacactccctggccttgtgatggctcaggaccaacgaatcaggtggtacctcctcagcatgggttctaatgagaacatacactccattcacttttcaggacatgtgttcactgtccggaagaaagaagagtataagatggccctctacaatttgtatccaggcgtgtttgagaccgttgaaatgcttccctctaaagctggcatctggagagtagagtgcttgatcggagaacatcttcacgcaggtatgagcaccttgttcctcgtgtacagcaacaaatgtcagaccccacttggcatggccagtggacacattcgcgactttcagatcacagcatctggccagtatggacaatgggccccaaagttggctcgcctccattactccggtagcataaatgcgtggtccactaaagaacctttcagctggattaaggtcgatcttcttgcccccatgatcatccacggcattaagacacagggagcgaggcagaaattctcctccctctacatctcacagttcattattatgtatagtttggacggcaagaagtggcaaacttatagaggtaacagtactggaacactcatggtgttcttcggcaacgttgatagctctggcatcaaacacaacatctttaatcctcccataatagctcggtacatcagattgcatccgacccactacagcattaggagtacactccgaatggagcttatgggttgcgacttgaattcctgttcaatgccactcggaatggagtctaaagccatctctgatgcacagataaccgccagtagctactttacgaacatgtttgctacgtggtcaccctctaaggcaaggcttcatttgcaaggccggtctaatgcctggagacctcaggtgaacaacccgaaagaatggctccaggtggactttcagaagaccatgaaagtaacaggtgtcactactcagggagttaagtccttggataccagcatgtatgtgaaggagttccttatttcctcatcacaagatggccaccagtggaccctcttctttcagaatggtaaggtcaaagtgtttcagggcaatcaagacagcttcacacccgtggtgaacagtcttgatcctccactcttgacacgataccttcgaatccatccacagtcttgggttcaccagattgcattgcgcatggaagtacttggatgcgaggctcaggacctctac

SEQ ID NO: 398 - protein, 1457 aa, synthetic construct
  REGION 1..1457: note = Variant of human B-domain deleted Factor VIII
MQIELSTCFFLCLLRFCFSATRRYYLGAVELSWDYMQSDLGELPVDARFPPRVPKSFPFNTSVVYKKTLFVEFTDHLFNIAKPRPPWMGLLGPTIQAEVYDTVVITLKNMASHPVSLHAVGVSYWKASEGAEYDDQTSQREKEDDKVFPGGSHTYVWQVLKENGPMASDPLCLTYSYLSHVDLVKDLNSGLIGALLVCREGSLAKEKTQTLHKFILLFAVFDEGKSWHSETKNSLMQDRDAASARAWPKMHTVNGYVNRELPGLIGCHRKSVYWHVIGMGTTPEVHSIFLEGHTFLVRNHRQASLEISPITFLTAQTLLMDLGQFLLFCHISSHQHDGMEAYVKVDSCPEEPQLRMKNNEEAEDYDDDLTDSEMDVVRFDDDNSPSFIQIRSVAKKHPKTWVHYIAAEEEDWDYAPLVLAPDDRSYKSQYLNNGPQRIGRKYKKVRFMAYTDETFKTREAIQHESGILGPLLYGEVGDTLLIIFKNQASRPYNIYPHGITDVRPLYSRRLPKGVKHLKDFPILPGEIFKYKWTVTVEDGPTKSDPRCLTRYYSSFVNMERDLASGLIGPLLICYKESVDQRGNQIMSDKRNVILFSVFDENRSWYLTENIQRFLPNPAGVQLEDPEFQASNIMHSINGYVFDSLQLSVCLHEVAYWYILSIGAQTDFLSVFFSGYTFKHKMVYEDTLTLFPFSGETVFMSMENPGLWILGCHNSDFRNRGMTALLKVSSCDKNTGDYYEDSYEDISAYLLSKNNAIEPRSFSQNPPVLKRHQREITRTTLQSDQEEIDYDDTISVEMKKEDFDIYDEDENQSPRSFQKKTRHYFIAAVERLWDYGMSSSPHVLRNRAQSGSVPQFKKVVFQEFTDGSFTQPLYRGELNEHLGLLGPYIRAEVEDNIMVTFRNQASRPYSFYSSLISYEEDQRQGAEPRKNFVKPNETKTYFWKVQHHMAPTKDEFDCKAWAYFSDVDLEKDVHSGLIGPLLVCHTNTLNPAHGRQVTVQEFALFFTIFDETKSWYFTENMERNCRAPCNIQMEDPTFKENYRFHAINGYIMDTLPGLVMAQDQRIRWYLLSMGSNENIHSIHFSGHVFTVRKKEEYKMALYNLYPGVFETVEMLPSKAGIWRVECLIGEHLHAGMSTLFLVYSNKCQTPLGMASGHIRDFQITASGQYGQWAPKLARLHYSGSINAWSTKEPFSWIKVDLLAPMIIHGIKTQGARQKFSSLYISQFIIMYSLDGKKWQTYRGNSTGTLMVFFGNVDSSGIKHNIFNPPIIARYIRLHPTHYSIRSTLRMELMGCDLNSCSMPLGMESKAISDAQITASSYFTNMFATWSPSKARLHLQGRSNAWRPQVNNPKEWLQVDFQKTMKVTGVTTQGVKSLDTSMYVKEFLISSSQDGHQWTLFFQNGKVKVFQGNQDSFTPVVNSLDPPLLTRYLRIHPQSWVHQIALRMEVLGCEAQDLY

SEQ ID NO: 399 - DNA, 4371 bp, synthetic construct
  misc_feature 1..4371: note = Variant of human B-domain deleted Factor VIII
  source 1..4371: mol_type = other DNA
atgcagattgaactgtctacctgcttcttcctctgtttgctgaggttctgctttagcgccactagacggtactaccttggcgctgtggagctgtcctgggactatatgcagagtgatttgggagagcttcccgtcgacgcacgatttcctcctcgcgttccaaagtcatttcccttcaacacaagcgtggtgtacaagaagacgctcttcgtcgaattcaccgatcacctgttcaatatcgccaaacccagaccaccatggatgggtcttttggggcctaccatacaagcggaggtgtatgacacagttgttatcactctcaagaacatggcttctcatccggtaagtcttcacgcagtgggcgtgtcctactggaaagcttcagaaggagccgagtatgatgatcagacatcccagagggagaaagaagacgacaaggtatttccaggtgggtctcatacctatgtgtggcaagtgctcaaagagaatggccctatggcaagcgatccgctctgtttgacttacagctacctttcacacgttgacctcgtcaaggacctcaactccgggttgattggagccttgttggtatgcagggaaggatctcttgccaaagagaagacacagaccctccacaagtttatccttctctttgctgtgttcgatgagggcaaaagttggcatagcgaaacgaagaattccctcatgcaggatcgcgacgcagccagcgccagagcttggcccaagatgcacactgtgaacggatatgtcaataggtcacttcctggcttgattgggtgtcatcggaaaagtgtctactggcacgtgatcggaatggggacaacaccagaggtccactccatatttctcgaaggccataccttccttgttcgaaaccacagacaggcatccttggagatctctcccattacctttctcactgcccaaacgctccttatggacttgggtcagttccttctcttctgccatatcagctcacaccagcatgatggtatggaagcttatgtgaaagtcgacagttgtcctgaggagccacagttgcgcatgaagaataatgaagaagccgaggattacgacgacgatctcaccgattctgagatggacgtggtgaggtttgatgacgacaactctccctccttcattcaaatccggagcgtggcgaagaaacaccccaagacttgggtccactatatagcggcggaagaggaggattgggattacgctcctcttgtattggcaccagatgaccgctcatacaaaagccagtacctcaacaacggaccgcagagaattggccggaagtataagaaagtgcgatttatggcctatacagacgaaacctttaagacaagggaggccatccagcatgagagtgggattttgggacctcttctttacggcgaagttggtgataccctcgttatcatcttcaagaatcaagcttctcgcccctataacatttacccacacgggatcactgacgttaggcctttgtatagcagaagacttcccaaaggcgtgaagcatctcaaagacttccccattttgccaggcgagatctttaagtacaaatggaccgtcacagtggaagatggaccgactaaatcagaccctcgatgccttacgcggtactattcctccttcgtgaatatggagagagatttggcaagcggactcataggaccactcctcatctgttacaaggaatctgtagaccagaggggtaaccagattatgagtgataaacgcaatgtgatcctttttagcgtcttcgacgagaaccggtcctggtacttgaccgagaatatacaaaggttccttcccaaccccgcaggcgttcagttggaagaccctgagtttcaggccagcaatattatgcactcaatcaacggctatgtgtttgatagtctccagctttctgtttgcctccatgaagtagcctattggtacatcttgtcaattggtgctcaaacagacttcctctccgtcttcttctccggctacacctttaagcacaagatggtgtatgaggacactctcacactctttccattttctggagaaaccgtgttcatgagcatggagaatccaggcctttggatcttgggttgccacaacagtgattttcgcaatcggggaatgactgctctcctcaaagtcagcagctgtgataagaacacaggcgactattacgaagattcttacgaggacataagtgcctacttgttgtccaagaataacgccattgagcccagatcattctcccagaatcctcccgtgcttaaaaggcatcagcgcgaaatcaccagaactactcttcagtctgatcaagaggagattgactatgacgacaccataagcgtggaaatgaagaaggaggatttcgatatctatgacgaagatgagaaccagtctccgcggagctttcagaagaagacgcgacactacttcattgcagcagtcgaaaggctttgggactacggtatgtcatcatcccctcatgtgttgcgcaatagagctcagagtggaagtgttccacagttcaagaaagtcgtctttcaagagtttacagatggcagcttcacacagcctctctatcggggcgagcttaacgaacatttgggactccttggtccctatatccgagccgaagtggaggacaacattatggttacctttaggaatcaagcctctcgcccctacagcttctactcctccctcatcagttatgaggaggatcagagacaaggcgctgaaccacggaagaactttgtgaaaccgaatgagacgaagacctacttctggaaagtacagcaccacatggcccccacaaaagacgaattcgattgcaaagcatgggcgtatttttcagacgttgacttggagaaagatgtacattcaggacttattggtcctttgttggtgtgtcacactaacactctcaatccagcccatggcaggcaggtgacagtccaggaattcgctcttttctttaccatctttgatgagaccaagtcctggtacttcacggaaaacatggagcgcaattgcagagccccctgtaacatacagatggaggaccctacctttaaggaaaattatcggttccacgcaatcaacggatacattatggatacactccctggccttgtgatggctcaggaccaacgaatcaggtggtacctcctcagcatgggttctaatgagaacatacactccattcacttttcaggacatgtgttcactgtccggaagaaagaagagtataagatggccctctacaatttgtatccaggcgtgtttgagaccgttgaaatgcttccctctaaagctggcatctggagagtagagtgcttgatcggagaacatcttcacgcaggtatgagcaccttgttcctcgtgtacagcaacaaatgtcagaccccacttggcatggccagtggacacattcgcgactttcagatcacagcatctggccagtatggacaatgggccccaaagttggctcgcctccattactccggtagcataaatgcgtggtccactaaagaacctttcagctggattaaggtcgatcttcttgcccccatgatcatccacggcattaagacacagggagcgaggcagaaattctcctccctctacatctcacagttcattattatgtatagtttggacggcaagaagtggcaaacttatagaggtaacagtactggaacactcatggtgttcttcggcaacgttgatagctctggcatcaaacacaacatctttaatcctcccataatagctcggtacatcagattgcatccgacccactacagcattaggagtacactccgaatggagcttatgggttgcgacttgaattcctgttcaatgccactcggaatggagtctaaagccatctctgatgcacagataaccgccagtagctactttacgaacatgtttgctacgtggtcaccctctaaggcaaggcttcatttgcaaggccggtctaatgcctggagacctcaggtgaacaacccgaaagaatggctccaggtggactttcagaagaccatgaaagtaacaggtgtcactactcagggagttaagtccttggataccagcatgtatgtgaaggagttccttatttcctcatcacaagatggccaccagtggaccctcttctttcagaatggtaaggtcaaagtgtttcagggcaatcaagacagcttcacacccgtggtgaacagtcttgatcctccactcttgacacgataccttcgaatccatccacagtcttgggttcaccagattgcattgcgcatggaagtacttggatgcgaggctcaggacctctac

SEQ ID NO: 400 - protein, 1457 aa, synthetic construct
  REGION 1..1457: note = Variant of human B-domain deleted Factor VIII
MQIELSTCFFLCLLRFCFSATRRYYLGAVELSWDYMQSDLGELPVDARFPPRVPKSFPFNTSVVYKKTLFVEFTDHLFNIAKPRPPWMGLLGPTIQAEVYDTVVITLKNMASHPVSLHAVGVSYWKASEGAEYDDQTSQREKEDDKVFPGGSHTYVWQVLKENGPMASDPLCLTYSYLSHVDLVKDLNSGLIGALLVCREGSLAKEKTQTLHKFILLFAVFDEGKSWHSETKNSLMQDRDAASARAWPKMHTVNGYVNRSLPGLIGCHRKSVYWHVIGMGTTPEVHSIFLEGHTFLVRNHRQASLEISPITFLTAQTLLMDLGQFLLFCHISSHQHDGMEAYVKVDSCPEEPQLRMKNNEEAEDYDDDLTDSEMDVVRFDDDNSPSFIQIRSVAKKHPKTWVHYIAAEEEDWDYAPLVLAPDDRSYKSQYLNNGPQRIGRKYKKVRFMAYTDETFKTREAIQHESGILGPLLYGEVGDTLVIIFKNQASRPYNIYPHGITDVRPLYSRRLPKGVKHLKDFPILPGEIFKYKWTVTVEDGPTKSDPRCLTRYYSSFVNMERDLASGLIGPLLICYKESVDQRGNQIMSDKRNVILFSVFDENRSWYLTENIQRFLPNPAGVQLEDPEFQASNIMHSINGYVFDSLQLSVCLHEVAYWYILSIGAQTDFLSVFFSGYTFKHKMVYEDTLTLFPFSGETVFMSMENPGLWILGCHNSDFRNRGMTALLKVSSCDKNTGDYYEDSYEDISAYLLSKNNAIEPRSFSQNPPVLKRHQREITRTTLQSDQEEIDYDDTISVEMKKEDFDIYDEDENQSPRSFQKKTRHYFIAAVERLWDYGMSSSPHVLRNRAQSGSVPQFKKVVFQEFTDGSFTQPLYRGELNEHLGLLGPYIRAEVEDNIMVTFRNQASRPYSFYSSLISYEEDQRQGAEPRKNFVKPNETKTYFWKVQHHMAPTKDEFDCKAWAYFSDVDLEKDVHSGLIGPLLVCHTNTLNPAHGRQVTVQEFALFFTIFDETKSWYFTENMERNCRAPCNIQMEDPTFKENYRFHAINGYIMDTLPGLVMAQDQRIRWYLLSMGSNENIHSIHFSGHVFTVRKKEEYKMALYNLYPGVFETVEMLPSKAGIWRVECLIGEHLHAGMSTLFLVYSNKCQTPLGMASGHIRDFQITASGQYGQWAPKLARLHYSGSINAWSTKEPFSWIKVDLLAPMIIHGIKTQGARQKFSSLYISQFIIMYSLDGKKWQTYRGNSTGTLMVFFGNVDSSGIKHNIFNPPIIARYIRLHPTHYSIRSTLRMELMGCDLNSCSMPLGMESKAISDAQITASSYFTNMFATWSPSKARLHLQGRSNAWRPQVNNPKEWLQVDFQKTMKVTGVTTQGVKSLDTSMYVKEFLISSSQDGHQWTLFFQNGKVKVFQGNQDSFTPVVNSLDPPLLTRYLRIHPQSWVHQIALRMEVLGCEAQDLY

SEQ ID NO: 401 - DNA, 4371 bp, synthetic construct
  misc_feature 1..4371: note = Variant of human B-domain deleted Factor VIII
  source 1..4371: mol_type = other DNA
atgcagattgaactgtctacctgcttcttcctctgtttgctgaggttctgctttagcgccactagacggtactaccttggcgctgtggagctgtcctgggactatatgcagagtgatttgggagagcttcccgtcgacgcacgatttcctcctcgcgttccaaagtcatttcccttcaacacaagcgtggtgtacaagaagacgctcttcgtcgaattcaccgatcacctgttcaatatcgccaaacccagaccaccatggatgggtcttttggggcctaccatacaagcggaggtgtatgacacagttgttatcactctcaagaacatggcttctcatccggtaagtcttcacgcagtgggcgtgtcctactggaaagcttcagaaggagccgagtatgatgatcagacatcccagagggagaaagaagacgacaaggtatttccaggtgggtctcatacctatgtgtggcaagtgctcaaagagaatggccctatggcaagcgatccgctctgtttgacttacagctacctttcacacgttgacctcgtcaaggacctcaactccgggttgattggagccttgttggtatgcagggaaggatctcttgccaaagagaagacacagaccctccacaagtttatccttctctttgctgtgttcgatgagggcaaaagttggcatagcgaaacgaagaattccctcatgcaggatcgcgacgcagccagcgccagagcttggcccaagatgcacactgtgaacggatatgtcaataggtcacttcctggcttgattgggtgtcatcggaaaagtgtctactggcacgtgatcggaatggggacaacaccagaggtccactccatatttctcgaaggccataccttccttgttcgaaaccacagacaggcatccttggagatctctcccattacctttctcactgcccaaacgctccttatggacttgggtcagttccttctcttctgccatatcagctcacaccagcatgatggtatggaagcttatgtgaaagtcgacagttgtcctgaggagccacagttgcgcatgaagaataatgaagaagccgaggattacgacgacgatctcaccgattctgagatggacgtggtgaggtttgatgacgacaactctccctccttcattcaaatccggagcgtggcgaagaaacaccccaagacttgggtccactatatagcggcggaagaggaggattgggattacgctcctcttgtattggcaccagatgaccgctcatacaaaagccagtacctcaacaacggaccgcagagaattggccggaagtataagaaagtgcgatttatggcctatacagacgaaacctttaagacaagggaggccatccagcatgagagtgggattttgggacctcttctttacggcgaagttggtgataccctcctcatcatcttcaagaatcaagcttctcgcccctataacatttacccacacgggatcactgacgttaggcctttgtatagcagaagacttcccaaaggcgtgaagcatctcaaagacttccccattttgccaggcgagatctttaagtacaaatggaccgtcacagtggaagatggaccgactaaatcagaccctcgatgccttacgcggtactattcctccttcgtgaatatggagagagatttggcaagcggactcataggaccactcctcatctgttacaaggaatctgtagaccagaggggtaaccagattatgagtgataaacgcaatgtgatcctttttagcgtcttcgacgagaaccggtcctggtacttgaccgagaatatacaaaggtctcttcccaaccccgcaggcgttcagttggaagaccctgagtttcaggccagcaatattatgcactcaatcaacggctatgtgtttgatagtctccagctttctgtttgcctccatgaagtagcctattggtacatcttgtcaattggtgctcaaacagacttcctctccgtcttcttctccggctacacctttaagcacaagatggtgtatgaggacactctcacactctttccattttctggagaaaccgtgttcatgagcatggagaatccaggcctttggatcttgggttgccacaacagtgattttcgcaatcggggaatgactgctctcctcaaagtcagcagctgtgataagaacacaggcgactattacgaagattcttacgaggacataagtgcctacttgttgtccaagaataacgccattgagcccagatcattctcccagaatcctcccgtgcttaaaaggcatcagcgcgaaatcaccagaactactcttcagtctgatcaagaggagattgactatgacgacaccataagcgtggaaatgaagaaggaggatttcgatatctatgacgaagatgagaaccagtctccgcggagctttcagaagaagacgcgacactacttcattgcagcagtcgaaaggctttgggactacggtatgtcatcatcccctcatgtgttgcgcaatagagctcagagtggaagtgttccacagttcaagaaagtcgtctttcaagagtttacagatggcagcttcacacagcctctctatcggggcgagcttaacgaacatttgggactccttggtccctatatccgagccgaagtggaggacaacattatggttacctttaggaatcaagcctctcgcccctacagcttctactcctccctcatcagttatgaggaggatcagagacaaggcgctgaaccacggaagaactttgtgaaaccgaatgagacgaagacctacttctggaaagtacagcaccacatggcccccacaaaagacgaattcgattgcaaagcatgggcgtatttttcagacgttgacttggagaaagatgtacattcaggacttattggtcctttgttggtgtgtcacactaacactctcaatccagcccatggcaggcaggtgacagtccaggaattcgctcttttctttaccatctttgatgagaccaagtcctggtacttcacggaaaacatggagcgcaattgcagagccccctgtaacatacagatggaggaccctacctttaaggaaaattatcggttccacgcaatcaacggatacattatggatacactccctggccttgtgatggctcaggaccaacgaatcaggtggtacctcctcagcatgggttctaatgagaacatacactccattcacttttcaggacatgtgttcactgtccggaagaaagaagagtataagatggccctctacaatttgtatccaggcgtgtttgagaccgttgaaatgcttccctctaaagctggcatctggagagtagagtgcttgatcggagaacatcttcacgcaggtatgagcaccttgttcctcgtgtacagcaacaaatgtcagaccccacttggcatggccagtggacacattcgcgactttcagatcacagcatctggccagtatggacaatgggccccaaagttggctcgcctccattactccggtagcataaatgcgtggtccactaaagaacctttcagctggattaaggtcgatcttcttgcccccatgatcatccacggcattaagacacagggagcgaggcagaaattctcctccctctacatctcacagttcattattatgtatagtttggacggcaagaagtggcaaacttatagaggtaacagtactggaacactcatggtgttcttcggcaacgttgatagctctggcatcaaacacaacatctttaatcctcccataatagctcggtacatcagattgcatccgacccactacagcattaggagtacactccgaatggagcttatgggttgcgacttgaattcctgttcaatgccactcggaatggagtctaaagccatctctgatgcacagataaccgccagtagctactttacgaacatgtttgctacgtggtcaccctctaaggcaaggcttcatttgcaaggccggtctaatgcctggagacctcaggtgaacaacccgaaagaatggctccaggtggactttcagaagaccatgaaagtaacaggtgtcactactcagggagttaagtccttggataccagcatgtatgtgaaggagttccttatttcctcatcacaagatggccaccagtggaccctcttctttcagaatggtaaggtcaaagtgtttcagggcaatcaagacagcttcacacccgtggtgaacagtcttgatcctccactcttgacacgataccttcgaatccatccacagtcttgggttcaccagattgcattgcgcatggaagtacttggatgcgaggctcaggacctctac

SEQ ID NO: 402 - protein, 1457 aa, synthetic construct
  REGION 1..1457: note = Variant of human B-domain deleted Factor VIII
MQIELSTCFFLCLLRFCFSATRRYYLGAVELSWDYMQSDLGELPVDARFPPRVPKSFPFNTSVVYKKTLFVEFTDHLFNIAKPRPPWMGLLGPTIQAEVYDTVVITLKNMASHPVSLHAVGVSYWKASEGAEYDDQTSQREKEDDKVFPGGSHTYVWQVLKENGPMASDPLCLTYSYLSHVDLVKDLNSGLIGALLVCREGSLAKEKTQTLHKFILLFAVFDEGKSWHSETKNSLMQDRDAASARAWPKMHTVNGYVNRSLPGLIGCHRKSVYWHVIGMGTTPEVHSIFLEGHTFLVRNHRQASLEISPITFLTAQTLLMDLGQFLLFCHISSHQHDGMEAYVKVDSCPEEPQLRMKNNEEAEDYDDDLTDSEMDVVRFDDDNSPSFIQIRSVAKKHPKTWVHYIAAEEEDWDYAPLVLAPDDRSYKSQYLNNGPQRIGRKYKKVRFMAYTDETFKTREAIQHESGILGPLLYGEVGDTLLIIFKNQASRPYNIYPHGITDVRPLYSRRLPKGVKHLKDFPILPGEIFKYKWTVTVEDGPTKSDPRCLTRYYSSFVNMERDLASGLIGPLLICYKESVDQRGNQIMSDKRNVILFSVFDENRSWYLTENIQRSLPNPAGVQLEDPEFQASNIMHSINGYVFDSLQLSVCLHEVAYWYILSIGAQTDFLSVFFSGYTFKHKMVYEDTLTLFPFSGETVFMSMENPGLWILGCHNSDFRNRGMTALLKVSSCDKNTGDYYEDSYEDISAYLLSKNNAIEPRSFSQNPPVLKRHQREITRTTLQSDQEEIDYDDTISVEMKKEDFDIYDEDENQSPRSFQKKTRHYFIAAVERLWDYGMSSSPHVLRNRAQSGSVPQFKKVVFQEFTDGSFTQPLYRGELNEHLGLLGPYIRAEVEDNIMVTFRNQASRPYSFYSSLISYEEDQRQGAEPRKNFVKPNETKTYFWKVQHHMAPTKDEFDCKAWAYFSDVDLEKDVHSGLIGPLLVCHTNTLNPAHGRQVTVQEFALFFTIFDETKSWYFTENMERNCRAPCNIQMEDPTFKENYRFHAINGYIMDTLPGLVMAQDQRIRWYLLSMGSNENIHSIHFSGHVFTVRKKEEYKMALYNLYPGVFETVEMLPSKAGIWRVECLIGEHLHAGMSTLFLVYSNKCQTPLGMASGHIRDFQITASGQYGQWAPKLARLHYSGSINAWSTKEPFSWIKVDLLAPMIIHGIKTQGARQKFSSLYISQFIIMYSLDGKKWQTYRGNSTGTLMVFFGNVDSSGIKHNIFNPPIIARYIRLHPTHYSIRSTLRMELMGCDLNSCSMPLGMESKAISDAQITASSYFTNMFATWSPSKARLHLQGRSNAWRPQVNNPKEWLQVDFQKTMKVTGVTTQGVKSLDTSMYVKEFLISSSQDGHQWTLFFQNGKVKVFQGNQDSFTPVVNSLDPPLLTRYLRIHPQSWVHQIALRMEVLGCEAQDLY

SEQ ID NO: 403 - DNA, 4371 bp, synthetic construct
  misc_feature 1..4371: note = Variant of human B-domain deleted Factor VIII
  source 1..4371: mol_type = other DNA
atgcagattgaactgtctacctgcttcttcctctgtttgctgaggttctgctttagcgccactagacggtactaccttggcgctgtggagctgtcctgggactatatgcagagtgatttgggagagcttcccgtcgacgcacgatttcctcctcgcgttccaaagtcatttcccttcaacacaagcgtggtgtacaagaagacgctcttcgtcgaattcaccgatcacctgttcaatatcgccaaacccagaccaccatggatgggtcttttggggcctaccatacaagcggaggtgtatgacacagttgttatcactctcaagaacatggcttctcatccggtaagtcttcacgcagtgggcgtgtcctactggaaagcttcagaaggagccgagtatgatgatcagacatcccagagggagaaagaagacgacaaggtatttccaggtgggtctcatacctatgtgtggcaagtgctcaaagagaatggccctatggcaagcgatccgctctgtttgacttacagctacctttcacacgttgacctcgtcaaggacctcaactccgggttgattggagccttgttggtatgcagggaaggatctcttgccaaagagaagacacagaccctccacaagtttatccttctctttgctgtgttcgatgagggcaaaagttggcatagcgaaacgaagaattccctcatgcaggatcgcgacgcagccagcgccagagcttggcccaagatgcacactgtgaacggatatgtcaataggtcacttcctggcttgattgggtgtcatcggaaaagtgtctactggcacgtgatcggaatggggacaacaccagaggtccactccatatttctcgaaggccataccttccttgttcgaaaccacagacaggcatccttggagatctctcccattacctttctcactgcccaaacgctccttatggacttgggtcagttccttctcttctgccatatcagctcacaccagcatgatggtatggaagcttatgtgaaagtcgacagttgtcctgaggagccacagttgcgcatgaagaataatgaagaagccgaggattacgacgacgatctcaccgattctgagatggacgtggtgaggtttgatgacgacaactctccctccgggattcaaatccggagcgtggcgaagaaacaccccaagacttgggtccactatatagcggcggaagaggaggattgggattacgctcctcttgtattggcaccagatgaccgctcatacaaaagccagtacctcaacaacggaccgcagagaattggccggaagtataagaaagtgcgatttatggcctatacagacgaaacctttaagacaagggaggccatccagcatgagagtgggattttgggacctcttctttacggcgaagttggtgataccctcctcatcatcttcaagaatcaagcttctcgcccctataacatttacccacacgggatcactgacgttaggcctttgtatagcagaagacttcccaaaggcgtgaagcatctcaaagacttccccattttgccaggcgagatctttaagtacaaatggaccgtcacagtggaagatggaccgactaaatcagaccctcgatgccttacgcggtactattcctccttcgtgaatatggagagagatttggcaagcggactcataggaccactcctcatctgttacaaggaatctgtagaccagaggggtaaccagattatgagtgataaacgcaatgtgatcctttttagcgtcttcgacgagaaccggtcctggtacttgaccgagaatatacaaaggttccttcccaaccccgcaggcgttcagttggaagaccctgagtttcaggccagcaatattatgcactcaatcaacggctatgtgtttgatagtctccagctttctgtttgcctccatgaagtagcctattggtacatcttgtcaattggtgctcaaacagacttcctctccgtcttcttctccggctacacctttaagcacaagatggtgtatgaggacactctcacactctttccattttctggagaaaccgtgttcatgagcatggagaatccaggcctttggatcttgggttgccacaacagtgattttcgcaatcggggaatgactgctctcctcaaagtcagcagctgtgataagaacacaggcgactattacgaagattcttacgaggacataagtgcctacttgttgtccaagaataacgccattgagcccagatcattctcccagaatcctcccgtgcttaaaaggcatcagcgcgaaatcaccagaactactcttcagtctgatcaagaggagattgactatgacgacaccataagcgtggaaatgaagaaggaggatttcgatatctatgacgaagatgagaaccagtctccgcggagctttcagaagaagacgcgacactacttcattgcagcagtcgaaaggctttgggactacggtatgtcatcatcccctcatgtgttgcgcaatagagctcagagtggaagtgttccacagttcaagaaagtcgtctttcaagagtttacagatggcagcttcacacagcctctctatcggggcgagcttaacgaacatttgggactccttggtccctatatccgagccgaagtggaggacaacattatggttacctttaggaatcaagcctctcgcccctacagcttctactcctccctcatcagttatgaggaggatcagagacaaggcgctgaaccacggaagaactttgtgaaaccgaatgagacgaagacctacttctggaaagtacagcaccacatggcccccacaaaagacgaattcgattgcaaagcatgggcgtatttttcagacgttgacttggagaaagatgtacattcaggacttattggtcctttgttggtgtgtcacactaacactctcaatccagcccatggcaggcaggtgacagtccaggaattcgctcttttctttaccatctttgatgagaccaagtcctggtacttcacggaaaacatggagcgcaattgcagagccccctgtaacatacagatggaggaccctacctttaaggaaaattatcggttccacgcaatcaacggatacattatggatacactccctggccttgtgatggctcaggaccaacgaatcaggtggtacctcctcagcatgggttctaatgagaacatacactccattcacttttcaggacatgtgttcactgtccggaagaaagaagagtataagatggccctctacaatttgtatccaggcgtgtttgagaccgttgaaatgcttccctctaaagctggcatctggagagtagagtgcttgatcggagaacatcttcacgcaggtatgagcaccttgttcctcgtgtacagcaacaaatgtcagaccccacttggcatggccagtggacacattcgcgactttcagatcacagcatctggccagtatggacaatgggccccaaagttggctcgcctccattactccggtagcataaatgcgtggtccactaaagaacctttcagctggattaaggtcgatcttcttgcccccatgatcatccacggcattaagacacagggagcgaggcagaaattctcctccctctacatctcacagttcattattatgtatagtttggacggcaagaagtggcaaacttatagaggtaacagtactggaacactcatggtgttcttcggcaacgttgatagctctggcatcaaacacaacatctttaatcctcccataatagctcggtacatcagattgcatccgacccactacagcattaggagtacactccgaatggagcttatgggttgcgacttgaattcctgttcaatgccactcggaatggagtctaaagccatctctgatgcacagataaccgccagtagctactttacgaacatgtttgctacgtggtcaccctctaaggcaaggcttcatttgcaaggccggtctaatgcctggagacctcaggtgaacaacccgaaagaatggctccaggtggactttcagaagaccatgaaagtaacaggtgtcactactcagggagttaagtccttggataccagcatgtatgtgaaggagttccttatttcctcatcacaagatggccaccagtggaccctcttctttcagaatggtaaggtcaaagtgtttcagggcaatcaagacagcttcacacccgtggtgaacagtcttgatcctccactcttgacacgataccttcgaatccatccacagtcttgggttcaccagattgcattgcgcatggaagtacttggatgcgaggctcaggacctctac

SEQ ID NO: 404 - protein, 1457 aa, synthetic construct
  REGION 1..1457: note = Variant of human B-domain deleted Factor VIII
MQIELSTCFFLCLLRFCFSATRRYYLGAVELSWDYMQSDLGELPVDARFPPRVPKSFPFNTSVVYKKTLFVEFTDHLFNIAKPRPPWMGLLGPTIQAEVYDTVVITLKNMASHPVSLHAVGVSYWKASEGAEYDDQTSQREKEDDKVFPGGSHTYVWQVLKENGPMASDPLCLTYSYLSHVDLVKDLNSGLIGALLVCREGSLAKEKTQTLHKFILLFAVFDEGKSWHSETKNSLMQDRDAASARAWPKMHTVNGYVNRSLPGLIGCHRKSVYWHVIGMGTTPEVHSIFLEGHTFLVRNHRQASLEISPITFLTAQTLLMDLGQFLLFCHISSHQHDGMEAYVKVDSCPEEPQLRMKNNEEAEDYDDDLTDSEMDVVRFDDDNSPSGIQIRSVAKKHPKTWVHYIAAEEEDWDYAPLVLAPDDRSYKSQYLNNGPQRIGRKYKKVRFMAYTDETFKTREAIQHESGILGPLLYGEVGDTLLIIFKNQASRPYNIYPHGITDVRPLYSRRLPKGVKHLKDFPILPGEIFKYKWTVTVEDGPTKSDPRCLTRYYSSFVNMERDLASGLIGPLLICYKESVDQRGNQIMSDKRNVILFSVFDENRSWYLTENIQRFLPNPAGVQLEDPEFQASNIMHSINGYVFDSLQLSVCLHEVAYWYILSIGAQTDFLSVFFSGYTFKHKMVYEDTLTLFPFSGETVFMSMENPGLWILGCHNSDFRNRGMTALLKVSSCDKNTGDYYEDSYEDISAYLLSKNNAIEPRSFSQNPPVLKRHQREITRTTLQSDQEEIDYDDTISVEMKKEDFDIYDEDENQSPRSFQKKTRHYFIAAVERLWDYGMSSSPHVLRNRAQSGSVPQFKKVVFQEFTDGSFTQPLYRGELNEHLGLLGPYIRAEVEDNIMVTFRNQASRPYSFYSSLISYEEDQRQGAEPRKNFVKPNETKTYFWKVQHHMAPTKDEFDCKAWAYFSDVDLEKDVHSGLIGPLLVCHTNTLNPAHGRQVTVQEFALFFTIFDETKSWYFTENMERNCRAPCNIQMEDPTFKENYRFHAINGYIMDTLPGLVMAQDQRIRWYLLSMGSNENIHSIHFSGHVFTVRKKEEYKMALYNLYPGVFETVEMLPSKAGIWRVECLIGEHLHAGMSTLFLVYSNKCQTPLGMASGHIRDFQITASGQYGQWAPKLARLHYSGSINAWSTKEPFSWIKVDLLAPMIIHGIKTQGARQKFSSLYISQFIIMYSLDGKKWQTYRGNSTGTLMVFFGNVDSSGIKHNIFNPPIIARYIRLHPTHYSIRSTLRMELMGCDLNSCSMPLGMESKAISDAQITASSYFTNMFATWSPSKARLHLQGRSNAWRPQVNNPKEWLQVDFQKTMKVTGVTTQGVKSLDTSMYVKEFLISSSQDGHQWTLFFQNGKVKVFQGNQDSFTPVVNSLDPPLLTRYLRIHPQSWVHQIALRMEVLGCEAQDLY

SEQ ID NO: 405 - DNA, 4371 bp, synthetic construct
  misc_feature 1..4371: note = Variant of human B-domain deleted Factor VIII
  source 1..4371: mol_type = other DNA
atgcagattgaactgtctacctgcttcttcctctgtttgctgaggttctgctttagcgccactagacggtactaccttggcgctgtggagctgtcctgggactatatgcagagtgatttgggagagcttcccgtcgacgcacgatttcctcctcgcgttccaaagtcatttcccttcaacacaagcgtggtgtacaagaagacgctcttcgtcgaattcaccgatcacctgttcaatatcgccaaacccagaccaccatggatgggtcttttggggcctaccatacaagcggaggtgtatgacacagttgttatcactctcaagaacatggcttctcatccggtaagtcttcacgcagtgggcgtgtcctactggaaagcttcagaaggagccgagtatgatgatcagacatcccagagggagaaagaagacgacaaggtatttccaggtgggtctcatacctatgtgtggcaagtgctcaaagagaatggccctatggcaagcgatccgctctgtttgacttacagctacctttcacacgttgacctcgtcaaggacctcaactccgggttgattggagccttgttggtatgcagggaaggatctcttgccaaagagaagacacagaccctccacaagtttatccttctctttgctgtgttcgatgagggcaaaagttggcatagcgaaacgaagaattccctcatgcaggatcgcgacgcagccagcgccagagcttggcccaagatgcacactgtgaacggatatgtcaataggtcacttcctggcttgattgggtgtcatcggaaaagtgtctactggcacgtgatcggaatggggacaacaccagaggtccactccatatttctcgaaggccataccttccttgttcgaaaccacagacaggcatccttggagatctctcccattacctttctcactgcccaaacgctccttatggacttgggtcagttccttctcttctgccatatcagctcacaccagcatgatggtatggaagcttatgtgaaagtcgacagttgtcctgaggagccacagttgcgcatgaagaataatgaagaagccgaggattacgacgacgatctcaccgattctgagatggacgtggtgaggtttgatgacgacaactctccctccttcattcaaatccggagcgtggcgaagaaacaccccaagacttgggtccactatatagcggcggaagaggaggattgggattacgctcctcttgtattggcaccagatgaccgctcatacaaaagccagtacctcaacaacggaccgcagagaattggccggaagtataagaaagtgcgatttatggcctatacagacgaaacctttaagacaagggaggccatccagcatgagagtgggattttgggacctcttctttacggcgaagttggtgataccctcctcatcatcttcaagaatcaagcttctcgcccctataacatttacccacacgggatcactgacgttaggcctttgtatagcagaagacttcccaaaggcgtgaagcatctcaaagacttccccattttgccaggcgagatctttaagtacaaatggaccgtcacagtggaagatggaccgactaaatcagaccctcgatgccttacgcggtactattcctccttcgtgaatatggagagagatttggcaagcggactcataggaccactcctcatctgttacaaggaatctgtagaccagaggggtaaccagattatgagtgataaacgcaatgtgatcctttttagcgtcttcgacgagaaccggtcctggtacttgaccgagaatatacaaaggttccttcccaaccccgcaggcgttcggttggaagaccctgagtttcaggccagcaatattatgcactcaatcaacggctatgtgtttgatagtctccagctttctgtttgcctccatgaagtagcctattggtacatcttgtcaattggtgctcaaacagacttcctctccgtcttcttctccggctacacctttaagcacaagatggtgtatgaggacactctcacactctttccattttctggagaaaccgtgttcatgagcatggagaatccaggcctttggatcttgggttgccacaacagtgattttcgcaatcggggaatgactgctctcctcaaagtcagcagctgtgataagaacacaggcgactattacgaagattcttacgaggacataagtgcctacttgttgtccaagaataacgccattgagcccagatcattctcccagaatcctcccgtgcttaaaaggcatcagcgcgaaatcaccagaactactcttcagtctgatcaagaggagattgactatgacgacaccataagcgtggaaatgaagaaggaggatttcgatatctatgacgaagatgagaaccagtctccgcggagctttcagaagaagacgcgacactacttcattgcagcagtcgaaaggctttgggactacggtatgtcatcatcccctcatgtgttgcgcaatagagctcagagtggaagtgttccacagttcaagaaagtcgtctttcaagagtttacagatggcagcttcacacagcctctctatcggggcgagcttaacgaacatttgggactccttggtccctatatccgagccgaagtggaggacaacattatggttacctttaggaatcaagcctctcgcccctacagcttctactcctccctcatcagttatgaggaggatcagagacaaggcgctgaaccacggaagaactttgtgaaaccgaatgagacgaagacctacttctggaaagtacagcaccacatggcccccacaaaagacgaattcgattgcaaagcatgggcgtatttttcagacgttgacttggagaaagatgtacattcaggacttattggtcctttgttggtgtgtcacactaacactctcaatccagcccatggcaggcaggtgacagtccaggaattcgctcttttctttaccatctttgatgagaccaagtcctggtacttcacggaaaacatggagcgcaattgcagagccccctgtaacatacagatggaggaccctacctttaaggaaaattatcggttccacgcaatcaacggatacattatggatacactccctggccttgtgatggctcaggaccaacgaatcaggtggtacctcctcagcatgggttctaatgagaacatacactccattcacttttcaggacatgtgttcactgtccggaagaaagaagagtataagatggccctctacaatttgtatccaggcgtgtttgagaccgttgaaatgcttccctctaaagctggcatctggagagtagagtgcttgatcggagaacatcttcacgcaggtatgagcaccttgttcctcgtgtacagcaacaaatgtcagaccccacttggcatggccagtggacacattcgcgactttcagatcacagcatctggccagtatggacaatgggccccaaagttggctcgcctccattactccggtagcataaatgcgtggtccactaaagaacctttcagctggattaaggtcgatcttcttgcccccatgatcatccacggcattaagacacagggagcgaggcagaaattctcctccctctacatctcacagttcattattatgtatagtttggacggcaagaagtggcaaacttatagaggtaacagtactggaacactcatggtgttcttcggcaacgttgatagctctggcatcaaacacaacatctttaatcctcccataatagctcggtacatcagattgcatccgacccactacagcattaggagtacactccgaatggagcttatgggttgcgacttgaattcctgttcaatgccactcggaatggagtctaaagccatctctgatgcacagataaccgccagtagctactttacgaacatgtttgctacgtggtcaccctctaaggcaaggcttcatttgcaaggccggtctaatgcctggagacctcaggtgaacaacccgaaagaatggctccaggtggactttcagaagaccatgaaagtaacaggtgtcactactcagggagttaagtccttggataccagcatgtatgtgaaggagttccttatttcctcatcacaagatggccaccagtggaccctcttctttcagaatggtaaggtcaaagtgtttcagggcaatcaagacagcttcacacccgtggtgaacagtcttgatcctccactcttgacacgataccttcgaatccatccacagtcttgggttcaccagattgcattgcgcatggaagtacttggatgcgaggctcaggacctctac

SEQ ID NO: 406 - protein, 1457 aa, synthetic construct
  REGION 1..1457: note = Variant of human B-domain deleted Factor VIII
MQIELSTCFFLCLLRFCFSATRRYYLGAVELSWDYMQSDLGELPVDARFPPRVPKSFPFNTSVVYKKTLFVEFTDHLFNIAKPRPPWMGLLGPTIQAEVYDTVVITLKNMASHPVSLHAVGVSYWKASEGAEYDDQTSQREKEDDKVFPGGSHTYVWQVLKENGPMASDPLCLTYSYLSHVDLVKDLNSGLIGALLVCREGSLAKEKTQTLHKFILLFAVFDEGKSWHSETKNSLMQDRDAASARAWPKMHTVNGYVNRSLPGLIGCHRKSVYWHVIGMGTTPEVHSIFLEGHTFLVRNHRQASLEISPITFLTAQTLLMDLGQFLLFCHISSHQHDGMEAYVKVDSCPEEPQLRMKNNEEAEDYDDDLTDSEMDVVRFDDDNSPSFIQIRSVAKKHPKTWVHYIAAEEEDWDYAPLVLAPDDRSYKSQYLNNGPQRIGRKYKKVRFMAYTDETFKTREAIQHESGILGPLLYGEVGDTLLIIFKNQASRPYNIYPHGITDVRPLYSRRLPKGVKHLKDFPILPGEIFKYKWTVTVEDGPTKSDPRCLTRYYSSFVNMERDLASGLIGPLLICYKESVDQRGNQIMSDKRNVILFSVFDENRSWYLTENIQRFLPNPAGVRLEDPEFQASNIMHSINGYVFDSLQLSVCLHEVAYWYILSIGAQTDFLSVFFSGYTFKHKMVYEDTLTLFPFSGETVFMSMENPGLWILGCHNSDFRNRGMTALLKVSSCDKNTGDYYEDSYEDISAYLLSKNNAIEPRSFSQNPPVLKRHQREITRTTLQSDQEEIDYDDTISVEMKKEDFDIYDEDENQSPRSFQKKTRHYFIAAVERLWDYGMSSSPHVLRNRAQSGSVPQFKKVVFQEFTDGSFTQPLYRGELNEHLGLLGPYIRAEVEDNIMVTFRNQASRPYSFYSSLISYEEDQRQGAEPRKNFVKPNETKTYFWKVQHHMAPTKDEFDCKAWAYFSDVDLEKDVHSGLIGPLLVCHTNTLNPAHGRQVTVQEFALFFTIFDETKSWYFTENMERNCRAPCNIQMEDPTFKENYRFHAINGYIMDTLPGLVMAQDQRIRWYLLSMGSNENIHSIHFSGHVFTVRKKEEYKMALYNLYPGVFETVEMLPSKAGIWRVECLIGEHLHAGMSTLFLVYSNKCQTPLGMASGHIRDFQITASGQYGQWAPKLARLHYSGSINAWSTKEPFSWIKVDLLAPMIIHGIKTQGARQKFSSLYISQFIIMYSLDGKKWQTYRGNSTGTLMVFFGNVDSSGIKHNIFNPPIIARYIRLHPTHYSIRSTLRMELMGCDLNSCSMPLGMESKAISDAQITASSYFTNMFATWSPSKARLHLQGRSNAWRPQVNNPKEWLQVDFQKTMKVTGVTTQGVKSLDTSMYVKEFLISSSQDGHQWTLFFQNGKVKVFQGNQDSFTPVVNSLDPPLLTRYLRIHPQSWVHQIALRMEVLGCEAQDLY

SEQ ID NO: 407 - DNA, 4371 bp, synthetic construct
  misc_feature 1..4371: note = Variant of human B-domain deleted Factor VIII
  source 1..4371: mol_type = other DNA
atgcagattgaactgtctacctgcttcttcctctgtttgctgaggttctgctttagcgccactagacggtactaccttggcgctgtggagctgtcctgggactatatgcagagtgatttgggagagcttcccgtcgacgcacgatttcctcctcgcgttccaaagtcatttcccttcaacacaagcgtggtgtacaagaagacgctcttcgtcgaattcaccgatcacctgttcaatatcgccaaacccagaccaccatggatgggtcttttggggcctaccatacaagcggaggtgtatgacacagttgttatcactctcaagaacatggcttctcatccggtaagtcttcacgcagtgggcgtgtcctactggaaagcttcagaaggagccgagtatgatgatcagacatcccagagggagaaagaagacgacaaggtatttccaggtgggtctcatacctatgtgtggcaagtgctcaaagagaatggccctatggcaagcgatccgctctgtttgacttacagctacctttcacacgttgacctcgtcaaggacctcaactccgggttgattggagccttgttggtatgcagggaaggatctcttgccaaagagaagacacagaccctccacaagtttatccttctctttgctgtgttcgatgagggcaaaagttggcatagcgaaacgaagaattccctcatgcaggatcgcgacgcagccagcgccagagcttggcccaagatgcacactgtgaacggatatgtcaataggtcacttcctggcttgattgggtgtcatcggaaaagtgtctactggcacgtgatcggaatggggacaacaccagaggtccactccatatttctcgaaggccataccttccttgttcgaaaccacagacaggcatccttggagatctctcccattacctttctcactgcccaaacgctccttatggacttgggtcagttccttctcttctgccatatcagctcacaccagcatgatggtatggaagcttatgtgaaagtcgacagttgtcctgaggagccacagttgcgcatgaagaataatgaagaagccgaggattacgacgacgatctcaccgattctgagatggacgtggtgaggtttgatgacgacaactctccctccttcattcaaatccggagcgtggcgaagaaacaccccaagacttgggtccactatatagcggcggaagaggaggattgggattacgctcctcttgtattggcaccagatgaccgctcatacaaaagccagtacctcaacaacggaccgcagagaattggccggaagtataagaaagtgcgatttatggcctatacagacgaaacctttaagacaagggaggccatccagcatgagagtgggattttgggacctcttctttacggcgaagttggtgataccctcctcatcatcttcaagaatcaagcttctcgcccctataacatttacccacacgggatcactgacgttaggcctttgtatagcagaagacttcccaaaggcgtgaagcatctcaaagacttccccattttgccaggcgagatctttaagtacaaatggaccgtcacagtggaagatggaccgactaaatcagaccctcgatgccttacgcggtactattcctccttcgtgaatatggagagagatttggcaagcggactcataggaccactcctcatctgttacaaggaatctgtagaccagaggggtaaccagattatgagtgataaacgcaatgtgatcctttttagcgtcttcgacgagaaccggtcctggtacttgaccgagaatatacaaaggttccttcccaaccccgcaggcgttcagttggaagaccctgagtttcaggccagcaatattatgcactcaatcaacggctatgtgtttgatagtctccagctttctgtttgcctccatgaagtagcctattggtacatcttgtcaattggtgctcaaacagacttcctctccgtcttcttctccggctacacctttaagcacaagatggtgtatgaggacactctcacactctttccattttctggagaaaccgtgttcatgagcatggagaatccaggcctttggatcttgggttgccacaacagtgattttcgcaatcggggaatgactgctctcctcaaagtcagcagctgtgataagaacacaggcgactattacgaagattcttacgaggacataagtgcctacttgttgtccaagaataacgcccgggagcccagatcattctcccagaatcctcccgtgcttaaaaggcatcagcgcgaaatcaccagaactactcttcagtctgatcaagaggagattgactatgacgacaccataagcgtggaaatgaagaaggaggatttcgatatctatgacgaagatgagaaccagtctccgcggagctttcagaagaagacgcgacactacttcattgcagcagtcgaaaggctttgggactacggtatgtcatcatcccctcatgtgttgcgcaatagagctcagagtggaagtgttccacagttcaagaaagtcgtctttcaagagtttacagatggcagcttcacacagcctctctatcggggcgagcttaacgaacatttgggactccttggtccctatatccgagccgaagtggaggacaacattatggttacctttaggaatcaagcctctcgcccctacagcttctactcctccctcatcagttatgaggaggatcagagacaaggcgctgaaccacggaagaactttgtgaaaccgaatgagacgaagacctacttctggaaagtacagcaccacatggcccccacaaaagacgaattcgattgcaaagcatgggcgtatttttcagacgttgacttggagaaagatgtacattcaggacttattggtcctttgttggtgtgtcacactaacactctcaatccagcccatggcaggcaggtgacagtccaggaattcgctcttttctttaccatctttgatgagaccaagtcctggtacttcacggaaaacatggagcgcaattgcagagccccctgtaacatacagatggaggaccctacctttaaggaaaattatcggttccacgcaatcaacggatacattatggatacactccctggccttgtgatggctcaggaccaacgaatcaggtggtacctcctcagcatgggttctaatgagaacatacactccattcacttttcaggacatgtgttcactgtccggaagaaagaagagtataagatggccctctacaatttgtatccaggcgtgtttgagaccgttgaaatgcttccctctaaagctggcatctggagagtagagtgcttgatcggagaacatcttcacgcaggtatgagcaccttgttcctcgtgtacagcaacaaatgtcagaccccacttggcatggccagtggacacattcgcgactttcagatcacagcatctggccagtatggacaatgggccccaaagttggctcgcctccattactccggtagcataaatgcgtggtccactaaagaacctttcagctggattaaggtcgatcttcttgcccccatgatcatccacggcattaagacacagggagcgaggcagaaattctcctccctctacatctcacagttcattattatgtatagtttggacggcaagaagtggcaaacttatagaggtaacagtactggaacactcatggtgttcttcggcaacgttgatagctctggcatcaaacacaacatctttaatcctcccataatagctcggtacatcagattgcatccgacccactacagcattaggagtacactccgaatggagcttatgggttgcgacttgaattcctgttcaatgccactcggaatggagtctaaagccatctctgatgcacagataaccgccagtagctactttacgaacatgtttgctacgtggtcaccctctaaggcaaggcttcatttgcaaggccggtctaatgcctggagacctcaggtgaacaacccgaaagaatggctccaggtggactttcagaagaccatgaaagtaacaggtgtcactactcagggagttaagtccttggataccagcatgtatgtgaaggagttccttatttcctcatcacaagatggccaccagtggaccctcttctttcagaatggtaaggtcaaagtgtttcagggcaatcaagacagcttcacacccgtggtgaacagtcttgatcctccactcttgacacgataccttcgaatccatccacagtcttgggttcaccagattgcattgcgcatggaagtacttggatgcgaggctcaggacctctac

SEQ ID NO: 408 - protein, 1457 aa, synthetic construct
  REGION 1..1457: note = Variant of human B-domain deleted Factor VIII
MQIELSTCFFLCLLRFCFSATRRYYLGAVELSWDYMQSDLGELPVDARFPPRVPKSFPFNTSVVYKKTLFVEFTDHLFNIAKPRPPWMGLLGPTIQAEVYDTVVITLKNMASHPVSLHAVGVSYWKASEGAEYDDQTSQREKEDDKVFPGGSHTYVWQVLKENGPMASDPLCLTYSYLSHVDLVKDLNSGLIGALLVCREGSLAKEKTQTLHKFILLFAVFDEGKSWHSETKNSLMQDRDAASARAWPKMHTVNGYVNRSLPGLIGCHRKSVYWHVIGMGTTPEVHSIFLEGHTFLVRNHRQASLEISPITFLTAQTLLMDLGQFLLFCHISSHQHDGMEAYVKVDSCPEEPQLRMKNNEEAEDYDDDLTDSEMDVVRFDDDNSPSFIQIRSVAKKHPKTWVHYIAAEEEDWDYAPLVLAPDDRSYKSQYLNNGPQRIGRKYKKVRFMAYTDETFKTREAIQHESGILGPLLYGEVGDTLLIIFKNQASRPYNIYPHGITDVRPLYSRRLPKGVKHLKDFPILPGEIFKYKWTVTVEDGPTKSDPRCLTRYYSSFVNMERDLASGLIGPLLICYKESVDQRGNQIMSDKRNVILFSVFDENRSWYLTENIQRFLPNPAGVQLEDPEFQASNIMHSINGYVFDSLQLSVCLHEVAYWYILSIGAQTDFLSVFFSGYTFKHKMVYEDTLTLFPFSGETVFMSMENPGLWILGCHNSDFRNRGMTALLKVSSCDKNTGDYYEDSYEDISAYLLSKNNAREPRSFSQNPPVLKRHQREITRTTLQSDQEEIDYDDTISVEMKKEDFDIYDEDENQSPRSFQKKTRHYFIAAVERLWDYGMSSSPHVLRNRAQSGSVPQFKKVVFQEFTDGSFTQPLYRGELNEHLGLLGPYIRAEVEDNIMVTFRNQASRPYSFYSSLISYEEDQRQGAEPRKNFVKPNETKTYFWKVQHHMAPTKDEFDCKAWAYFSDVDLEKDVHSGLIGPLLVCHTNTLNPAHGRQVTVQEFALFFTIFDETKSWYFTENMERNCRAPCNIQMEDPTFKENYRFHAINGYIMDTLPGLVMAQDQRIRWYLLSMGSNENIHSIHFSGHVFTVRKKEEYKMALYNLYPGVFETVEMLPSKAGIWRVECLIGEHLHAGMSTLFLVYSNKCQTPLGMASGHIRDFQITASGQYGQWAPKLARLHYSGSINAWSTKEPFSWIKVDLLAPMIIHGIKTQGARQKFSSLYISQFIIMYSLDGKKWQTYRGNSTGTLMVFFGNVDSSGIKHNIFNPPIIARYIRLHPTHYSIRSTLRMELMGCDLNSCSMPLGMESKAISDAQITASSYFTNMFATWSPSKARLHLQGRSNAWRPQVNNPKEWLQVDFQKTMKVTGVTTQGVKSLDTSMYVKEFLISSSQDGHQWTLFFQNGKVKVFQGNQDSFTPVVNSLDPPLLTRYLRIHPQSWVHQIALRMEVLGCEAQDLY

SEQ ID NO: 409 - DNA, 4371 bp, synthetic construct
  misc_feature 1..4371: note = Variant of human B-domain deleted Factor VIII
  source 1..4371: mol_type = other DNA
atgcagattgaactgtctacctgcttcttcctctgtttgctgaggttctgctttagcgccactagacggtactaccttggcgctgtggagctgtcctgggactatatgcagagtgatttgggagagcttcccgtcgacgcacgatttcctcctcgcgttccaaagtcatttccctttaacacaagccgtgtgtacaagaagacgctcttcgtcgaattcaccgatcacctgttcaatatcgccaaacccagaccaccatggatgggtcttttggggcctaccatacaagcggaggtgtatgacacagttgttatcactctcaagaacatggcttctcatccggtaagtcttcacgcagtgggcgtgtcctactggaaagcttcagaaggagccgagtatgatgatcagacatcccagagggagaaagaagacgacaaggtatttccaggtgggtctcatacctatgtgtggcaagtgctcaaagagaatggccctatggcaagcgatccgctctgtttgacttacagctacctttcacacgttgacctcgtcaaggacctcaactccgggttgattggagccttgttggtatgcagggaaggatctcttgccaaagagaagacacagaccctccacaagtttatccttctctttgctgtgttcgatgagggcaaaagttggcatagcgaaacgaagaattccctcatgcaggatcgcgacgcagccagcgccagagcttggcccaagatgcacactgtgaacggatatgtcaataggtcacttcctggcttgattgggtgtcatcggaaaagtgtctactggcacgtgatcggaatggggacaacaccagaggtccactccatatttctcgaaggccataccttccttgttcgaaaccacagacaggcatccttggagatctctcccattacctttctcactgcccaaacgctccttatggacttgggtcagttccttctcttctgccatatctcgtcacaccagcatgatggtatggaagcttatgtgaaagtcgacagttgtcctgaggagccacagttgcgcatgaagaataatgaagaagccgaggattacgacgacgatctcaccgattctgagatggacgtggtgaggtttgatgacgacaactctccctccttcattcaaatccggagcgtggcgaagaaacaccccaagacttgggtccactatatagcggcggaagaggaggattgggattacgctcctcttgtattggcaccagatgaccgctcatacaaaagccagtacctcaacaacggaccgcagagaattggccggaagtataagaaagtgcgatttatggcctatacagacgaaacctttaagacaagggaggccatccagcatgagagtgggattttgggacctcttctttacggcgaagttggtgataccctcctcatcatcttcaagaatcaagcttctcgcccctataacatttacccacacgggatcactgacgttaggcctttgtatagcagaagacttcccaaaggcgtgaagcatctcaaagacttccccattttgccaggcgagatctttaagtacaaatggaccgtcacagtggaagatggaccgactaaatcagaccctcgatgccttacgcggtactattcctccttcgtgaatatggagagagatttggcaagcggactcataggaccactcctcatctgttacaaggaatctgtagaccagaggggtaaccagattatgagtgataaacgcaatgtgatcctttttagcgtcttcgacgagaaccggtcctggtacttgaccgagaatatacaaaggttccttcccaaccccgcaggcgttcagttggaagaccctgagtttcaggccagcaatattatgcactcaatcaacggctatgtgtttgatagtctccagctttctgtttgcctccatgaagtagcctattggtacatcttgtcaattggtgctcaaacagacttcctctccgtcttcttctccggctacacctttaagcacaagatggtgtatgaggacactctcacactctttccattttctggagaaaccgtgttcatgagcatggagaatccaggcctttggatcttgggttgccacaacagtgattttcgcaatcggggaatgactgctctcctcaaagtcagcagctgtgataagaacacaggcgactattacgaagattcttacgaggacataagtgcctacttgttgtccaagaataacgccattgagcccagatcattctcccagaatcctcccgtgcttaaaaggcatcagcgcgaaatcaccagaactactcttcagtctgatcaagaggagattgactatgacgacaccataagcgtggaaatgaagaaggaggatttcgatatctatgacgaagatgagaaccagtctccgcggagctttcagaagaagacgcgacactacttcattgcagcagtcgaaaggctttgggactacggtatgtcatcatcccctcatgtgttgcgcaatagagctcagagtggaagtgttccacagttcaagaaagtcgtctttcaagagtttacagatggcagcttcacacagcctctctatcggggcgagcttaacgaacatttgggactccttggtccctatatccgagccgaagtggaggacaacattatggttacctttaggaatcaagcctctcgcccctacagcttctactcctccctcatcagttatgaggaggatcagagacaaggcgctgaaccacggaagaactttgtgaaaccgaatgagacgaagacctacttctggaaagtacagcaccacatggcccccacaaaagacgaattcgattgcaaagcatgggcgtatttttcagacgttgacttggagaaagatgtacattcaggacttattggtcctttgttggtgtgtcacactaacactctcaatccagcccatggcaggcaggtgacagtccaggaattcgctcttttctttaccatctttgatgagaccaagtcctggtacttcacggaaaacatggagcgcaattgcagagccccctgtaacatacagatggaggaccctacctttaaggaaaattatcggttccacgcaatcaacggatacattatggatacactccctggccttgtgatggctcaggaccaacgaatcaggtggtacctcctcagcatgggttctaatgagaacatacactccattcacttttcaggacatgtgttcactgtccggaagaaagaagagtataagatggccctctacaatttgtatccaggcgtgtttgagaccgttgaaatgcttccctctaaagctggcatctggagagtagagtgcttgatcggagaacatcttcacgcaggtatgagcaccttgttcctcgtgtacagcaacaaatgtcagaccccacttggcatggccagtggacacattcgcgactttcagatcacagcatctggccagtatggacaatgggccccaaagttggctcgcctccattactccggtagcataaatgcgtggtccactaaagaacctttcagctggattaaggtcgatcttcttgcccccatgatcatccacggcattaagacacagggagcgaggcagaaattctcctccctctacatctcacagttcattattatgtatagtttggacggcaagaagtggcaaacttatagaggtaacagtactggaacactcatggtgttcttcggcaacgttgatagctctggcatcaaacacaacatctttaatcctcccataatagctcggtacatcagattgcatccgacccactacagcattaggagtacactccgaatggagcttatgggttgcgacttgaattcctgttcaatgccactcggaatggagtctaaagccatctctgatgcacagataaccgccagtagctactttacgaacatgtttgctacgtggtcaccctctaaggcaaggcttcatttgcaaggccggtctaatgcctggagacctcaggtgaacaacccgaaagaatggctccaggtggactttcagaagaccatgaaagtaacaggtgtcactactcagggagttaagtccttggataccagcatgtatgtgaaggagttccttatttcctcatcacaagatggccaccagtggaccctcttctttcagaatggtaaggtcaaagtgtttcagggcaatcaagacagcttcacacccgtggtgaacagtcttgatcctccactcttgacacgataccttcgaatccatccacagtcttgggttcaccagattgcattgcgcatggaagtacttggatgcgaggctcaggacctctac

SEQ ID NO: 410 - protein, 1457 aa, synthetic construct
  REGION 1..1457: note = Variant of human B-domain deleted Factor VIII
MQIELSTCFFLCLLRFCFSATRRYYLGAVELSWDYMQSDLGELPVDARFPPRVPKSFPFNTSRVYKKTLFVEFTDHLFNIAKPRPPWMGLLGPTIQAEVYDTVVITLKNMASHPVSLHAVGVSYWKASEGAEYDDQTSQREKEDDKVFPGGSHTYVWQVLKENGPMASDPLCLTYSYLSHVDLVKDLNSGLIGALLVCREGSLAKEKTQTLHKFILLFAVFDEGKSWHSETKNSLMQDRDAASARAWPKMHTVNGYVNRSLPGLIGCHRKSVYWHVIGMGTTPEVHSIFLEGHTFLVRNHRQASLEISPITFLTAQTLLMDLGQFLLFCHISSHQHDGMEAYVKVDSCPEEPQLRMKNNEEAEDYDDDLTDSEMDVVRFDDDNSPSFIQIRSVAKKHPKTWVHYIAAEEEDWDYAPLVLAPDDRSYKSQYLNNGPQRIGRKYKKVRFMAYTDETFKTREAIQHESGILGPLLYGEVGDTLLIIFKNQASRPYNIYPHGITDVRPLYSRRLPKGVKHLKDFPILPGEIFKYKWTVTVEDGPTKSDPRCLTRYYSSFVNMERDLASGLIGPLLICYKESVDQRGNQIMSDKRNVILFSVFDENRSWYLTENIQRFLPNPAGVQLEDPEFQASNIMHSINGYVFDSLQLSVCLHEVAYWYILSIGAQTDFLSVFFSGYTFKHKMVYEDTLTLFPFSGETVFMSMENPGLWILGCHNSDFRNRGMTALLKVSSCDKNTGDYYEDSYEDISAYLLSKNNAIEPRSFSQNPPVLKRHQREITRTTLQSDQEEIDYDDTISVEMKKEDFDIYDEDENQSPRSFQKKTRHYFIAAVERLWDYGMSSSPHVLRNRAQSGSVPQFKKVVFQEFTDGSFTQPLYRGELNEHLGLLGPYIRAEVEDNIMVTFRNQASRPYSFYSSLISYEEDQRQGAEPRKNFVKPNETKTYFWKVQHHMAPTKDEFDCKAWAYFSDVDLEKDVHSGLIGPLLVCHTNTLNPAHGRQVTVQEFALFFTIFDETKSWYFTENMERNCRAPCNIQMEDPTFKENYRFHAINGYIMDTLPGLVMAQDQRIRWYLLSMGSNENIHSIHFSGHVFTVRKKEEYKMALYNLYPGVFETVEMLPSKAGIWRVECLIGEHLHAGMSTLFLVYSNKCQTPLGMASGHIRDFQITASGQYGQWAPKLARLHYSGSINAWSTKEPFSWIKVDLLAPMIIHGIKTQGARQKFSSLYISQFIIMYSLDGKKWQTYRGNSTGTLMVFFGNVDSSGIKHNIFNPPIIARYIRLHPTHYSIRSTLRMELMGCDLNSCSMPLGMESKAISDAQITASSYFTNMFATWSPSKARLHLQGRSNAWRPQVNNPKEWLQVDFQKTMKVTGVTTQGVKSLDTSMYVKEFLISSSQDGHQWTLFFQNGKVKVFQGNQDSFTPVVNSLDPPLLTRYLRIHPQSWVHQIALRMEVLGCEAQDLY

SEQ ID NO: 411 - DNA, 4371 bp, synthetic construct
  misc_feature 1..4371: note = Variant of human B-domain deleted Factor VIII
  source 1..4371: mol_type = other DNA
atgcagattgaactgtctacctgcttcttcctctgtttgctgaggttctgctttagcgccactagacggtactaccttggcgctgtggagctgtcctgggactatatgcagagtgatttgggagagcttcccgtcgacgcacgatttcctcctcgcgttccaaagtcatttcccttcaacacaagcgtggtgtacaagaagacgctcttcgtcgaattcaccgatcacctgttcaatatcgccaaacccagaccaccatggatgggtcttttggggcctaccatacaagcggaggtgtatgacacagttgttatcactctcaagaacatggcttctcatccggtaagtcttcacgcagtgggcgtgtcctactggaaagcttcagaaggagccgagtatgatgatcagacatcccagagggagaaagaagacgacaaggtatttccaggtgggtctcatacctatgtgtggcaagtgctcaaagagaatggccctatggcaagcgatccgctctgtttgacttacagctacctttcacacgttgacctcgtcaaggacctcaactccgggttgattggagccttgttggtatgcagggaaggatctcttgccaaagagaagacacagaccctccacaagtttatccttctctttgctgtgttcgatgagggcaaaagttggcatagcgaaacgaagaattccctcatgcaggatcgcgacgcagccagcgccagagcttggcccaagatgcacactgtgaacggatatgtcaataggtcacttcctggcttgtcggggtgtcatcggaaaagtgtctactggcacgtgatcggaatggggacaacaccagaggtccactccatatttctcgaaggccataccttccttgttcgaaaccacagacaggcatccttggagatctctcccattacctttctcactgcccaaacgctccttatggacttgggtcagttccttctcttctgccatatcagctcacaccagcatgatggtatggaagcttatgtgaaagtcgacagttgtcctgaggagccacagttgcgcatgaagaataatgaagaagccgaggattacgacgacgatctcaccgattctgagatggacgtggtgaggtttgatgacgacaactctccctccttcattcaaatccggagcgtggcgaagaaacaccccaagacttgggtccactatatagcggcggaagaggaggattgggattacgctcctcttgtattggcaccagatgaccgctcatacaaaagccagtacctcaacaacggaccgcagagaattggccggaagtataagaaagtgcgatttatggcctatacagacgaaacctttaagacaagggaggccatccagcatgagagtgggattttgggacctcttctttacggcgaagttggtgataccctcctcatcatcttcaagaatcaagcttctcgcccctataacatttacccacacgggatcactgacgttaggcctttgtatagcagaagacttcccaaaggcgtgaagcatctcaaagacttccccattttgccaggcgagatctttaagtacaaatggaccgtcacagtggaagatggaccgactaaatcagaccctcgatgccttacgcggtactattcctccttcgtgaatatggagagagatttggcaagcggactcataggaccactcctcatctgttacaaggaatctgtagaccagaggggtaaccagattatgagtgataaacgcaatgtgatcctttttagcgtcttcgacgagaaccggtcctggtacttgaccgagaatatacaaaggttccttcccaaccccgcaggcgttcagttggaagaccctgagtttcaggccagcaatattatgcactcaatcaacggctatgtgtttgatagtctccagctttctgtttgcctccatgaagtagcctattggtacatcttgtcaattggtgctcaaacagacttcctctccgtcttcttctccggctacacctttaagcacaagatggtgtatgaggacactctcacactctttccattttctggagaaaccgtgttcatgagcatggagaatccaggcctttggatcttgggttgccacaacagtgattttcgcaatcggggaatgactgctctcctcaaagtcagcagctgtgataagaacacaggcgactattacgaagattcttacgaggacataagtgcctacttgttgtccaagaataacgccattgagcccagatcattctcccagaatcctcccgtgcttaaaaggcatcagcgcgaaatcaccagaactactcttcagtctgatcaagaggagattgactatgacgacaccataagcgtggaaatgaagaaggaggatttcgatatctatgacgaagatgagaaccagtctccgcggagctttcagaagaagacgcgacactacttcattgcagcagtcgaaaggctttgggactacggtatgtcatcatcccctcatgtgttgcgcaatagagctcagagtggaagtgttccacagttcaagaaagtcgtctttcaagagtttacagatggcagcttcacacagcctctctatcggggcgagcttaacgaacatttgggactccttggtccctatatccgagccgaagtggaggacaacattatggttacctttaggaatcaagcctctcgcccctacagcttctactcctccctcatcagttatgaggaggatcagagacaaggcgctgaaccacggaagaactttgtgaaaccgaatgagacgaagacctacttctggaaagtacagcaccacatggcccccacaaaagacgaattcgattgcaaagcatgggcgtatttttcagacgttgacttggagaaagatgtacattcaggacttattggtcctttgttggtgtgtcacactaacactctcaatccagcccatggcaggcaggtgacagtccaggaattcgctcttttctttaccatctttgatgagaccaagtcctggtacttcacggaaaacatggagcgcaattgcagagccccctgtaacatacagatggaggaccctacctttaaggaaaattatcggttccacgcaatcaacggatacattatggatacactccctggccttgtgatggctcaggaccaacgaatcaggtggtacctcctcagcatgggttctaatgagaacatacactccattcacttttcaggacatgtgttcactgtccggaagaaagaagagtataagatggccctctacaatttgtatccaggcgtgtttgagaccgttgaaatgcttccctctaaagctggcatctggagagtagagtgcttgatcggagaacatcttcacgcaggtatgagcaccttgttcctcgtgtacagcaacaaatgtcagaccccacttggcatggccagtggacacattcgcgactttcagatcacagcatctggccagtatggacaatgggccccaaagttggctcgcctccattactccggtagcataaatgcgtggtccactaaagaacctttcagctggattaaggtcgatcttcttgcccccatgatcatccacggcattaagacacagggagcgaggcagaaattctcctccctctacatctcacagttcattattatgtatagtttggacggcaagaagtggcaaacttatagaggtaacagtactggaacactcatggtgttcttcggcaacgttgatagctctggcatcaaacacaacatctttaatcctcccataatagctcggtacatcagattgcatccgacccactacagcattaggagtacactccgaatggagcttatgggttgcgacttgaattcctgttcaatgccactcggaatggagtctaaagccatctctgatgcacagataaccgccagtagctactttacgaacatgtttgctacgtggtcaccctctaaggcaaggcttcatttgcaaggccggtctaatgcctggagacctcaggtgaacaacccgaaagaatggctccaggtggactttcagaagaccatgaaagtaacaggtgtcactactcagggagttaagtccttggataccagcatgtatgtgaaggagttccttatttcctcatcacaagatggccaccagtggaccctcttctttcagaatggtaaggtcaaagtgtttcagggcaatcaagacagcttcacacccgtggtgaacagtcttgatcctccactcttgacacgataccttcgaatccatccacagtcttgggttcaccagattgcattgcgcatggaagtacttggatgcgaggctcaggacctctac

SEQ ID NO: 412 - protein, 1457 aa, synthetic construct
  REGION 1..1457: note = Variant of human B-domain deleted Factor VIII
MQIELSTCFFLCLLRFCFSATRRYYLGAVELSWDYMQSDLGELPVDARFPPRVPKSFPFNTSVVYKKTLFVEFTDHLFNIAKPRPPWMGLLGPTIQAEVYDTVVITLKNMASHPVSLHAVGVSYWKASEGAEYDDQTSQREKEDDKVFPGGSHTYVWQVLKENGPMASDPLCLTYSYLSHVDLVKDLNSGLIGALLVCREGSLAKEKTQTLHKFILLFAVFDEGKSWHSETKNSLMQDRDAASARAWPKMHTVNGYVNRSLPGLSGCHRKSVYWHVIGMGTTPEVHSIFLEGHTFLVRNHRQASLEISPITFLTAQTLLMDLGQFLLFCHISSHQHDGMEAYVKVDSCPEEPQLRMKNNEEAEDYDDDLTDSEMDVVRFDDDNSPSFIQIRSVAKKHPKTWVHYIAAEEEDWDYAPLVLAPDDRSYKSQYLNNGPQRIGRKYKKVRFMAYTDETFKTREAIQHESGILGPLLYGEVGDTLLIIFKNQASRPYNIYPHGITDVRPLYSRRLPKGVKHLKDFPILPGEIFKYKWTVTVEDGPTKSDPRCLTRYYSSFVNMERDLASGLIGPLLICYKESVDQRGNQIMSDKRNVILFSVFDENRSWYLTENIQRFLPNPAGVQLEDPEFQASNIMHSINGYVFDSLQLSVCLHEVAYWYILSIGAQTDFLSVFFSGYTFKHKMVYEDTLTLFPFSGETVFMSMENPGLWILGCHNSDFRNRGMTALLKVSSCDKNTGDYYEDSYEDISAYLLSKNNAIEPRSFSQNPPVLKRHQREITRTTLQSDQEEIDYDDTISVEMKKEDFDIYDEDENQSPRSFQKKTRHYFIAAVERLWDYGMSSSPHVLRNRAQSGSVPQFKKVVFQEFTDGSFTQPLYRGELNEHLGLLGPYIRAEVEDNIMVTFRNQASRPYSFYSSLISYEEDQRQGAEPRKNFVKPNETKTYFWKVQHHMAPTKDEFDCKAWAYFSDVDLEKDVHSGLIGPLLVCHTNTLNPAHGRQVTVQEFALFFTIFDETKSWYFTENMERNCRAPCNIQMEDPTFKENYRFHAINGYIMDTLPGLVMAQDQRIRWYLLSMGSNENIHSIHFSGHVFTVRKKEEYKMALYNLYPGVFETVEMLPSKAGIWRVECLIGEHLHAGMSTLFLVYSNKCQTPLGMASGHIRDFQITASGQYGQWAPKLARLHYSGSINAWSTKEPFSWIKVDLLAPMIIHGIKTQGARQKFSSLYISQFIIMYSLDGKKWQTYRGNSTGTLMVFFGNVDSSGIKHNIFNPPIIARYIRLHPTHYSIRSTLRMELMGCDLNSCSMPLGMESKAISDAQITASSYFTNMFATWSPSKARLHLQGRSNAWRPQVNNPKEWLQVDFQKTMKVTGVTTQGVKSLDTSMYVKEFLISSSQDGHQWTLFFQNGKVKVFQGNQDSFTPVVNSLDPPLLTRYLRIHPQSWVHQIALRMEVLGCEAQDLY

SEQ ID NO: 413 - DNA, 4371 bp, synthetic construct
  misc_feature 1..4371: note = Variant of human B-domain deleted Factor VIII
  source 1..4371: mol_type = other DNA
atgcagattgaactgtctacctgcttcttcctctgtttgctgaggttctgctttagcgccactagacggtactaccttggcgctgtggagctgtcctgggactatatgcagagtgatttgggagagcttcccgtcgacgcacgatttcctcctcgcgttccaaagtcatttcccttcaacacaagcgtggtgtacaagaagacgctcttcgtcgaattcaccgatcacctgttcaatatcgccaaacccagaccaccatggatgggtcttttggggcctaccatacaagcggaggtgtatgacacagttgttatcactctcaagaacatggcttctcatccggtaagtcttcacgcagtgggcgtgtcctactggaaagcttcagaaggagccgagtatgatgatcagacatcccagagggagaaagaagacgacaaggtatttccaggtgggtctcatacctatgtgtggcaagtgctcaaagagaatggccctatggcaagcgatccgctctgtttgacttacagctacctttcacacgttgacctcgtcaaggacctcaactccgggttgattggagccttgttggtatgcagggaaggatctcttgccaaagagaagacacagaccctccacaagtttatccttctctttgctgtgttcgatgagggcaaaagttggcatagcgaaacgaagaattccctcatgcaggatcgcgacgcagccagcgccagagcttggcccaagatgcacactgtgaacggatatgtcaataggtcacttcctggcttgattgggtgtcatcggaaaagtgtctactggcacgtgatcggaatggggacaacaccagaggtccactccatatttctcgaaggccataccttccttgttcgaaaccacagacaggcatccttggagatctctcccattacctttctcactgcccaaacgctccttatggacttgggtcagttccttctcttctgccatatcagctcacaccagcatgatggtatggaagcttatgtgaaagtcgacagttgtcctgaggagccacagttgcgcatgaagaataatgaagaagccgaggattacgacgacgatctcaccgattctgagatggacgtggtgaggtttgatgacgacaactctccctccttcattcaaatccggagcgtggcgaagaaacaccccaagacttgggtccactatatagcggcggaagaggaggattgggattacgctcctcttgtattggcaccagatgaccgctcatacaaaagccagtacctcaacaacggaccgcagagaattggccggaagtataagaaagtgcgatttatggcctatacagacgaaacctttaagacaagggaggccatccagcatgagagtgggattttgggacctcttctttacggcgaagttggtgataccctcctcatcatcttcaagaatcaagcttctcgcccctataacatttacccacacgggatcactgacgttaggcctttgtatagcagaagacttcccaaaggcgtgaagcatctcaaagacttccccattttgccaggcgagatctttaagtacaaatggaccgtcacagtggaagatggaccgactaaatcagaccctcgatgccttacgcggtactattcctccttcgtgaatatggagagagatttggcaagcggactcataggaccactcctcatctgttacaaggaatctgtagaccagaggggtaaccagattatgagtgataaacgcaatgtgatcctttttagcgtcttcgacgagaaccggtcctggtacttgaccgagaatatacaaaggttccttcccaaccccgcaggcgttcagttggaagaccctgagtttcaggccagcaatattatgcactcaatcaacggctatgtgtttgatagtctccagctttctgtttgcctccatgaagtagcctattggtacatcttgtcaattggtgctcaaacagacttcctctccgtcttcttctccggctacacctttaagcacaagatggtgtatgaggacactctcacactctttccattttctggagaaaccgtgttcatgagcatggagaatccaggcctttggatcttgggttgccacaacagtgattttcgcaatcggggaatgactgctctcctcaaagtcagcagctgtgataagaacacaggcgactattacgaagattcttacgaggacataagtgcctacttgttgtccaagaataacgccattgagcccagatcattctcccagaatcctcccgtgcttaaaaggcatcagcgcgaaatcaccagaactactcttcagtctgatcaagaggagattgactatgacgacaccataagcgtggaaatgaagaaggaggatttcgatatctatgacgaagatgagaaccagtctccgcggagctttcagaagaagacgcgacactacttcattgcagcagtcgaaaggctttgggactacggtatgtcatcatcccctcatgtgttgcgcaatagagctcagagtggaagtgttccacagttcaagaaagtcgtctttcaagagtttacagatggcagcttcacacagcctctctatcggggcgagcttaacgaacatttgggactccttggtccctatatccgagccgaagtggaggacaacattatggttacctttaggaatcaagcctctcgcccctacagcttctactcctccctcatcagttatgaggaggatcagagacaaggcgctgaaccacggaagaactttgtgaaaccgaatgagacgaagacctacttctggaaagtacagcaccacatggcccccacaaaagacgaattcgattgcaaagcatgggcgtatttttcagacgttgacttggagaaagatgtacattcaggacttattggtcctttgttggtgtgtcacactaacactctcaatccagcccatggcaggcaggtgacagtccaggaattcgctcttttctttaccatctttgatgagaccaagtcctggtacttcacggaaaacatggagcgcaattgcagagccccctgtaacatacagatggaggaccctacctttaaggaaaattatcggttccacgcaatcaacggatacattatggatacactccctggccttgtgatggctcaggaccaacgaatcaggtggtacctcctcagcatgggttctaatgagaacatacactccattcacttttcaggacatgtgttcactgtccggaagaaagaagagtataagatggccctctacaatttgtatccaggcgtgtttgagaccgttgaaatgcttccctctaaagctggcatctggagagtagagtgcttgatcggagaacatcttcacgcaggtatgagcaccttgttcctcgtgtacagcaacaaatgtcagaccccacttggcatggccagtggacacattcgcgactttcagatcacagcatctggccagtatggacaatgggccccaaagttggctcgcctccattactccggtagcataaatgcgtggtccactaaagaacctttcagctggattaaggtcgatcttcttgcccccatgatcatccacggcattaagacacagggagcgaggcagaaattctcctccacttacatctcacagttcattattatgtatagtttggacggcaagaagtggcaaacttatagaggtaacagtactggaacactcatggtgttcttcggcaacgttgatagctctggcatcaaacacaacatctttaatcctcccataatagctcggtacatcagattgcatccgacccactacagcattaggagtacactccgaatggagcttatgggttgcgacttgaattcctgttcaatgccactcggaatggagtctaaagccatctctgatgcacagataaccgccagtagctactttacgaacatgtttgctacgtggtcaccctctaaggcaaggcttcatttgcaaggccggtctaatgcctggagacctcaggtgaacaacccgaaagaatggctccaggtggactttcagaagaccatgaaagtaacaggtgtcactactcagggagttaagtccttggataccagcatgtatgtgaaggagttccttatttcctcatcacaagatggccaccagtggaccctcttctttcagaatggtaaggtcaaagtgtttcagggcaatcaagacagcttcacacccgtggtgaacagtcttgatcctccactcttgacacgataccttcgaatccatccacagtcttgggttcaccagattgcattgcgcatggaagtacttggatgcgaggctcaggacctctac

SEQ ID NO: 414 - protein, 1457 aa, synthetic construct
  REGION 1..1457: note = Variant of human B-domain deleted Factor VIII
MQIELSTCFFLCLLRFCFSATRRYYLGAVELSWDYMQSDLGELPVDARFPPRVPKSFPFNTSVVYKKTLFVEFTDHLFNIAKPRPPWMGLLGPTIQAEVYDTVVITLKNMASHPVSLHAVGVSYWKASEGAEYDDQTSQREKEDDKVFPGGSHTYVWQVLKENGPMASDPLCLTYSYLSHVDLVKDLNSGLIGALLVCREGSLAKEKTQTLHKFILLFAVFDEGKSWHSETKNSLMQDRDAASARAWPKMHTVNGYVNRSLPGLIGCHRKSVYWHVIGMGTTPEVHSIFLEGHTFLVRNHRQASLEISPITFLTAQTLLMDLGQFLLFCHISSHQHDGMEAYVKVDSCPEEPQLRMKNNEEAEDYDDDLTDSEMDVVRFDDDNSPSFIQIRSVAKKHPKTWVHYIAAEEEDWDYAPLVLAPDDRSYKSQYLNNGPQRIGRKYKKVRFMAYTDETFKTREAIQHESGILGPLLYGEVGDTLLIIFKNQASRPYNIYPHGITDVRPLYSRRLPKGVKHLKDFPILPGEIFKYKWTVTVEDGPTKSDPRCLTRYYSSFVNMERDLASGLIGPLLICYKESVDQRGNQIMSDKRNVILFSVFDENRSWYLTENIQRFLPNPAGVQLEDPEFQASNIMHSINGYVFDSLQLSVCLHEVAYWYILSIGAQTDFLSVFFSGYTFKHKMVYEDTLTLFPFSGETVFMSMENPGLWILGCHNSDFRNRGMTALLKVSSCDKNTGDYYEDSYEDISAYLLSKNNAIEPRSFSQNPPVLKRHQREITRTTLQSDQEEIDYDDTISVEMKKEDFDIYDEDENQSPRSFQKKTRHYFIAAVERLWDYGMSSSPHVLRNRAQSGSVPQFKKVVFQEFTDGSFTQPLYRGELNEHLGLLGPYIRAEVEDNIMVTFRNQASRPYSFYSSLISYEEDQRQGAEPRKNFVKPNETKTYFWKVQHHMAPTKDEFDCKAWAYFSDVDLEKDVHSGLIGPLLVCHTNTLNPAHGRQVTVQEFALFFTIFDETKSWYFTENMERNCRAPCNIQMEDPTFKENYRFHAINGYIMDTLPGLVMAQDQRIRWYLLSMGSNENIHSIHFSGHVFTVRKKEEYKMALYNLYPGVFETVEMLPSKAGIWRVECLIGEHLHAGMSTLFLVYSNKCQTPLGMASGHIRDFQITASGQYGQWAPKLARLHYSGSINAWSTKEPFSWIKVDLLAPMIIHGIKTQGARQKFSSTYISQFIIMYSLDGKKWQTYRGNSTGTLMVFFGNVDSSGIKHNIFNPPIIARYIRLHPTHYSIRSTLRMELMGCDLNSCSMPLGMESKAISDAQITASSYFTNMFATWSPSKARLHLQGRSNAWRPQVNNPKEWLQVDFQKTMKVTGVTTQGVKSLDTSMYVKEFLISSSQDGHQWTLFFQNGKVKVFQGNQDSFTPVVNSLDPPLLTRYLRIHPQSWVHQIALRMEVLGCEAQDLY

SEQ ID NO: 415 - DNA, 4371 bp, synthetic construct
  misc_feature 1..4371: note = Variant of human B-domain deleted Factor VIII
  source 1..4371: mol_type = other DNA
atgcagattgaactgtctacctgcttcttcctctgtttgctgaggttctgctttagcgccactagacggtactaccttggcgctgtggagctgtcctgggactatatgcagagtgatttgggagagcttcccgtcgacgcacgatttcctcctcgcgttccaaagtcatttcccttcaacacaagcgtggtgtacaagaagacgctcttcgtcgaattcaccgatcacctgttcaatatcgccaaacccagaccaccatggatgggtcttttggggcctaccatacaagcggaggtgtatgacacagttgttatcactctcaagaacatggcttctcatccggtaagtcttcacgcagtgggcgtgtcctactggaaagcttcagaaggagccgagtatgatgatcagacatcccagagggagaaagaagacgacaaggtatttccaggtgggtctcatacctatgtgtggcaagtgctcaaagagaatggccctatggcaagcgatccgctctgtttgacttacagctacctttcacacgttgacctcgtcaaggacctcaactccgggttgattggagccttgttggtatgcagggaaggatctcttgccaaagagaagacacagaccctccacaagtttatccttctctttgctgtgttcgatgagggcaaaagttggcatagcgaaacgaagaattccctcatgcaggatcgcgacgcagccagcgccagagcttggcccaagatgcacactgtgaacggatatgtcaataggtcacttcctggcttgattgggtgtcatcggaaaagtgtctactggcacgtgatcggaatggggacaacaccagaggtccactccatatttctcgaaggccataccttccttgttcgaaaccacagacaggcatccttggagatctctcccattacctttctcactgcccaaacgctccttatggacttgggtcagttccttctcttctgccatatcagctcacaccagcatgatggtatggaagcttatgtgaaagtcgacagttgtcctgaggagccacagttgcgcatgaagaataatgaagaagccgaggattacgacgacgatctcaccgattctgagatggacgtggtgaggtttgatgacgacaactctccctccttcattcaaatccggagcgtggcgaagaaacaccccaagacttgggtccactatatagcggcggaagaggaggattgggattacgctcctcttgtattggcaccagatgaccgctcatacaaaagccagtacctcaacaacggaccgcagagaattggccggaagtataagaaagtgcgatttatggcctatacagacgaaacctttaagacaagggaggccatccagcatgagagtgggattttgggacctcttctttacggcgaagttggtgataccctcctcatcatcttcaagaatcaagcttctcgcccctataacatttacccacacgggatcactgacgttaggcctttgtatagcagaagacttcccaaaggcgtgaagcatctcaaagacttccccattttgccaggcgagatctttaagtacaaatggaccgtcacagtggaagatggaccgactaaatcagaccctcgatgccttacgcggtactattcctccttcgtgaatatggagagagatttggcaagcggactcataggaccactcctcatctgttacaaggaatctgtagaccagaggggtaaccagattatgagtgataaacgcaatgtgatcctttttagcgtcttcgacgagaaccggtcctggtacttgaccgagaatatacaaaggttccttcccaaccccgcaggcgttcagttggaagaccctgagtttcaggccagcaatattatgcactcaatcaacggctatgtgtttgatagtctccagctttctgtttgcctccatgaagtagcctattggtacatcttgtcaattggtgctcaaacagacttcctctccgtcttcttctccggctacacctttaagcacaagatggtgtatgaggacactctcacactctttccattttctggagaaaccgtgttcatgagcatggagaatccaggcctttggatcttgggttgccacaacagtgattttcgcaatcggggaatgactgctctcctcaaagtcagcagctgtgataagaacacaggcgactattacgaagattcttacgaggacataagtgcctacttgttgtccaagaataacgccattgagcccagatcattctcccagaatcctcccgtgcttaaaaggcatcagcgcgaaatcaccagaactactcttcagtctgatcaagaggagattgactatgacgacaccataagcgtggaaatgaagaaggaggatttcgatatctatgacgaagatgagaaccagtctccgcggagctttcagaagaagacgcgacactacttcattgcagcagtcgaaaggctttgggactacggtatgtcatcatcccctcatgtgttgcgcaatagagctcagagtggaagtgttccacagttcaagaaagtcgtctttcaagagtttacagatggcagcttcacacagcctctctatcggggcgagcttaacgaacatttgggactccttggtccctatatccgagccgaagtggaggacaacattatggttacctttaggaatcaagcctctcgcccctacagcttctactcctccctcatcagttatgaggaggatcagagacaaggcgctgaaccacggaagaactttgtgaaaccgaatgagacgaagacctacttctggaaagtacagcaccacatggcccccacaaaagacgaattcgattgcaaagcatgggcgtatttttcagacgttgacttggagaaagatgtacattcaggacttattggtcctttgttggtgtgtcacactaacactctcaatccagcccatggcaggcaggtgacagtccaggaattcgctcttttctttaccatctttgatgagaccaagtcctggtacttcacggaaaacatggagcgcaattgcagagccccctgtaacatacagatggaggaccctacctttaaggaaaattatcggttccacgcaatcaacggatacattatggatacactccctggccttgtgatggctcaggaccaacgaatcaggtggtacctcctcagcatgggttctaatgagaacatacactccattcacttttcaggacatgtgttcactgtccggaagaaagaagagtataagatggccctctacaatttgtatccaggcgtgtttgagaccgttgaaatgcttccctctaaagctggcatctggagagtagagtgcttgatcggagaacatcttcacgcaggtatgagcaccttgttcctcgtgtacagcaacaaatgtcagaccccacttggcatggccagtggacacattcgcgactttcagatcacagcatctggccagtatggacaatgggccccaaagttggctcgcctccattactccggtagcataaatgcgtggtccactaaagaacctttcagctggattaaggtcgatcttcttgcccccatgatcatccacggcattaagacacagggagcgaggcagaaattctcctccctctacatctcacagttcattattatgtatagtttggacggcaagaagtggcaaacttatagaggtaacagtactggaacactcatggtgttcttcggcaacgttgatagctctggcatcaaacacaacatctttaatcctcccataatagctcggtacatcagattgcatccgacccactacagcattaggagtacactccgaatggagcttatgggttgcgacttgaattcctgttcaatgccactcggaatggagtctaaagccatctctgatgcacagataaccgccagtagctactttacgaacatgtttgctacgtggtcaccctctaaggcaaggcttcatttgcaaggccggtctaatgcctggagacctcaggtgaacaacccgaaagaatggctccaggtggactttcagaagaccatgaaagtaacaggtgtcactactcagggagttaagtccttggataccagcggttatgtgaaggagttccttatttcctcatcacaagatggccaccagtggaccctcttctttcagaatggtaaggtcaaagtgtttcagggcaatcaagacagcttcacacccgtggtgaacagtcttgatcctccactcttgacacgataccttcgaatccatccacagtcttgggttcaccagattgcattgcgcatggaagtacttggatgcgaggctcaggacctctac

SEQ ID NO: 416 - protein, 1457 aa, synthetic construct
  REGION 1..1457: note = Variant of human B-domain deleted Factor VIII
MQIELSTCFFLCLLRFCFSATRRYYLGAVELSWDYMQSDLGELPVDARFPPRVPKSFPFNTSVVYKKTLFVEFTDHLFNIAKPRPPWMGLLGPTIQAEVYDTVVITLKNMASHPVSLHAVGVSYWKASEGAEYDDQTSQREKEDDKVFPGGSHTYVWQVLKENGPMASDPLCLTYSYLSHVDLVKDLNSGLIGALLVCREGSLAKEKTQTLHKFILLFAVFDEGKSWHSETKNSLMQDRDAASARAWPKMHTVNGYVNRSLPGLIGCHRKSVYWHVIGMGTTPEVHSIFLEGHTFLVRNHRQASLEISPITFLTAQTLLMDLGQFLLFCHISSHQHDGMEAYVKVDSCPEEPQLRMKNNEEAEDYDDDLTDSEMDVVRFDDDNSPSFIQIRSVAKKHPKTWVHYIAAEEEDWDYAPLVLAPDDRSYKSQYLNNGPQRIGRKYKKVRFMAYTDETFKTREAIQHESGILGPLLYGEVGDTLLIIFKNQASRPYNIYPHGITDVRPLYSRRLPKGVKHLKDFPILPGEIFKYKWTVTVEDGPTKSDPRCLTRYYSSFVNMERDLASGLIGPLLICYKESVDQRGNQIMSDKRNVILFSVFDENRSWYLTENIQRFLPNPAGVQLEDPEFQASNIMHSINGYVFDSLQLSVCLHEVAYWYILSIGAQTDFLSVFFSGYTFKHKMVYEDTLTLFPFSGETVFMSMENPGLWILGCHNSDFRNRGMTALLKVSSCDKNTGDYYEDSYEDISAYLLSKNNAIEPRSFSQNPPVLKRHQREITRTTLQSDQEEIDYDDTISVEMKKEDFDIYDEDENQSPRSFQKKTRHYFIAAVERLWDYGMSSSPHVLRNRAQSGSVPQFKKVVFQEFTDGSFTQPLYRGELNEHLGLLGPYIRAEVEDNIMVTFRNQASRPYSFYSSLISYEEDQRQGAEPRKNFVKPNETKTYFWKVQHHMAPTKDEFDCKAWAYFSDVDLEKDVHSGLIGPLLVCHTNTLNPAHGRQVTVQEFALFFTIFDETKSWYFTENMERNCRAPCNIQMEDPTFKENYRFHAINGYIMDTLPGLVMAQDQRIRWYLLSMGSNENIHSIHFSGHVFTVRKKEEYKMALYNLYPGVFETVEMLPSKAGIWRVECLIGEHLHAGMSTLFLVYSNKCQTPLGMASGHIRDFQITASGQYGQWAPKLARLHYSGSINAWSTKEPFSWIKVDLLAPMIIHGIKTQGARQKFSSLYISQFIIMYSLDGKKWQTYRGNSTGTLMVFFGNVDSSGIKHNIFNPPIIARYIRLHPTHYSIRSTLRMELMGCDLNSCSMPLGMESKAISDAQITASSYFTNMFATWSPSKARLHLQGRSNAWRPQVNNPKEWLQVDFQKTMKVTGVTTQGVKSLDTSGYVKEFLISSSQDGHQWTLFFQNGKVKVFQGNQDSFTPVVNSLDPPLLTRYLRIHPQSWVHQIALRMEVLGCEAQDLY

SEQ ID NO: 417 - DNA, 4371 bp, synthetic construct
  misc_feature 1..4371: note = Variant of human B-domain deleted Factor VIII
  source 1..4371: mol_type = other DNA
atgcagattgaactgtctacctgcttcttcctctgtttgctgaggttctgctttagcgccactagacggtactaccttggcgctgtggagctgtcctgggactatatgcagagtgatttgggagagcttcccgtcgacgcacgatttcctcctcgcgttccaaagtcatttcccttcaacacaagcgtggtgtacaagaagacgctcttcgtcgaattcaccgatcacctgttcaatatcgccaaacccagaccaccatggatgggtcttttggggcctaccatacaagcggaggtgtatgacacagttgttatcactctcaagaacatggcttctcatccggtaagtcttcacgcagtgggcgtgtcctactggaaagcttcagaaggagccgagtatgatgatcagacatcccagagggagaaagaagacgacaaggtatttccaggtgggtctcatacctatgtgtggcaagtgctcaaagagaatggccctatggcaagcgatccgctctgtttgacttacagctacctttcacacgttgacctcgtcaaggacctcaactccgggttgattggagccttgttggtatgcagggaaggatctcttgccaaagagaagacacagaccctccacaagtttatccttctctttgctgtgttcgatgagggcaaaagttggcatagcgaaacgaagaattccctcatgcaggatcgcgacgcagccagcgccagagcttggcccaagatgcacactgtgaacggatatgtcaataggtcacttcctggcttgattgggtgtcatcggaaaagtgtctactggcacgtgatcggaatggggacaacaccagaggtccactccatatttctcgaaggccataccttccttgttcgaaaccacagacaggcatccttggagatctctcccattacctttctcactgcccaaacgctccttatggacttgggtcagttccttctcttctgccatatcagctcacaccagcatgatggtatggaagcttatgtgaaagtcgacagttgtcctgaggagccacagttgcgcatgaagaataatgaagaagccgaggattacgacgacgatctcaccgattctgagatggacgtggtgaggtttgatgacgacaactctccctccttcattcaaatccggagcgtggcgaagaaacaccccaagacttgggtccactatatagcggcggaagaggaggattgggattacgctcctcttgtattggcaccagatgaccgctcatacaaaagccagtacctcaacaacggaccgcagagaattggccggaagtataagaaagtgcgatttatggcctatacagacgaaacctttaagacaagggaggccatccagcatgagagtgggattttgggacctcttctttacggcgaagttggtgataccctcctcatcatcttcaagaatcaagcttctcgcccctataacatttacccacacgggatcactgacgttaggcctttgtatagcagaagacttcccaaaggcgtgaagcatctcaaagacttccccattttgccaggcgagatctttaagtacaaatggaccgtcacagtggaagatggaccgactaaatcagaccctcgatgccttacgcggtactattcctccttcgtgaatatggagagagatttggcaagcggactcataggaccactcctcatctgttacaaggaatctgtagaccagaggggtaaccagattatgagtgataaacgcaatgtgatcctttttagcgtcttcgacgagaaccggtcctggtacttgaccgagaatatacaaaggttccttcccaaccccgcaggcgttcagttggaagaccctgagtttcaggccagcaatattatgcactcaatcaacggctatgtgtttgatagtctccagctttctgtttgcctccatgaagtagcctattggtacatcttgtcaattggtgctcaaacagacttcctctccgtcttcttctccggctacacctttaagcacaagatggtgtatgaggacactctcacactctttccattttctggagaaaccgtgttcatgagcatggagaatccaggcctttggatcttgggttgccacaacagtgattttcgcaatcggggaatgactgctctcctcaaagtcagcagctgtgataagaacacaggcgactattacgaagattcttacgaggacataagtgcctacttgttgtccgggaataacgccattgagcccagatcattctcccagaatcctcccgtgcttaaaaggcatcagcgcgaaatcaccagaactactcttcagtctgatcaagaggagattgactatgacgacaccataagcgtggaaatgaagaaggaggatttcgatatctatgacgaagatgagaaccagtctccgcggagctttcagaagaagacgcgacactacttcattgcagcagtcgaaaggctttgggactacggtatgtcatcatcccctcatgtgttgcgcaatagagctcagagtggaagtgttccacagttcaagaaagtcgtctttcaagagtttacagatggcagcttcacacagcctctctatcggggcgagcttaacgaacatttgggactccttggtccctatatccgagccgaagtggaggacaacattatggttacctttaggaatcaagcctctcgcccctacagcttctactcctccctcatcagttatgaggaggatcagagacaaggcgctgaaccacggaagaactttgtgaaaccgaatgagacgaagacctacttctggaaagtacagcaccacatggcccccacaaaagacgaattcgattgcaaagcatgggcgtatttttcagacgttgacttggagaaagatgtacattcaggacttattggtcctttgttggtgtgtcacactaacactctcaatccagcccatggcaggcaggtgacagtccaggaattcgctcttttctttaccatctttgatgagaccaagtcctggtacttcacggaaaacatggagcgcaattgcagagccccctgtaacatacagatggaggaccctacctttaaggaaaattatcggttccacgcaatcaacggatacattatggatacactccctggccttgtgatggctcaggaccaacgaatcaggtggtacctcctcagcatgggttctaatgagaacatacactccattcacttttcaggacatgtgttcactgtccggaagaaagaagagtataagatggccctctacaatttgtatccaggcgtgtttgagaccgttgaaatgcttccctctaaagctggcatctggagagtagagtgcttgatcggagaacatcttcacgcaggtatgagcaccttgttcctcgtgtacagcaacaaatgtcagaccccacttggcatggccagtggacacattcgcgactttcagatcacagcatctggccagtatggacaatgggccccaaagttggctcgcctccattactccggtagcataaatgcgtggtccactaaagaacctttcagctggattaaggtcgatcttcttgcccccatgatcatccacggcattaagacacagggagcgaggcagaaattctcctccctctacatctcacagttcattattatgtatagtttggacggcaagaagtggcaaacttatagaggtaacagtactggaacactcatggtgttcttcggcaacgttgatagctctggcatcaaacacaacatctttaatcctcccataatagctcggtacatcagattgcatccgacccactacagcattaggagtacactccgaatggagcttatgggttgcgacttgaattcctgttcaatgccactcggaatggagtctaaagccatctctgatgcacagataaccgccagtagctactttacgaacatgtttgctacgtggtcaccctctaaggcaaggcttcatttgcaaggccggtctaatgcctggagacctcaggtgaacaacccgaaagaatggctccaggtggactttcagaagaccatgaaagtaacaggtgtcactactcagggagttaagtccttggataccagcatgtatgtgaaggagttccttatttcctcatcacaagatggccaccagtggaccctcttctttcagaatggtaaggtcaaagtgtttcagggcaatcaagacagcttcacacccgtggtgaacagtcttgatcctccactcttgacacgataccttcgaatccatccacagtcttgggttcaccagattgcattgcgcatggaagtacttggatgcgaggctcaggacctctac

SEQ ID NO: 418 - protein, 1457 aa, synthetic construct
  REGION 1..1457: note = Variant of human B-domain deleted Factor VIII
MQIELSTCFFLCLLRFCFSATRRYYLGAVELSWDYMQSDLGELPVDARFPPRVPKSFPFNTSVVYKKTLFVEFTDHLFNIAKPRPPWMGLLGPTIQAEVYDTVVITLKNMASHPVSLHAVGVSYWKASEGAEYDDQTSQREKEDDKVFPGGSHTYVWQVLKENGPMASDPLCLTYSYLSHVDLVKDLNSGLIGALLVCREGSLAKEKTQTLHKFILLFAVFDEGKSWHSETKNSLMQDRDAASARAWPKMHTVNGYVNRSLPGLIGCHRKSVYWHVIGMGTTPEVHSIFLEGHTFLVRNHRQASLEISPITFLTAQTLLMDLGQFLLFCHISSHQHDGMEAYVKVDSCPEEPQLRMKNNEEAEDYDDDLTDSEMDVVRFDDDNSPSFIQIRSVAKKHPKTWVHYIAAEEEDWDYAPLVLAPDDRSYKSQYLNNGPQRIGRKYKKVRFMAYTDETFKTREAIQHESGILGPLLYGEVGDTLLIIFKNQASRPYNIYPHGITDVRPLYSRRLPKGVKHLKDFPILPGEIFKYKWTVTVEDGPTKSDPRCLTRYYSSFVNMERDLASGLIGPLLICYKESVDQRGNQIMSDKRNVILFSVFDENRSWYLTENIQRFLPNPAGVQLEDPEFQASNIMHSINGYVFDSLQLSVCLHEVAYWYILSIGAQTDFLSVFFSGYTFKHKMVYEDTLTLFPFSGETVFMSMENPGLWILGCHNSDFRNRGMTALLKVSSCDKNTGDYYEDSYEDISAYLLSGNNAIEPRSFSQNPPVLKRHQREITRTTLQSDQEEIDYDDTISVEMKKEDFDIYDEDENQSPRSFQKKTRHYFIAAVERLWDYGMSSSPHVLRNRAQSGSVPQFKKVVFQEFTDGSFTQPLYRGELNEHLGLLGPYIRAEVEDNIMVTFRNQASRPYSFYSSLISYEEDQRQGAEPRKNFVKPNETKTYFWKVQHHMAPTKDEFDCKAWAYFSDVDLEKDVHSGLIGPLLVCHTNTLNPAHGRQVTVQEFALFFTIFDETKSWYFTENMERNCRAPCNIQMEDPTFKENYRFHAINGYIMDTLPGLVMAQDQRIRWYLLSMGSNENIHSIHFSGHVFTVRKKEEYKMALYNLYPGVFETVEMLPSKAGIWRVECLIGEHLHAGMSTLFLVYSNKCQTPLGMASGHIRDFQITASGQYGQWAPKLARLHYSGSINAWSTKEPFSWIKVDLLAPMIIHGIKTQGARQKFSSLYISQFIIMYSLDGKKWQTYRGNSTGTLMVFFGNVDSSGIKHNIFNPPIIARYIRLHPTHYSIRSTLRMELMGCDLNSCSMPLGMESKAISDAQITASSYFTNMFATWSPSKARLHLQGRSNAWRPQVNNPKEWLQVDFQKTMKVTGVTTQGVKSLDTSMYVKEFLISSSQDGHQWTLFFQNGKVKVFQGNQDSFTPVVNSLDPPLLTRYLRIHPQSWVHQIALRMEVLGCEAQDLY

SEQ ID NO: 419 - DNA, 4371 bp, synthetic construct
  misc_feature 1..4371: note = Variant of human B-domain deleted Factor VIII
  source 1..4371: mol_type = other DNA
atgcagattgaactgtctacctgcttcttcctctgtttgctgaggttctgctttagcgccactagacggtactaccttggcgctgtggagctgtcctgggactatatgcagagtgatttgggagagcttcccgtcgacgcacgatttcctcctcgcgttccaaagtcatttcccttcaacacaagcgtggtgtacaagaagacgctcttcgtcgaattcaccgatcacctgttcaatatcgccaaacccagaccaccatggatgggtcttttggggcctaccatacaagcggaggtgtatgacacagttgttatcactctcaagaacatggcttctcatccggtaagtcttcacgcagtgggcgtgtcctactggaaagcttcagaaggagccgagtatgatgatcagacatcccagagggagaaagaagacgacaaggtatttccaggtgggtctcatacctatgtgtggcaagtgctcaaagagaatggccctatggcaagcgatccgctctgtttgacttacagctacctttcacacgttgacctcgtcaaggacctcaactccgggttgattggagccttgttggtatgcagggaaggatctcttgccaaagagaagacacagaccctccacaagtttatccttctctttgctgtgttcgatgagggcaaaagttggcatagcgaaacgaagaattccctcatgcaggatcgcgacgcagccagcgccagagcttggcccaagatgcacactgtgaacggatatgtcaataggtcacttcctggcttgattgggtgtcatcggaaaagtgtctactggcacgtgatcggaatggggacaacaccagaggtccactccatatttctcgaaggccataccttccttgttcgaaaccacagacaggcatccttggagatctctcccattacctttctcactgcccaaacgctccttatggacttgggtcagttccttctcttctgccatatcagctcacaccagcatgatggtatggaagcttatgtgaaagtcgacagttgtcctgaggagccacagttgcgcatgaagaataatgaagaagccgaggattacgacgacgatctcaccgattctgagatggacgtggtgaggtttgatgacgacaactctccctccttcattcaaatccggagcgtggcgaagaaacaccccaagacttgggtccactatatagcggcggaagaggaggattgggattacgctcctcttgtattggcaccagatgaccgctcatacaaaagccagtacctcaacaacggaccgcagagaattggccggaagtataagaaagtgcgatttatggcctatacagacgaaacctttaagacaagggaggccatccagcatgagagtgggattttgggacctcttctttacggcgaagttggtgataccctcctcatcatcttcaagaatcaagcttctcgcccctataacatttacccacacgggatcactgacgttaggcctttgtatagcagaagacttcccaaaggcgtgaagcatctcaaagacttccccattttgccaggcgagatctttaagtacaaatggaccgtcacagtggaagatggaccgactaaatcagaccctcgatgccttacgcggtactattcctccttcgtgaatatggagagagatttggcaagcggactcataggaccactcctcatctgttacaaggaatctgtagaccagaggggtaaccagattatgagtgataaacgcaatgtgatcctttttagcgtcttcgacgagaaccggtcctggtacttgaccgagaatatacaaaggttccttcccaaccccgcaggcgttcagttggaagaccctgagtttcaggccagcaatattatgcactcaatcaacggctatgtgtttgatagtctccagctttctgtttgcctccatgaagtagcctattggtacatcttgtcaattggtgctcaaacagacttcctctccgtcttcttctccggctacacctttaagcacaagatggtgtatgaggacactctcacactctttccattttctggagaaaccgtgttcatgagcatggagaatccaggcctttggatcttgggttgccacaacagtgattttcgcaatcggggaatgactgctctcctcaaagtcagcagctgtgataagaacacaggcgactattacgaagattcttacgaggacataagtgccaagttgttgtccaagaataacgccattgagcccagatcattctcccagaatcctcccgtgcttaaaaggcatcagcgcgaaatcaccagaactactcttcagtctgatcaagaggagattgactatgacgacaccataagcgtggaaatgaagaaggaggatttcgatatctatgacgaagatgagaaccagtctccgcggagctttcagaagaagacgcgacactacttcattgcagcagtcgaaaggctttgggactacggtatgtcatcatcccctcatgtgttgcgcaatagagctcagagtggaagtgttccacagttcaagaaagtcgtctttcaagagtttacagatggcagcttcacacagcctctctatcggggcgagcttaacgaacatttgggactccttggtccctatatccgagccgaagtggaggacaacattatggttacctttaggaatcaagcctctcgcccctacagcttctactcctccctcatcagttatgaggaggatcagagacaaggcgctgaaccacggaagaactttgtgaaaccgaatgagacgaagacctacttctggaaagtacagcaccacatggcccccacaaaagacgaattcgattgcaaagcatgggcgtatttttcagacgttgacttggagaaagatgtacattcaggacttattggtcctttgttggtgtgtcacactaacactctcaatccagcccatggcaggcaggtgacagtccaggaattcgctcttttctttaccatctttgatgagaccaagtcctggtacttcacggaaaacatggagcgcaattgcagagccccctgtaacatacagatggaggaccctacctttaaggaaaattatcggttccacgcaatcaacggatacattatggatacactccctggccttgtgatggctcaggaccaacgaatcaggtggtacctcctcagcatgggttctaatgagaacatacactccattcacttttcaggacatgtgttcactgtccggaagaaagaagagtataagatggccctctacaatttgtatccaggcgtgtttgagaccgttgaaatgcttccctctaaagctggcatctggagagtagagtgcttgatcggagaacatcttcacgcaggtatgagcaccttgttcctcgtgtacagcaacaaatgtcagaccccacttggcatggccagtggacacattcgcgactttcagatcacagcatctggccagtatggacaatgggccccaaagttggctcgcctccattactccggtagcataaatgcgtggtccactaaagaacctttcagctggattaaggtcgatcttcttgcccccatgatcatccacggcattaagacacagggagcgaggcagaaattctcctccctctacatctcacagttcattattatgtatagtttggacggcaagaagtggcaaacttatagaggtaacagtactggaacactcatggtgttcttcggcaacgttgatagctctggcatcaaacacaacatctttaatcctcccataatagctcggtacatcagattgcatccgacccactacagcattaggagtacactccgaatggagcttatgggttgcgacttgaattcctgttcaatgccactcggaatggagtctaaagccatctctgatgcacagataaccgccagtagctactttacgaacatgtttgctacgtggtcaccctctaaggcaaggcttcatttgcaaggccggtctaatgcctggagacctcaggtgaacaacccgaaagaatggctccaggtggactttcagaagaccatgaaagtaacaggtgtcactactcagggagttaagtccttggataccagcatgtatgtgaaggagttccttatttcctcatcacaagatggccaccagtggaccctcttctttcagaatggtaaggtcaaagtgtttcagggcaatcaagacagcttcacacccgtggtgaacagtcttgatcctccactcttgacacgataccttcgaatccatccacagtcttgggttcaccagattgcattgcgcatggaagtacttggatgcgaggctcaggacctctac

SEQ ID NO: 420 - protein, 1457 aa, synthetic construct
  REGION 1..1457: note = Variant of human B-domain deleted Factor VIII
MQIELSTCFFLCLLRFCFSATRRYYLGAVELSWDYMQSDLGELPVDARFPPRVPKSFPFNTSVVYKKTLFVEFTDHLFNIAKPRPPWMGLLGPTIQAEVYDTVVITLKNMASHPVSLHAVGVSYWKASEGAEYDDQTSQREKEDDKVFPGGSHTYVWQVLKENGPMASDPLCLTYSYLSHVDLVKDLNSGLIGALLVCREGSLAKEKTQTLHKFILLFAVFDEGKSWHSETKNSLMQDRDAASARAWPKMHTVNGYVNRSLPGLIGCHRKSVYWHVIGMGTTPEVHSIFLEGHTFLVRNHRQASLEISPITFLTAQTLLMDLGQFLLFCHISSHQHDGMEAYVKVDSCPEEPQLRMKNNEEAEDYDDDLTDSEMDVVRFDDDNSPSFIQIRSVAKKHPKTWVHYIAAEEEDWDYAPLVLAPDDRSYKSQYLNNGPQRIGRKYKKVRFMAYTDETFKTREAIQHESGILGPLLYGEVGDTLLIIFKNQASRPYNIYPHGITDVRPLYSRRLPKGVKHLKDFPILPGEIFKYKWTVTVEDGPTKSDPRCLTRYYSSFVNMERDLASGLIGPLLICYKESVDQRGNQIMSDKRNVILFSVFDENRSWYLTENIQRFLPNPAGVQLEDPEFQASNIMHSINGYVFDSLQLSVCLHEVAYWYILSIGAQTDFLSVFFSGYTFKHKMVYEDTLTLFPFSGETVFMSMENPGLWILGCHNSDFRNRGMTALLKVSSCDKNTGDYYEDSYEDISAKLLSKNNAIEPRSFSQNPPVLKRHQREITRTTLQSDQEEIDYDDTISVEMKKEDFDIYDEDENQSPRSFQKKTRHYFIAAVERLWDYGMSSSPHVLRNRAQSGSVPQFKKVVFQEFTDGSFTQPLYRGELNEHLGLLGPYIRAEVEDNIMVTFRNQASRPYSFYSSLISYEEDQRQGAEPRKNFVKPNETKTYFWKVQHHMAPTKDEFDCKAWAYFSDVDLEKDVHSGLIGPLLVCHTNTLNPAHGRQVTVQEFALFFTIFDETKSWYFTENMERNCRAPCNIQMEDPTFKENYRFHAINGYIMDTLPGLVMAQDQRIRWYLLSMGSNENIHSIHFSGHVFTVRKKEEYKMALYNLYPGVFETVEMLPSKAGIWRVECLIGEHLHAGMSTLFLVYSNKCQTPLGMASGHIRDFQITASGQYGQWAPKLARLHYSGSINAWSTKEPFSWIKVDLLAPMIIHGIKTQGARQKFSSLYISQFIIMYSLDGKKWQTYRGNSTGTLMVFFGNVDSSGIKHNIFNPPIIARYIRLHPTHYSIRSTLRMELMGCDLNSCSMPLGMESKAISDAQITASSYFTNMFATWSPSKARLHLQGRSNAWRPQVNNPKEWLQVDFQKTMKVTGVTTQGVKSLDTSMYVKEFLISSSQDGHQWTLFFQNGKVKVFQGNQDSFTPVVNSLDPPLLTRYLRIHPQSWVHQIALRMEVLGCEAQDLY

SEQ ID NO: 421 - DNA, 4371 bp, synthetic construct
  misc_feature 1..4371: note = Variant of human B-domain deleted Factor VIII
  source 1..4371: mol_type = other DNA
atgcagattgaactgtctacctgcttcttcctctgtttgctgaggttctgctttagcgccactagacggtactaccttggcgctgtggagctgtcctgggactatatgcagagtgatttgggagagcttcccgtcgacgcacgatttcctcctcgcgttccaaagtcatttcccttcaacacaagcgtggtgtacaagaagacgctcttcgtcgaattcaccgatcacctgttcaatatcgccaaacccagaccaccatggatgggtcttttggggcctaccatacaagcggaggtgtatgacacagttgttatcactctcaagaacatggcttctcatccggtaagtcttcacgcagtgggcgtgtcctactggaaagcttcagaaggagccgagtatgatgatcagacatcccagagggagaaagaagacgacaaggtatttccaggtgggtctcatacctatgtgtggcaagtgctcaaagagaatggccctatggcaagcgatccgctctgtttgacttacagctacctttcacacgttgacctcgtcaaggacctcaactccgggttgattggagccttgttggtatgcagggaaggatctcttgccaaagagaagacacagaccctccacaagtttatccttctctttgctgtgttcgatgagggcaaaagttggcatagcgaaacgaagaattccctcatgcaggatcgcgacgcagccagcgccagagcttggcccaagatgcacactgtgaacggatatgtcaataggtcacttcctggcttgattgggtgtcatcggaaaagtgtctactggcacgtgatcggaatggggacaacaccagaggtccactccatatttctcgaaggccataccttccttgttcgaaaccacagacaggcatccttggagatctctcccattacctttctcactgcccaaacgctccttatggacttgggtcagttccttctcttctgccatatcagctcacaccagcatgatggtatggaagcttatgtgaaagtcgacagttgtcctgaggagccacagttgcgcatgaagaataatgaagaagccgaggattacgacgacgatctcaccgattctgagatggacgtggtgaggtttgatgacgacaactctccctccttcattcaaatccggagcgtggcgaagaaacaccccaagacttgggtccactatatagcggcggaagaggaggattgggattacgctcctcttgtattggcaccagatgaccgctcatacaaaagccagtacctcaacaacggaccgcagagaattggccggaagtataagaaagtgcgatttatggcctatacagacgaaacctttaagacaagggaggccatccagcatgagagtgggattttgggacctcttctttacggcgaagttggtgataccctcctcatcatcttcaagaatcaagcttctcgcccctataacatttacccacacgggatcactgacgttaggcctttgtatagcagaagacttcccaaaggcgtgaagcatctcaaagacttccccattttgccaggcgagatctttaagtacaaatggaccgtcacagtggaagatggaccgactaaatcagaccctcgatgccttacgcggtactattcctccttcgtgaatatggagagagatttggcaagcggactcataggaccactcctcatctgttacaaggaatctgtagaccagaggggtaaccagattatgagtgataaacgcaatgtgatcctttttagcgtcttcgacgagaaccggtcctggtacttgaccgagaatatacaaaggttccttcccaaccccgcaggcgttcagttggaagaccctgagtttcaggccagcaatattatgcactcaatcaacggctatgtgtttgatagtctccagctttctgtttgcctccatgaagtagcctattggtacatcttgtcaattggtgctcaaacagacttcctctccgtcttcttctccggctacacctttaagcacaagatggtgtatgaggacactctcacactctttccattttctggagaaaccgtgttcatgagcatggagaatccaggcctttggatcttgggttgccacaacagtgattttcgcaatcggggaatgactgctctcctcaaagtcagcagctgtgataagaacacaggcgactattacgaagattcttacgaggacataagtgcctacttgttgtccaagaataaccttattgagcccagatcattctcccagaatcctcccgtgcttaaaaggcatcagcgcgaaatcaccagaactactcttcagtctgatcaagaggagattgactatgacgacaccataagcgtggaaatgaagaaggaggatttcgatatctatgacgaagatgagaaccagtctccgcggagctttcagaagaagacgcgacactacttcattgcagcagtcgaaaggctttgggactacggtatgtcatcatcccctcatgtgttgcgcaatagagctcagagtggaagtgttccacagttcaagaaagtcgtctttcaagagtttacagatggcagcttcacacagcctctctatcggggcgagcttaacgaacatttgggactccttggtccctatatccgagccgaagtggaggacaacattatggttacctttaggaatcaagcctctcgcccctacagcttctactcctccctcatcagttatgaggaggatcagagacaaggcgctgaaccacggaagaactttgtgaaaccgaatgagacgaagacctacttctggaaagtacagcaccacatggcccccacaaaagacgaattcgattgcaaagcatgggcgtatttttcagacgttgacttggagaaagatgtacattcaggacttattggtcctttgttggtgtgtcacactaacactctcaatccagcccatggcaggcaggtgacagtccaggaattcgctcttttctttaccatctttgatgagaccaagtcctggtacttcacggaaaacatggagcgcaattgcagagccccctgtaacatacagatggaggaccctacctttaaggaaaattatcggttccacgcaatcaacggatacattatggatacactccctggccttgtgatggctcaggaccaacgaatcaggtggtacctcctcagcatgggttctaatgagaacatacactccattcacttttcaggacatgtgttcactgtccggaagaaagaagagtataagatggccctctacaatttgtatccaggcgtgtttgagaccgttgaaatgcttccctctaaagctggcatctggagagtagagtgcttgatcggagaacatcttcacgcaggtatgagcaccttgttcctcgtgtacagcaacaaatgtcagaccccacttggcatggccagtggacacattcgcgactttcagatcacagcatctggccagtatggacaatgggccccaaagttggctcgcctccattactccggtagcataaatgcgtggtccactaaagaacctttcagctggattaaggtcgatcttcttgcccccatgatcatccacggcattaagacacagggagcgaggcagaaattctcctccctctacatctcacagttcattattatgtatagtttggacggcaagaagtggcaaacttatagaggtaacagtactggaacactcatggtgttcttcggcaacgttgatagctctggcatcaaacacaacatctttaatcctcccataatagctcggtacatcagattgcatccgacccactacagcattaggagtacactccgaatggagcttatgggttgcgacttgaattcctgttcaatgccactcggaatggagtctaaagccatctctgatgcacagataaccgccagtagctactttacgaacatgtttgctacgtggtcaccctctaaggcaaggcttcatttgcaaggccggtctaatgcctggagacctcaggtgaacaacccgaaagaatggctccaggtggactttcagaagaccatgaaagtaacaggtgtcactactcagggagttaagtccttggataccagcatgtatgtgaaggagttccttatttcctcatcacaagatggccaccagtggaccctcttctttcagaatggtaaggtcaaagtgtttcagggcaatcaagacagcttcacacccgtggtgaacagtcttgatcctccactcttgacacgataccttcgaatccatccacagtcttgggttcaccagattgcattgcgcatggaagtacttggatgcgaggctcaggacctctac

SEQ ID NO: 422 - protein, 1457 aa, synthetic construct
  REGION 1..1457: note = Variant of human B-domain deleted Factor VIII
MQIELSTCFFLCLLRFCFSATRRYYLGAVELSWDYMQSDLGELPVDARFPPRVPKSFPFNTSVVYKKTLFVEFTDHLFNIAKPRPPWMGLLGPTIQAEVYDTVVITLKNMASHPVSLHAVGVSYWKASEGAEYDDQTSQREKEDDKVFPGGSHTYVWQVLKENGPMASDPLCLTYSYLSHVDLVKDLNSGLIGALLVCREGSLAKEKTQTLHKFILLFAVFDEGKSWHSETKNSLMQDRDAASARAWPKMHTVNGYVNRSLPGLIGCHRKSVYWHVIGMGTTPEVHSIFLEGHTFLVRNHRQASLEISPITFLTAQTLLMDLGQFLLFCHISSHQHDGMEAYVKVDSCPEEPQLRMKNNEEAEDYDDDLTDSEMDVVRFDDDNSPSFIQIRSVAKKHPKTWVHYIAAEEEDWDYAPLVLAPDDRSYKSQYLNNGPQRIGRKYKKVRFMAYTDETFKTREAIQHESGILGPLLYGEVGDTLLIIFKNQASRPYNIYPHGITDVRPLYSRRLPKGVKHLKDFPILPGEIFKYKWTVTVEDGPTKSDPRCLTRYYSSFVNMERDLASGLIGPLLICYKESVDQRGNQIMSDKRNVILFSVFDENRSWYLTENIQRFLPNPAGVQLEDPEFQASNIMHSINGYVFDSLQLSVCLHEVAYWYILSIGAQTDFLSVFFSGYTFKHKMVYEDTLTLFPFSGETVFMSMENPGLWILGCHNSDFRNRGMTALLKVSSCDKNTGDYYEDSYEDISAYLLSKNNLIEPRSFSQNPPVLKRHQREITRTTLQSDQEEIDYDDTISVEMKKEDFDIYDEDENQSPRSFQKKTRHYFIAAVERLWDYGMSSSPHVLRNRAQSGSVPQFKKVVFQEFTDGSFTQPLYRGELNEHLGLLGPYIRAEVEDNIMVTFRNQASRPYSFYSSLISYEEDQRQGAEPRKNFVKPNETKTYFWKVQHHMAPTKDEFDCKAWAYFSDVDLEKDVHSGLIGPLLVCHTNTLNPAHGRQVTVQEFALFFTIFDETKSWYFTENMERNCRAPCNIQMEDPTFKENYRFHAINGYIMDTLPGLVMAQDQRIRWYLLSMGSNENIHSIHFSGHVFTVRKKEEYKMALYNLYPGVFETVEMLPSKAGIWRVECLIGEHLHAGMSTLFLVYSNKCQTPLGMASGHIRDFQITASGQYGQWAPKLARLHYSGSINAWSTKEPFSWIKVDLLAPMIIHGIKTQGARQKFSSLYISQFIIMYSLDGKKWQTYRGNSTGTLMVFFGNVDSSGIKHNIFNPPIIARYIRLHPTHYSIRSTLRMELMGCDLNSCSMPLGMESKAISDAQITASSYFTNMFATWSPSKARLHLQGRSNAWRPQVNNPKEWLQVDFQKTMKVTGVTTQGVKSLDTSMYVKEFLISSSQDGHQWTLFFQNGKVKVFQGNQDSFTPVVNSLDPPLLTRYLRIHPQSWVHQIALRMEVLGCEAQDLY

SEQ ID NO: 423 - DNA, 4371 bp, synthetic construct
  misc_feature 1..4371: note = Variant of human B-domain deleted Factor VIII
  source 1..4371: mol_type = other DNA
atgcagattgaactgtctacctgcttcttcctctgtttgctgaggttctgctttagcgccactagacggtactaccttggcgctgtggagctgtcctgggactatatgcagagtgatttgggagagcttcccgtcgacgcacgatttcctcctcgcgttccaaagtcatttcccttcaacacaagcgtggtgtacaagaagacgctcttcgtcgaattcaccgatcacctgttcaatatcgccaaacccagaccaccatggatgggtcttttggggcctaccatacaagcggaggtgtatgacacagttgttatcactctcaagaacatggcttctcatccggtaagtcttcacgcagtgggcgtgtcctactggaaagcttcagaaggagccgagtatgatgatcagacatcccagagggagaaagaagacgacaaggtatttccaggtgggtctcatacctatgtgtggcaagtgctcaaagagaatggccctatggcaagcgatccgctctgtttgacttacagctacctttcacacgttgacctcgtcaaggacctcaactccgggttgattggagccttgttggtatgcagggaaggatctcttgccaaagagaagacacagaccctccacaagtttatccttctctttgctgtgttcgatgagggcaaaagttggcatagcgaaacgaagaattccctcatgcaggatcgcgacgcagccagcgccagagcttggcccaagatgcacactgtgaacggatatgtcaataggtcacttcctggcttgattgggtgtcatcggaaaagtgtctactggcacgtgatcggaatggggacaacaccagaggtccactccatatttctcgaaggccataccttccttgttcgaaaccacagacaggcatccttggagatctctcccattacctttctcactgcccaaacgctccttatggacttgggtcagttccttctcttctgccatatcagctcacaccagcatgatggtatggaagcttatgtgaaagtcgacagttgtcctgaggagccacagttgcgcatgaagaataatgaagaagccgaggattacgacgacgatctcaccgattctgagatggacgtggtgaggtttgatgacgacaactctccctccttcattcaaatccggagcgtggcgaagaaacaccccaagacttgggtccactatatagcggcggaagaggaggattgggattacgctcctcttgtattggcaccagatgaccgctcatacaaaagccagtacctcaacaacggaccgcagagaattggccggaagtataagaaagtgcgatttatggcctatacagacgaaacctttaagacaagggaggccatccagcatgagagtgggattttgggacctcttctttacggcgaagttggtgataccctcctcatcatcttcaagaatcaagcttctcgcccctataacatttacccacacgggatcactgacgttaggcctttgtatagcagaagacttcccaaaggcgtgaagcatctcaaagacttccccattttgccaggcgagatctttaagtacaaatggaccgtcacagtggaagatggaccgactaaatcagaccctcgatgccttacgcggtactattcctccttcgtgaatatggagagagatttggcaagcggactcataggaccactcctcatctgttacaaggaatctgtagaccagaggggtaaccagattatgagtgataaacgcaatgtgatcctttttagcgtcttcgacgagaaccggtcctggtacttgaccgagaatatacaaaggttccttcccaaccccgcaggcgttcagttggaagaccctgagtttcaggccagcaatattatgcactcaatcaacggctatgtgtttgatagtctccagctttctgtttgcctccatgaagtagcctattggtacatcttgtcaattggtgctcaaacagacttcctctccgtcttcttctccggctacacctttaagcacaagatggtgtatgaggacactctcacactctttccattttctggagaaaccgtgttcatgagcatggagaatccaggcctttggatcttgggttgccacaacagtgattttcgcaatcggggaatgactgctctcctcaaagtcagcagctgtgataagaacacaggcgactattacgaagattcttacgaggacataagtgcctacttgttgtccaagaataacgccattgagcccagatcattctcccagaatcctcccgtgcttaaaaggcatcagcgcgaaatcaccagaactactcttcagtctgatcaagaggagattgactatgacgacaccataagcgtggaaatgaagaaggaggatttcgatatctatgacgaagatgagaaccagtctccgcggagctttcagaagaagacgcgacactacttcattgcagcagtcgaaaggctttgggactacggtatgtcatcatcccctcatgtgttgcgcaatagagctcagagtggaagtgttccacagttcaagaaagtcgtctttcaagagtttacagatggcagcttcacacagcctctctatcggggcgagcttaacgaacatttgggactccttggtccctatatccgagccgaagtggaggacaacattatggttacctttaggaatcaagcctctcgcccctacagcttctactcctccctcatcagttatgaggaggatcagagacaaggcgctgaaccacggaagaactttgtgaaaccgaatgagacgaagacctacttctggaaagtacagcaccacatggcccccacaaaagacgaattcgattgcaaagcatgggcgtatttttcagacgttgacttggagaaagatgtacattcaggacttattggtcctttgttggtgtgtcacactaacactctcaatccagcccatggcaggcaggtgacagtccaggaattcgctcttttctttaccatctttgatgagaccaagtcctggtacttcacggaaaacatggagcgcaattgcagagccccctgtaacatacagatggaggaccctacctttaaggaaaattatcggttccacgcaatcaacggatacattatggatacactccctggccttgtgatggctcaggaccaacgaatcaggtggtacctcctcagcatgggttctaatgagaacatacactccattcacttttcaggacatgtgttcactgtccggaagaaagaagagtataagatggccctctacaatttgtatccaggcgtgtttgagaccgttgaaatgcttccctctaaagctggcatctggagagtagagtgcttgatcggagaacatcttcacgcaggtatgagcaccttgttcctcgtgtacagcaacaaatgtcagaccccacttggcatggccagtggacacattcgcgactttcagatcacagcatctggccagtatggacaatgggccccaaagttggctcgcctccattactccggtagcataaatgcgtggtccactaaagaacctttcagctggattaaggtcgatcttcttgcccccatgatcatccacggcattaagacacagggagcgaggcagaaagcgtcctccctctacatctcacagttcattattatgtatagtttggacggcaagaagtggcaaacttatagaggtaacagtactggaacactcatggtgttcttcggcaacgttgatagctctggcatcaaacacaacatctttaatcctcccataatagctcggtacatcagattgcatccgacccactacagcattaggagtacactccgaatggagcttatgggttgcgacttgaattcctgttcaatgccactcggaatggagtctaaagccatctctgatgcacagataaccgccagtagctactttacgaacatgtttgctacgtggtcaccctctaaggcaaggcttcatttgcaaggccggtctaatgcctggagacctcaggtgaacaacccgaaagaatggctccaggtggactttcagaagaccatgaaagtaacaggtgtcactactcagggagttaagtccttggataccagcatgtatgtgaaggagttccttatttcctcatcacaagatggccaccagtggaccctcttctttcagaatggtaaggtcaaagtgtttcagggcaatcaagacagcttcacacccgtggtgaacagtcttgatcctccactcttgacacgataccttcgaatccatccacagtcttgggttcaccagattgcattgcgcatggaagtacttggatgcgaggctcaggacctctac

SEQ ID NO: 424 - protein, 1457 aa, synthetic construct
  REGION 1..1457: note = Variant of human B-domain deleted Factor VIII
MQIELSTCFFLCLLRFCFSATRRYYLGAVELSWDYMQSDLGELPVDARFPPRVPKSFPFNTSVVYKKTLFVEFTDHLFNIAKPRPPWMGLLGPTIQAEVYDTVVITLKNMASHPVSLHAVGVSYWKASEGAEYDDQTSQREKEDDKVFPGGSHTYVWQVLKENGPMASDPLCLTYSYLSHVDLVKDLNSGLIGALLVCREGSLAKEKTQTLHKFILLFAVFDEGKSWHSETKNSLMQDRDAASARAWPKMHTVNGYVNRSLPGLIGCHRKSVYWHVIGMGTTPEVHSIFLEGHTFLVRNHRQASLEISPITFLTAQTLLMDLGQFLLFCHISSHQHDGMEAYVKVDSCPEEPQLRMKNNEEAEDYDDDLTDSEMDVVRFDDDNSPSFIQIRSVAKKHPKTWVHYIAAEEEDWDYAPLVLAPDDRSYKSQYLNNGPQRIGRKYKKVRFMAYTDETFKTREAIQHESGILGPLLYGEVGDTLLIIFKNQASRPYNIYPHGITDVRPLYSRRLPKGVKHLKDFPILPGEIFKYKWTVTVEDGPTKSDPRCLTRYYSSFVNMERDLASGLIGPLLICYKESVDQRGNQIMSDKRNVILFSVFDENRSWYLTENIQRFLPNPAGVQLEDPEFQASNIMHSINGYVFDSLQLSVCLHEVAYWYILSIGAQTDFLSVFFSGYTFKHKMVYEDTLTLFPFSGETVFMSMENPGLWILGCHNSDFRNRGMTALLKVSSCDKNTGDYYEDSYEDISAYLLSKNNAIEPRSFSQNPPVLKRHQREITRTTLQSDQEEIDYDDTISVEMKKEDFDIYDEDENQSPRSFQKKTRHYFIAAVERLWDYGMSSSPHVLRNRAQSGSVPQFKKVVFQEFTDGSFTQPLYRGELNEHLGLLGPYIRAEVEDNIMVTFRNQASRPYSFYSSLISYEEDQRQGAEPRKNFVKPNETKTYFWKVQHHMAPTKDEFDCKAWAYFSDVDLEKDVHSGLIGPLLVCHTNTLNPAHGRQVTVQEFALFFTIFDETKSWYFTENMERNCRAPCNIQMEDPTFKENYRFHAINGYIMDTLPGLVMAQDQRIRWYLLSMGSNENIHSIHFSGHVFTVRKKEEYKMALYNLYPGVFETVEMLPSKAGIWRVECLIGEHLHAGMSTLFLVYSNKCQTPLGMASGHIRDFQITASGQYGQWAPKLARLHYSGSINAWSTKEPFSWIKVDLLAPMIIHGIKTQGARQKASSLYISQFIIMYSLDGKKWQTYRGNSTGTLMVFFGNVDSSGIKHNIFNPPIIARYIRLHPTHYSIRSTLRMELMGCDLNSCSMPLGMESKAISDAQITASSYFTNMFATWSPSKARLHLQGRSNAWRPQVNNPKEWLQVDFQKTMKVTGVTTQGVKSLDTSMYVKEFLISSSQDGHQWTLFFQNGKVKVFQGNQDSFTPVVNSLDPPLLTRYLRIHPQSWVHQIALRMEVLGCEAQDLY

SEQ ID NO: 425 - DNA, 4371 bp, synthetic construct
  misc_feature 1..4371: note = Variant of human B-domain deleted Factor VIII
  source 1..4371: mol_type = other DNA
atgcagattgaactgtctacctgcttcttcctctgtttgctgaggttctgctttagcgccactagacggtactaccttggcgctgtggagctgtcctgggactatatgcagagtgatttgggagagcttcccgtcgacgcacgatttcctcctcgcgttccaaagtcatttcccttcaacacaagcgtggtgtacaagaagacgctcttcgtcgaattcaccgatcacctgttcaatatcgccaaacccagaccaccatggatgggtcttttggggcctaccatacaagcggaggtgtatgacacagttgttatcactctcaagaacatggcttctcatccggtaagtcttcacgcagtgggcgtgtcctactggaaagcttcagaaggagccgagtatgatgatcagacatcccagagggagaaagaagacgacaaggtatttccaggtgggtctcatacctatgtgtggcaagtgctcaaagagaatggccctatggcaagcgatccgctctgtttgacttacagctacctttcacacgttgacctcgtcaaggacctcaactccgggttgattggagccttgttggtatgcagggaaggatctcttgccaaagagaagacacagaccctccacaagtttatccttctctttgctgtgttcgatgagggcaaaagttggcatagcgaaacgaagaattccctcatgcaggatcgcgacgcagccagcgccagagcttggcccaagatgcacactgtgaacggatatgtcaataggtcacttcctggcttgattgggtgtcatcggaaaagtgtctactggcacgtgatcggaatggggacaacaccagaggtccactccatatttctcgaaggccataccttccttgttcgaaaccacagacaggcatccttggagatctctcccattacctttctcactgcccaaacgctccttatggacttgggtcagttccttctcttctgccatatcagctcacaccagcatgatggtatggaagcttatgtgaaagtcgacagttgtcctgaggagccacagttgcgcatgaagaataatgaagaagccgaggattacgacgacgatctcaccgattctgagatggacgtggtgaggtttgatgacgacaactctccctccttcattcaaatccggagcgtggcgaagaaacaccccaagacttgggtccactatatagcggcggaagaggaggattgggattacgctcctcttgtattggcaccagatgaccgctcatacaaaagccagtacctcaacaacggaccgcagagaattggccggaagtataagaaagtgcgatttatggcctatacagacgaaacctttaagacaagggaggccatccagcatgagagtgggattttgggacctcttctttacggcgaagttggtgataccctcctcatcatcttcaagaatcaagcttctcgcccctataacatttacccacacgggatcactgacgttaggcctttgtatagcagaagacttcccaaaggcgtgaagcatctcaaagacttccccattttgccaggcgagatctttaagtacaaatggaccgtcacagtggaagatggaccgactaaatcagaccctcgatgccttacgcggtactattcctccttcgtgaatatggagagagatttggcaagcggactcataggaccactcctcatctgttacaaggaatctgtagaccagaggggtaaccagattatgagtgataaacgcaatgtgatcctttttagcgtcttcgacgagaaccggtcctggtacttgaccgagaatatacaaaggttccttcccaaccccgcaggcgttcagttggaagaccctgagtttcaggccagcaatattatgcactcaatcaacggctatgtgtttgatagtctccagctttctgtttgcctccatgaagtagcctattggtacatcttgtcaattggtgctcaaacagacttcctctccgtcttcttctccggctacacctttaagcacaagatggtgtatgaggacactctcacactctttccattttctggagaaaccgtgttcatgagcatggagaatccaggcctttggatcttgggttgccacaacagtgattttcgcaatcggggaatgactgctctcctcaaagtcagcagctgtgataagaacacaggcgactattacgaagattcttacgaggacataagtgccaatttgttgtccaagaataacgccattgagcccagatcattctcccagaatcctcccgtgcttaaaaggcatcagcgcgaaatcaccagaactactcttcagtctgatcaagaggagattgactatgacgacaccataagcgtggaaatgaagaaggaggatttcgatatctatgacgaagatgagaaccagtctccgcggagctttcagaagaagacgcgacactacttcattgcagcagtcgaaaggctttgggactacggtatgtcatcatcccctcatgtgttgcgcaatagagctcagagtggaagtgttccacagttcaagaaagtcgtctttcaagagtttacagatggcagcttcacacagcctctctatcggggcgagcttaacgaacatttgggactccttggtccctatatccgagccgaagtggaggacaacattatggttacctttaggaatcaagcctctcgcccctacagcttctactcctccctcatcagttatgaggaggatcagagacaaggcgctgaaccacggaagaactttgtgaaaccgaatgagacgaagacctacttctggaaagtacagcaccacatggcccccacaaaagacgaattcgattgcaaagcatgggcgtatttttcagacgttgacttggagaaagatgtacattcaggacttattggtcctttgttggtgtgtcacactaacactctcaatccagcccatggcaggcaggtgacagtccaggaattcgctcttttctttaccatctttgatgagaccaagtcctggtacttcacggaaaacatggagcgcaattgcagagccccctgtaacatacagatggaggaccctacctttaaggaaaattatcggttccacgcaatcaacggatacattatggatacactccctggccttgtgatggctcaggaccaacgaatcaggtggtacctcctcagcatgggttctaatgagaacatacactccattcacttttcaggacatgtgttcactgtccggaagaaagaagagtataagatggccctctacaatttgtatccaggcgtgtttgagaccgttgaaatgcttccctctaaagctggcatctggagagtagagtgcttgatcggagaacatcttcacgcaggtatgagcaccttgttcctcgtgtacagcaacaaatgtcagaccccacttggcatggccagtggacacattcgcgactttcagatcacagcatctggccagtatggacaatgggccccaaagttggctcgcctccattactccggtagcataaatgcgtggtccactaaagaacctttcagctggattaaggtcgatcttcttgcccccatgatcatccacggcattaagacacagggagcgaggcagaaattctcctccctctacatctcacagttcattattatgtatagtttggacggcaagaagtggcaaacttatagaggtaacagtactggaacactcatggtgttcttcggcaacgttgatagctctggcatcaaacacaacatctttaatcctcccataatagctcggtacatcagattgcatccgacccactacagcattaggagtacactccgaatggagcttatgggttgcgacttgaattcctgttcaatgccactcggaatggagtctaaagccatctctgatgcacagataaccgccagtagctactttacgaacatgtttgctacgtggtcaccctctaaggcaaggcttcatttgcaaggccggtctaatgcctggagacctcaggtgaacaacccgaaagaatggctccaggtggactttcagaagaccatgaaagtaacaggtgtcactactcagggagttaagtccttggataccagcatgtatgtgaaggagttccttatttcctcatcacaagatggccaccagtggaccctcttctttcagaatggtaaggtcaaagtgtttcagggcaatcaagacagcttcacacccgtggtgaacagtcttgatcctccactcttgacacgataccttcgaatccatccacagtcttgggttcaccagattgcattgcgcatggaagtacttggatgcgaggctcaggacctctac

SEQ ID NO: 426 - protein, 1457 aa, synthetic construct
  REGION 1..1457: note = Variant of human B-domain deleted Factor VIII
MQIELSTCFFLCLLRFCFSATRRYYLGAVELSWDYMQSDLGELPVDARFPPRVPKSFPFNTSVVYKKTLFVEFTDHLFNIAKPRPPWMGLLGPTIQAEVYDTVVITLKNMASHPVSLHAVGVSYWKASEGAEYDDQTSQREKEDDKVFPGGSHTYVWQVLKENGPMASDPLCLTYSYLSHVDLVKDLNSGLIGALLVCREGSLAKEKTQTLHKFILLFAVFDEGKSWHSETKNSLMQDRDAASARAWPKMHTVNGYVNRSLPGLIGCHRKSVYWHVIGMGTTPEVHSIFLEGHTFLVRNHRQASLEISPITFLTAQTLLMDLGQFLLFCHISSHQHDGMEAYVKVDSCPEEPQLRMKNNEEAEDYDDDLTDSEMDVVRFDDDNSPSFIQIRSVAKKHPKTWVHYIAAEEEDWDYAPLVLAPDDRSYKSQYLNNGPQRIGRKYKKVRFMAYTDETFKTREAIQHESGILGPLLYGEVGDTLLIIFKNQASRPYNIYPHGITDVRPLYSRRLPKGVKHLKDFPILPGEIFKYKWTVTVEDGPTKSDPRCLTRYYSSFVNMERDLASGLIGPLLICYKESVDQRGNQIMSDKRNVILFSVFDENRSWYLTENIQRFLPNPAGVQLEDPEFQASNIMHSINGYVFDSLQLSVCLHEVAYWYILSIGAQTDFLSVFFSGYTFKHKMVYEDTLTLFPFSGETVFMSMENPGLWILGCHNSDFRNRGMTALLKVSSCDKNTGDYYEDSYEDISANLLSKNNAIEPRSFSQNPPVLKRHQREITRTTLQSDQEEIDYDDTISVEMKKEDFDIYDEDENQSPRSFQKKTRHYFIAAVERLWDYGMSSSPHVLRNRAQSGSVPQFKKVVFQEFTDGSFTQPLYRGELNEHLGLLGPYIRAEVEDNIMVTFRNQASRPYSFYSSLISYEEDQRQGAEPRKNFVKPNETKTYFWKVQHHMAPTKDEFDCKAWAYFSDVDLEKDVHSGLIGPLLVCHTNTLNPAHGRQVTVQEFALFFTIFDETKSWYFTENMERNCRAPCNIQMEDPTFKENYRFHAINGYIMDTLPGLVMAQDQRIRWYLLSMGSNENIHSIHFSGHVFTVRKKEEYKMALYNLYPGVFETVEMLPSKAGIWRVECLIGEHLHAGMSTLFLVYSNKCQTPLGMASGHIRDFQITASGQYGQWAPKLARLHYSGSINAWSTKEPFSWIKVDLLAPMIIHGIKTQGARQKFSSLYISQFIIMYSLDGKKWQTYRGNSTGTLMVFFGNVDSSGIKHNIFNPPIIARYIRLHPTHYSIRSTLRMELMGCDLNSCSMPLGMESKAISDAQITASSYFTNMFATWSPSKARLHLQGRSNAWRPQVNNPKEWLQVDFQKTMKVTGVTTQGVKSLDTSMYVKEFLISSSQDGHQWTLFFQNGKVKVFQGNQDSFTPVVNSLDPPLLTRYLRIHPQSWVHQIALRMEVLGCEAQDLY

SEQ ID NO: 427 - DNA, 4371 bp, synthetic construct
  misc_feature 1..4371: note = Variant of human B-domain deleted Factor VIII
  source 1..4371: mol_type = other DNA
atgcagattgaactgtctacctgcttcttcctctgtttgctgaggttctgctttagcgccactagacggtactaccttggcgctgtggagctgtcctgggactatatgcagagtgatttgggagagcttcccgtcgacgcacgatttcctcctcgcgttccaaagtcatttcccttcaacacaagcgtggtgtacaagaagacgctcttcgtcgaattcaccgatcacctgttcaatatcgccaaacccagaccaccatggatgggtcttttggggcctaccatacaagcggaggtgtatgacacagttgttatcactctcaagaacatggcttctcatccggtaagtcttcacgcagtgggcgtgtcctactggaaagcttcagaaggagccgagtatgatgatcagacatcccagagggagaaagaagacgacaaggtatttccaggtgggtctcatacctatgtgtggcaagtgctcaaagagaatggccctatggcaagcgatccgctctgtttgacttacagctacctttcacacgttgacctcgtcaaggacctcaactccgggttgattggagccttgttggtatgcagggaaggatctcttgccaaagagaagacacagaccctccacaagtttatccttctctttgctgtgttcgatgagggcaaaagttggcatagcgaaacgaagaattccctcatgcaggatcgcgacgcagccagcgccagagcttggcccaagatgcacactgtgaacggatatgtcaataggtcacttcctggcttgattgggtgtcatcggaaaagtgtctactggcacgtgatcggaatggggacaacaccagaggtccactccatatttctcgaaggccataccttccttgttcgaaaccacagacaggcatccttggagatctctcccattacctttctcactgcccaaacgctccttatggacttgggtcagttccttctcttctgccatatcagctcacaccagcatgatggtatggaagcttatgtgaaagtcgacagttgtcctgaggagccacagttgcgcatgaagaataatgaagaagccgaggattacgacgacgatctcaccgattctgagatggacgtggtgaggtttgatgacgacaactctccctccttcattcaaatccggagcgtggcgaagaaacaccccaagacttgggtccactatatagcggcggaagaggaggattgggattacgctcctcttgtattggcaccagatgaccgctcatacaaaagccagtacctcaacaacggaccgcagagaattggccggaagtataagaaagtgcgatttatggcctatacagacgaaacctttaagacaagggaggccatccagcatgagagtgggattttgggacctcttctttacggcgaagttggtgataccctcctcatcatcttcaagaatcaagcttctcgcccctataacatttacccacacgggatcactgacgttaggcctttgtatagcagaagacttcccaaaggcgtgaagcatctcaaagacttccccattttgccaggcgagatctttaagtacaaatggaccgtcacagtggaagatggaccgactaaatcagaccctcgatgccttacgcggtactattcctccttcgtgaatatggagagagatttggcaagcggactcataggaccactcctcatctgttacaaggaatctgtagaccagaggggtaaccagattatgagtgataaacgcaatgtgatcctttttagcgtcttcgacgagaaccggtcctggtacttgaccgagaatatacaaaggttccttcccaaccccgcaggcgttcagttggaagaccctgagtttcaggccagcaatattatgcactcaatcaacggctatgtgtttgatagtctccagctttctgtttgcctccatgaagtagcctattggtacatcttgtcaattggtgctcaaacagacttcctctccgtcttcttctccggctacacctttaagcacaagatggtgtatgaggacactctcacactctttccattttctggagaaaccgtgttcatgagcatggagaatccaggcctttggatcttgggttgccacaacagtgattttcgcaatcggggaatgactgctctcctcaaagtcagcagctgtgataagaacacaggcgactattacgaagattcttacgaggacataagtgcctacttgttgtccaagaataacgccattgagcccagatcattctcccagaatcctcccgtgcttaaaaggcatcagcgcgaaatcaccagaactactcttcagtctgatcaagaggagattgactatgacgacaccataagcgtggaaatgaagaaggaggatttcgatatctatgacgaagatgagaaccagtctccgcggagctttcagaagaagacgcgacactacttcattgcagcagtcgaaaggctttgggactacggtatgtcatcatcccctcatgtgttgcgcaatagagctcagagtggaagtgttccacagttcaagaaagtcgtctttcaagagtttacagatggcagcttcacacagcctctctatcggggcgagcttaacgaacatttgggactccttggtccctatatccgagccgaagtggaggacaacattatggttacctttaggaatcaagcctctcgcccctacagcttctactcctccctcatcagttatgaggaggatcagagacaaggcgctgaaccacggaagaactttgtgaaaccgaatgagacgaagacctacttctggaaagtacagcaccacatggcccccacaaaagacgaattcgattgcaaagcatgggcgtatttttcagacgttgacttggagaaagatgtacattcaggacttattggtcctttgttggtgtgtcacactaacactctcaatccagcccatggcaggcaggtgacagtccaggaattcgctcttttctttaccatctttgatgagaccaagtcctggtacttcacggaaaacatggagcgcaattgcagagccccctgtaacatacagatggaggaccctacctttaaggaaaattatcggttccacgcaatcaacggatacattatggatacactccctggccttgtgatggctcaggaccaacgaatcaggtggtacctcctcagcatgggttctaatgagaacatacactccattcacttttcaggacatgtgttcactgtccggaagaaagaagagtataagatggccctctacaatttgtatccaggcgtgtttgagaccgttgaaatgcttccctctaaagctggcatctggagagtagagtgcttgatcggagaacatcttcacgcaggtatgagcaccttgttcctcgtgtacagcaacaaatgtcagaccccacttggcatggccagtggacacattcgcgactttcagatcacagcatctggccagtatggacaatgggccccaaagttggctcgcctccattactccggtagcataaatgcgtggtccactaaagaacctttcagctggattaaggtcgatcttcttgcccccatgatcatccacggcattaagacacagggagcgaggcagaaattctcctccctctacatctcacagttcattattatgtatagtttggacggcaagaagtggcaaacttatagaggtaacagtactggaacactcatggtgttcttcggcaacgttgatagctctggcatcaaacacaacatctttaatcctcccataatagctcggtacatcagattgcatccgacccactacagcattaggagtacactccgaatggagcttatgggttgcgacttgaattcctgttcaatgccactcggaatggagtctaaagccatctctgatgcacagataaccgccagtagctactttacgaacatgtttgctacgtggtcaccctctaaggcaaggcttcatttgcaaggccggtctaatgcctggagacctcaggtgaacaacccgaaagaatggctccaggtggactttcagaagaccatgaaagtaacaggtgtcactactcagggagttaagtccttggatgagagcatgtatgtgaaggagttccttatttcctcatcacaagatggccaccagtggaccctcttctttcagaatggtaaggtcaaagtgtttcagggcaatcaagacagcttcacacccgtggtgaacagtcttgatcctccactcttgacacgataccttcgaatccatccacagtcttgggttcaccagattgcattgcgcatggaagtacttggatgcgaggctcaggacctctac

SEQ ID NO: 428 - protein, 1457 aa, synthetic construct
  REGION 1..1457: note = Variant of human B-domain deleted Factor VIII
MQIELSTCFFLCLLRFCFSATRRYYLGAVELSWDYMQSDLGELPVDARFPPRVPKSFPFNTSVVYKKTLFVEFTDHLFNIAKPRPPWMGLLGPTIQAEVYDTVVITLKNMASHPVSLHAVGVSYWKASEGAEYDDQTSQREKEDDKVFPGGSHTYVWQVLKENGPMASDPLCLTYSYLSHVDLVKDLNSGLIGALLVCREGSLAKEKTQTLHKFILLFAVFDEGKSWHSETKNSLMQDRDAASARAWPKMHTVNGYVNRSLPGLIGCHRKSVYWHVIGMGTTPEVHSIFLEGHTFLVRNHRQASLEISPITFLTAQTLLMDLGQFLLFCHISSHQHDGMEAYVKVDSCPEEPQLRMKNNEEAEDYDDDLTDSEMDVVRFDDDNSPSFIQIRSVAKKHPKTWVHYIAAEEEDWDYAPLVLAPDDRSYKSQYLNNGPQRIGRKYKKVRFMAYTDETFKTREAIQHESGILGPLLYGEVGDTLLIIFKNQASRPYNIYPHGITDVRPLYSRRLPKGVKHLKDFPILPGEIFKYKWTVTVEDGPTKSDPRCLTRYYSSFVNMERDLASGLIGPLLICYKESVDQRGNQIMSDKRNVILFSVFDENRSWYLTENIQRFLPNPAGVQLEDPEFQASNIMHSINGYVFDSLQLSVCLHEVAYWYILSIGAQTDFLSVFFSGYTFKHKMVYEDTLTLFPFSGETVFMSMENPGLWILGCHNSDFRNRGMTALLKVSSCDKNTGDYYEDSYEDISAYLLSKNNAIEPRSFSQNPPVLKRHQREITRTTLQSDQEEIDYDDTISVEMKKEDFDIYDEDENQSPRSFQKKTRHYFIAAVERLWDYGMSSSPHVLRNRAQSGSVPQFKKVVFQEFTDGSFTQPLYRGELNEHLGLLGPYIRAEVEDNIMVTFRNQASRPYSFYSSLISYEEDQRQGAEPRKNFVKPNETKTYFWKVQHHMAPTKDEFDCKAWAYFSDVDLEKDVHSGLIGPLLVCHTNTLNPAHGRQVTVQEFALFFTIFDETKSWYFTENMERNCRAPCNIQMEDPTFKENYRFHAINGYIMDTLPGLVMAQDQRIRWYLLSMGSNENIHSIHFSGHVFTVRKKEEYKMALYNLYPGVFETVEMLPSKAGIWRVECLIGEHLHAGMSTLFLVYSNKCQTPLGMASGHIRDFQITASGQYGQWAPKLARLHYSGSINAWSTKEPFSWIKVDLLAPMIIHGIKTQGARQKFSSLYISQFIIMYSLDGKKWQTYRGNSTGTLMVFFGNVDSSGIKHNIFNPPIIARYIRLHPTHYSIRSTLRMELMGCDLNSCSMPLGMESKAISDAQITASSYFTNMFATWSPSKARLHLQGRSNAWRPQVNNPKEWLQVDFQKTMKVTGVTTQGVKSLDESMYVKEFLISSSQDGHQWTLFFQNGKVKVFQGNQDSFTPVVNSLDPPLLTRYLRIHPQSWVHQIALRMEVLGCEAQDLY

SEQ ID NO: 429 - DNA, 4371 bp, synthetic construct
  misc_feature 1..4371: note = Variant of human B-domain deleted Factor VIII
  source 1..4371: mol_type = other DNA
atgcagattgaactgtctacctgcttcttcctctgtttgctgaggttctgctttagcgccactagacggtactaccttggcgctgtggagctgtcctgggactatatgcagagtgatttgggagagcttcccgtcgacgcacgatttcctcctcgcgttccaaagtcatttcccttcaacacaagcgtggtgtacaagaagacgctcttcgtcgaattcaccgatcacctgttcaatatcgccaaacccagaccaccatggatgggtcttttggggcctaccatacaagcggaggtgtatgacacagttgttatcactctcaagaacatggcttctcatccggtaagtcttcacgcagtgggcgtgtcctactggaaagcttcagaaggagccgagtatgatgatcagacatcccagagggagaaagaagacgacaaggtatttccaggtgggtctcatacctatgtgtggcaagtgctcaaagagaatggccctatggcaagcgatccgctctgtttgacttacagctacctttcacacgttgacctcgtcaaggacctcaactccgggttgattggagccttgttggtatgcagggaaggatctcttgccaaagagaagacacagaccctccacaagtttatccttctctttgctgtgttcgatgagggcaaaagttggcatagcgaaacgaagaattccctcatgcaggatcgcgacgcagccagcgccagagcttggcccaagatgcacactgtgaacggatatgtcaataggtcacttcctggcttgattgggtgtcatcggaaaagtgtctactggcacgtgatcggaatggggacaacaccagaggtccactccatatttctcgaaggccataccttccttgttcgaaaccacagacaggcatccttggagatctctcccattacctttctcactgcccaaacgctccttatggacttgggtcagttccttctcttctgccatatcagctcacaccagcatgatggtatggaagcttatgtgaaagtcgacagttgtcctgaggagccacagttgcgcatgaagaataatgaagaagccgaggattacgacgacgatctcaccgattctgagatggacgtggtgaggtttgatgacgacaactctccctccttcattcaaatccggagcgtggcgaagaaacaccccaagacttgggtccactatatagcggcggaagaggaggattgggattacgctcctcttgtattggcaccagatgaccgctcatacaaaagccagtacctcaacaacggaccgcagagaattggccggaagtataagaaagtgcgatttatggcctatacagacgaaacctttaagacaagggaggccatccagcatgagagtgggattttgggacctcttctttacggcgaagttggtgataccctcctcatcatcttcaagaatcaagcttctcgcccctataacatttacccacacgggatcactgacgttaggcctttgtatagcagaagacttcccaaaggcgtgaagcatctcaaagacttccccattttgccaggcgagatctttaagtacaaatggaccgtcacagtggaagatggaccgactaaatcagaccctcgatgccttacgcggtactattcctccttcgtgaatatggagagagatttggcaagcggactcataggaccactcctcatctgttacaaggaatctgtagaccagaggggtaaccagattatgagtgataaacgcaatgtgatcctttttagcgtcttcgacgagaaccggtcctggtacttgaccgagaatatacaaaggttcattcccaaccccgcaggcgttcagttggaagaccctgagtttcaggccagcaatattatgcactcaatcaacggctatgtgtttgatagtctccagctttctgtttgcctccatgaagtagcctattggtacatcttgtcaattggtgctcaaacagacttcctctccgtcttcttctccggctacacctttaagcacaagatggtgtatgaggacactctcacactctttccattttctggagaaaccgtgttcatgagcatggagaatccaggcctttggatcttgggttgccacaacagtgattttcgcaatcggggaatgactgctctcctcaaagtcagcagctgtgataagaacacaggcgactattacgaagattcttacgaggacataagtgcctacttgttgtccaagaataacgccattgagcccagatcattctcccagaatcctcccgtgcttaaaaggcatcagcgcgaaatcaccagaactactcttcagtctgatcaagaggagattgactatgacgacaccataagcgtggaaatgaagaaggaggatttcgatatctatgacgaagatgagaaccagtctccgcggagctttcagaagaagacgcgacactacttcattgcagcagtcgaaaggctttgggactacggtatgtcatcatcccctcatgtgttgcgcaatagagctcagagtggaagtgttccacagttcaagaaagtcgtctttcaagagtttacagatggcagcttcacacagcctctctatcggggcgagcttaacgaacatttgggactccttggtccctatatccgagccgaagtggaggacaacattatggttacctttaggaatcaagcctctcgcccctacagcttctactcctccctcatcagttatgaggaggatcagagacaaggcgctgaaccacggaagaactttgtgaaaccgaatgagacgaagacctacttctggaaagtacagcaccacatggcccccacaaaagacgaattcgattgcaaagcatgggcgtatttttcagacgttgacttggagaaagatgtacattcaggacttattggtcctttgttggtgtgtcacactaacactctcaatccagcccatggcaggcaggtgacagtccaggaattcgctcttttctttaccatctttgatgagaccaagtcctggtacttcacggaaaacatggagcgcaattgcagagccccctgtaacatacagatggaggaccctacctttaaggaaaattatcggttccacgcaatcaacggatacattatggatacactccctggccttgtgatggctcaggaccaacgaatcaggtggtacctcctcagcatgggttctaatgagaacatacactccattcacttttcaggacatgtgttcactgtccggaagaaagaagagtataagatggccctctacaatttgtatccaggcgtgtttgagaccgttgaaatgcttccctctaaagctggcatctggagagtagagtgcttgatcggagaacatcttcacgcaggtatgagcaccttgttcctcgtgtacagcaacaaatgtcagaccccacttggcatggccagtggacacattcgcgactttcagatcacagcatctggccagtatggacaatgggccccaaagttggctcgcctccattactccggtagcataaatgcgtggtccactaaagaacctttcagctggattaaggtcgatcttcttgcccccatgatcatccacggcattaagacacagggagcgaggcagaaattctcctccctctacatctcacagttcattattatgtatagtttggacggcaagaagtggcaaacttatagaggtaacagtactggaacactcatggtgttcttcggcaacgttgatagctctggcatcaaacacaacatctttaatcctcccataatagctcggtacatcagattgcatccgacccactacagcattaggagtacactccgaatggagcttatgggttgcgacttgaattcctgttcaatgccactcggaatggagtctaaagccatctctgatgcacagataaccgccagtagctactttacgaacatgtttgctacgtggtcaccctctaaggcaaggcttcatttgcaaggccggtctaatgcctggagacctcaggtgaacaacccgaaagaatggctccaggtggactttcagaagaccatgaaagtaacaggtgtcactactcagggagttaagtccttggataccagcatgtatgtgaaggagttccttatttcctcatcacaagatggccaccagtggaccctcttctttcagaatggtaaggtcaaagtgtttcagggcaatcaagacagcttcacacccgtggtgaacagtcttgatcctccactcttgacacgataccttcgaatccatccacagtcttgggttcaccagattgcattgcgcatggaagtacttggatgcgaggctcaggacctctac

SEQ ID NO: 430 - protein, 1457 aa, synthetic construct
  REGION 1..1457: note = Variant of human B-domain deleted Factor VIII
MQIELSTCFFLCLLRFCFSATRRYYLGAVELSWDYMQSDLGELPVDARFPPRVPKSFPFNTSVVYKKTLFVEFTDHLFNIAKPRPPWMGLLGPTIQAEVYDTVVITLKNMASHPVSLHAVGVSYWKASEGAEYDDQTSQREKEDDKVFPGGSHTYVWQVLKENGPMASDPLCLTYSYLSHVDLVKDLNSGLIGALLVCREGSLAKEKTQTLHKFILLFAVFDEGKSWHSETKNSLMQDRDAASARAWPKMHTVNGYVNRSLPGLIGCHRKSVYWHVIGMGTTPEVHSIFLEGHTFLVRNHRQASLEISPITFLTAQTLLMDLGQFLLFCHISSHQHDGMEAYVKVDSCPEEPQLRMKNNEEAEDYDDDLTDSEMDVVRFDDDNSPSFIQIRSVAKKHPKTWVHYIAAEEEDWDYAPLVLAPDDRSYKSQYLNNGPQRIGRKYKKVRFMAYTDETFKTREAIQHESGILGPLLYGEVGDTLLIIFKNQASRPYNIYPHGITDVRPLYSRRLPKGVKHLKDFPILPGEIFKYKWTVTVEDGPTKSDPRCLTRYYSSFVNMERDLASGLIGPLLICYKESVDQRGNQIMSDKRNVILFSVFDENRSWYLTENIQRFIPNPAGVQLEDPEFQASNIMHSINGYVFDSLQLSVCLHEVAYWYILSIGAQTDFLSVFFSGYTFKHKMVYEDTLTLFPFSGETVFMSMENPGLWILGCHNSDFRNRGMTALLKVSSCDKNTGDYYEDSYEDISAYLLSKNNAIEPRSFSQNPPVLKRHQREITRTTLQSDQEEIDYDDTISVEMKKEDFDIYDEDENQSPRSFQKKTRHYFIAAVERLWDYGMSSSPHVLRNRAQSGSVPQFKKVVFQEFTDGSFTQPLYRGELNEHLGLLGPYIRAEVEDNIMVTFRNQASRPYSFYSSLISYEEDQRQGAEPRKNFVKPNETKTYFWKVQHHMAPTKDEFDCKAWAYFSDVDLEKDVHSGLIGPLLVCHTNTLNPAHGRQVTVQEFALFFTIFDETKSWYFTENMERNCRAPCNIQMEDPTFKENYRFHAINGYIMDTLPGLVMAQDQRIRWYLLSMGSNENIHSIHFSGHVFTVRKKEEYKMALYNLYPGVFETVEMLPSKAGIWRVECLIGEHLHAGMSTLFLVYSNKCQTPLGMASGHIRDFQITASGQYGQWAPKLARLHYSGSINAWSTKEPFSWIKVDLLAPMIIHGIKTQGARQKFSSLYISQFIIMYSLDGKKWQTYRGNSTGTLMVFFGNVDSSGIKHNIFNPPIIARYIRLHPTHYSIRSTLRMELMGCDLNSCSMPLGMESKAISDAQITASSYFTNMFATWSPSKARLHLQGRSNAWRPQVNNPKEWLQVDFQKTMKVTGVTTQGVKSLDTSMYVKEFLISSSQDGHQWTLFFQNGKVKVFQGNQDSFTPVVNSLDPPLLTRYLRIHPQSWVHQIALRMEVLGCEAQDLY

SEQ ID NO: 431 - DNA, 4371 bp, synthetic construct
  misc_feature 1..4371: note = Variant of human B-domain deleted Factor VIII
  source 1..4371: mol_type = other DNA
atgcagattgaactgtctacctgcttcttcctctgtttgctgaggttctgctttagcgccactagacggtactaccttggcgctgtggagctgtcctgggactatatgcagagtgatttgggagagcttcccgtcgacgcacgatttcctcctcgcgttccaaagtcatttcccttcaacacaagcgtggtgtacaagaagacgctcttcgtcgaattcaccgatcacctgttcaatatcgccaaacccagaccaccatggatgggtcttttggggcctaccatacaagcggaggtgtatgacacagttgttatcactctcaagaacatggcttctcatccggtaagtcttcacgcagtgggcgtgtcctactggaaagcttcagaaggagccgagtatgatgatcagacatcccagagggagaaagaagacgacaaggtatttccaggtgggtctcatacctatgtgtggcaagtgctcaaagagaatggccctatggcaagcgatccgctctgtttgacttacagctacctttcacacgttgacctcgtcaaggacctcaactccgggttgattggagccttgttggtatgcagggaaggatctcttgccaaagagaagacacagaccctccacaagtttatccttctctttgctgtgttcgatgagggcaaaagttggcatagcgaaacgaagaattccctcatgcaggatcgcgacgcagccagcgccagagcttggcccaagatgcacactgtgaacggatatgtcaataggtcacttcctggcttgattgggtgtcatcggaaaagtgtctactggcacgtgatcggaatggggacaacaccagaggtccactccatatttctcgaaggccataccttccttgttcgaaaccacagacaggcatccttggagatctctcccattacctttctcactgcccaaacgctccttatggacttgggtcagttccttctcttctgccatatcagctcacaccagcatgatggtatggaagcttatgtgaaagtcgacagttgtcctgaggagccacagttgcgcatgaagaataatgaagaagccgaggattacgacgacgatctcaccgattctgagatggacgtggtgaggtttgatgacgacaactctccctccttcattcaaatccggagcgtggcgaagaaacaccccaagacttgggtccactatatagcggcggaagaggaggattgggattacgctcctcttgtattggcaccagatgaccgctcatacaaaagccagtacctcaacaacggaccgcagagaattggccggaagtataagaaagtgcgatttatggcctatacagacgaaacctttaagacaagggaggccatccagcatgagagtgggattttgggacctcttctttacggcgaagttggtgataccctcctcatcatcttcaagaatcaagcttctcgcccctataacatttacccacacgggatcactgacgttaggcctttgtatagcagaagacttcccaaaggcgtgaagcatctcaaagacttccccattttgccaggcgagatctttaagtacaaatggaccgtcacagtggaagatggaccgactaaatcagaccctcgatgccttacgcggtactattcctccttcgtgaatatggagagagatttggcaagcggactcataggaccactcctcatctgttacaaggaatctgtagaccagaggggtaaccagattatgagtgataaacgcaatgtgatcctttttagcgtcttcgacgagaaccggtcctggtacttgaccgagaatatacaaaggttccttcccaaccccgcaggcgttcagttggaagaccctgagtttcaggccagcaatattatgcactcaatcaacggctatgtgtttgatagtctccagctttctgtttgcctccatgaagtagcctattggtacatcttgtcaattggtgctcaaacagacttcctctccgtcttcttctccggctacacctttaagcacaagatggtgtatgaggacactctcacactctttccattttctggagaaaccgtgttcatgagcatggagaatccaggcctttggatcttgggttgccacaacagtgattttcgcaatcggggaatgactgctctcctcaaagtcagcagctgtgataagaacacaggcgactattacgaagattcttacgaggacataagtgcctactttttgtccaagaataacgccattgagcccagatcattctcccagaatcctcccgtgcttaaaaggcatcagcgcgaaatcaccagaactactcttcagtctgatcaagaggagattgactatgacgacaccataagcgtggaaatgaagaaggaggatttcgatatctatgacgaagatgagaaccagtctccgcggagctttcagaagaagacgcgacactacttcattgcagcagtcgaaaggctttgggactacggtatgtcatcatcccctcatgtgttgcgcaatagagctcagagtggaagtgttccacagttcaagaaagtcgtctttcaagagtttacagatggcagcttcacacagcctctctatcggggcgagcttaacgaacatttgggactccttggtccctatatccgagccgaagtggaggacaacattatggttacctttaggaatcaagcctctcgcccctacagcttctactcctccctcatcagttatgaggaggatcagagacaaggcgctgaaccacggaagaactttgtgaaaccgaatgagacgaagacctacttctggaaagtacagcaccacatggcccccacaaaagacgaattcgattgcaaagcatgggcgtatttttcagacgttgacttggagaaagatgtacattcaggacttattggtcctttgttggtgtgtcacactaacactctcaatccagcccatggcaggcaggtgacagtccaggaattcgctcttttctttaccatctttgatgagaccaagtcctggtacttcacggaaaacatggagcgcaattgcagagccccctgtaacatacagatggaggaccctacctttaaggaaaattatcggttccacgcaatcaacggatacattatggatacactccctggccttgtgatggctcaggaccaacgaatcaggtggtacctcctcagcatgggttctaatgagaacatacactccattcacttttcaggacatgtgttcactgtccggaagaaagaagagtataagatggccctctacaatttgtatccaggcgtgtttgagaccgttgaaatgcttccctctaaagctggcatctggagagtagagtgcttgatcggagaacatcttcacgcaggtatgagcaccttgttcctcgtgtacagcaacaaatgtcagaccccacttggcatggccagtggacacattcgcgactttcagatcacagcatctggccagtatggacaatgggccccaaagttggctcgcctccattactccggtagcataaatgcgtggtccactaaagaacctttcagctggattaaggtcgatcttcttgcccccatgatcatccacggcattaagacacagggagcgaggcagaaattctcctccctctacatctcacagttcattattatgtatagtttggacggcaagaagtggcaaacttatagaggtaacagtactggaacactcatggtgttcttcggcaacgttgatagctctggcatcaaacacaacatctttaatcctcccataatagctcggtacatcagattgcatccgacccactacagcattaggagtacactccgaatggagcttatgggttgcgacttgaattcctgttcaatgccactcggaatggagtctaaagccatctctgatgcacagataaccgccagtagctactttacgaacatgtttgctacgtggtcaccctctaaggcaaggcttcatttgcaaggccggtctaatgcctggagacctcaggtgaacaacccgaaagaatggctccaggtggactttcagaagaccatgaaagtaacaggtgtcactactcagggagttaagtccttggataccagcatgtatgtgaaggagttccttatttcctcatcacaagatggccaccagtggaccctcttctttcagaatggtaaggtcaaagtgtttcagggcaatcaagacagcttcacacccgtggtgaacagtcttgatcctccactcttgacacgataccttcgaatccatccacagtcttgggttcaccagattgcattgcgcatggaagtacttggatgcgaggctcaggacctctac

SEQ ID NO: 432 - protein, 1457 aa, synthetic construct
  REGION 1..1457: note = Variant of human B-domain deleted Factor VIII
MQIELSTCFFLCLLRFCFSATRRYYLGAVELSWDYMQSDLGELPVDARFPPRVPKSFPFNTSVVYKKTLFVEFTDHLFNIAKPRPPWMGLLGPTIQAEVYDTVVITLKNMASHPVSLHAVGVSYWKASEGAEYDDQTSQREKEDDKVFPGGSHTYVWQVLKENGPMASDPLCLTYSYLSHVDLVKDLNSGLIGALLVCREGSLAKEKTQTLHKFILLFAVFDEGKSWHSETKNSLMQDRDAASARAWPKMHTVNGYVNRSLPGLIGCHRKSVYWHVIGMGTTPEVHSIFLEGHTFLVRNHRQASLEISPITFLTAQTLLMDLGQFLLFCHISSHQHDGMEAYVKVDSCPEEPQLRMKNNEEAEDYDDDLTDSEMDVVRFDDDNSPSFIQIRSVAKKHPKTWVHYIAAEEEDWDYAPLVLAPDDRSYKSQYLNNGPQRIGRKYKKVRFMAYTDETFKTREAIQHESGILGPLLYGEVGDTLLIIFKNQASRPYNIYPHGITDVRPLYSRRLPKGVKHLKDFPILPGEIFKYKWTVTVEDGPTKSDPRCLTRYYSSFVNMERDLASGLIGPLLICYKESVDQRGNQIMSDKRNVILFSVFDENRSWYLTENIQRFLPNPAGVQLEDPEFQASNIMHSINGYVFDSLQLSVCLHEVAYWYILSIGAQTDFLSVFFSGYTFKHKMVYEDTLTLFPFSGETVFMSMENPGLWILGCHNSDFRNRGMTALLKVSSCDKNTGDYYEDSYEDISAYFLSKNNAIEPRSFSQNPPVLKRHQREITRTTLQSDQEEIDYDDTISVEMKKEDFDIYDEDENQSPRSFQKKTRHYFIAAVERLWDYGMSSSPHVLRNRAQSGSVPQFKKVVFQEFTDGSFTQPLYRGELNEHLGLLGPYIRAEVEDNIMVTFRNQASRPYSFYSSLISYEEDQRQGAEPRKNFVKPNETKTYFWKVQHHMAPTKDEFDCKAWAYFSDVDLEKDVHSGLIGPLLVCHTNTLNPAHGRQVTVQEFALFFTIFDETKSWYFTENMERNCRAPCNIQMEDPTFKENYRFHAINGYIMDTLPGLVMAQDQRIRWYLLSMGSNENIHSIHFSGHVFTVRKKEEYKMALYNLYPGVFETVEMLPSKAGIWRVECLIGEHLHAGMSTLFLVYSNKCQTPLGMASGHIRDFQITASGQYGQWAPKLARLHYSGSINAWSTKEPFSWIKVDLLAPMIIHGIKTQGARQKFSSLYISQFIIMYSLDGKKWQTYRGNSTGTLMVFFGNVDSSGIKHNIFNPPIIARYIRLHPTHYSIRSTLRMELMGCDLNSCSMPLGMESKAISDAQITASSYFTNMFATWSPSKARLHLQGRSNAWRPQVNNPKEWLQVDFQKTMKVTGVTTQGVKSLDTSMYVKEFLISSSQDGHQWTLFFQNGKVKVFQGNQDSFTPVVNSLDPPLLTRYLRIHPQSWVHQIALRMEVLGCEAQDLY

SEQ ID NO: 433 - DNA, 4371 bp, synthetic construct
  misc_feature 1..4371: note = Variant of human B-domain deleted Factor VIII
  source 1..4371: mol_type = other DNA
atgcagattgaactgtctacctgcttcttcctctgtttgctgaggttctgctttagcgccactagacggtactaccttggcgctgtggagctgtcctgggactatatgcagagtgatttgggagagcttcccgtcgacgcacgatttcctcctcgcgttccaaagtcatttcccttcaacacaagcgtggtgtacaagaagacgctcttcgtcgaattcaccgatcacctgttcaatatcgccaaacccagaccaccatggatgggtcttttggggcctaccatacaagcggaggtgtatgacacagttgttatcactctcaagaacatggcttctcatccggtaagtcttcacgcagtgggcgtgtcctactggaaagcttcagaaggagccgagtatgatgatcagacatcccagagggagaaagaagacgacaaggtatttccaggtgggtctcatacctatgtgtggcaagtgctcaaagagaatggccctatggcaagcgatccgctctgtttgacttacagctacctttcacacgttgacctcgtcaaggacctcaactccgggttgattggagccttgttggtatgcagggaaggatctcttgccaaagagaagacacagaccctccacaagtttatccttctctttgctgtgttcgatgagggcaaaagttggcatagcgaaacgaagaattccctcatgcaggatcgcgacgcagccagcgccagagcttggcccaagatgcacactgtgaacggatatgtcaataggtcacttcctggcttgattgggtgtcatcggaaaagtgtctactggcacgtgatcggaatggggacaacaccagaggtccactccatatttctcgaaggccataccttccttgttcgaaaccacagacaggcatccttggagatctctcccattacctttctcactgcccaaacgctccttatggacttgggtcagttccttctcttctgccatatcagctcacaccagcatgatggtatggaagcttatgtgaaagtcgacagttgtcctgaggagccacagttgcgcatgaagaataatgaagaagccgaggattacgacgacgatctcaccgattctgagatggacgtggtgaggtttgatgacgacaactctccctccgttattcaaatccggagcgtggcgaagaaacaccccaagacttgggtccactatatagcggcggaagaggaggattgggattacgctcctcttgtattggcaccagatgaccgctcatacaaaagccagtacctcaacaacggaccgcagagaattggccggaagtataagaaagtgcgatttatggcctatacagacgaaacctttaagacaagggaggccatccagcatgagagtgggattttgggacctcttctttacggcgaagttggtgataccctcctcatcatcttcaagaatcaagcttctcgcccctataacatttacccacacgggatcactgacgttaggcctttgtatagcagaagacttcccaaaggcgtgaagcatctcaaagacttccccattttgccaggcgagatctttaagtacaaatggaccgtcacagtggaagatggaccgactaaatcagaccctcgatgccttacgcggtactattcctccttcgtgaatatggagagagatttggcaagcggactcataggaccactcctcatctgttacaaggaatctgtagaccagaggggtaaccagattatgagtgataaacgcaatgtgatcctttttagcgtcttcgacgagaaccggtcctggtacttgaccgagaatatacaaaggttccttcccaaccccgcaggcgttcagttggaagaccctgagtttcaggccagcaatattatgcactcaatcaacggctatgtgtttgatagtctccagctttctgtttgcctccatgaagtagcctattggtacatcttgtcaattggtgctcaaacagacttcctctccgtcttcttctccggctacacctttaagcacaagatggtgtatgaggacactctcacactctttccattttctggagaaaccgtgttcatgagcatggagaatccaggcctttggatcttgggttgccacaacagtgattttcgcaatcggggaatgactgctctcctcaaagtcagcagctgtgataagaacacaggcgactattacgaagattcttacgaggacataagtgcctacttgttgtccaagaataacgccattgagcccagatcattctcccagaatcctcccgtgcttaaaaggcatcagcgcgaaatcaccagaactactcttcagtctgatcaagaggagattgactatgacgacaccataagcgtggaaatgaagaaggaggatttcgatatctatgacgaagatgagaaccagtctccgcggagctttcagaagaagacgcgacactacttcattgcagcagtcgaaaggctttgggactacggtatgtcatcatcccctcatgtgttgcgcaatagagctcagagtggaagtgttccacagttcaagaaagtcgtctttcaagagtttacagatggcagcttcacacagcctctctatcggggcgagcttaacgaacatttgggactccttggtccctatatccgagccgaagtggaggacaacattatggttacctttaggaatcaagcctctcgcccctacagcttctactcctccctcatcagttatgaggaggatcagagacaaggcgctgaaccacggaagaactttgtgaaaccgaatgagacgaagacctacttctggaaagtacagcaccacatggcccccacaaaagacgaattcgattgcaaagcatgggcgtatttttcagacgttgacttggagaaagatgtacattcaggacttattggtcctttgttggtgtgtcacactaacactctcaatccagcccatggcaggcaggtgacagtccaggaattcgctcttttctttaccatctttgatgagaccaagtcctggtacttcacggaaaacatggagcgcaattgcagagccccctgtaacatacagatggaggaccctacctttaaggaaaattatcggttccacgcaatcaacggatacattatggatacactccctggccttgtgatggctcaggaccaacgaatcaggtggtacctcctcagcatgggttctaatgagaacatacactccattcacttttcaggacatgtgttcactgtccggaagaaagaagagtataagatggccctctacaatttgtatccaggcgtgtttgagaccgttgaaatgcttccctctaaagctggcatctggagagtagagtgcttgatcggagaacatcttcacgcaggtatgagcaccttgttcctcgtgtacagcaacaaatgtcagaccccacttggcatggccagtggacacattcgcgactttcagatcacagcatctggccagtatggacaatgggccccaaagttggctcgcctccattactccggtagcataaatgcgtggtccactaaagaacctttcagctggattaaggtcgatcttcttgcccccatgatcatccacggcattaagacacagggagcgaggcagaaattctcctccctctacatctcacagttcattattatgtatagtttggacggcaagaagtggcaaacttatagaggtaacagtactggaacactcatggtgttcttcggcaacgttgatagctctggcatcaaacacaacatctttaatcctcccataatagctcggtacatcagattgcatccgacccactacagcattaggagtacactccgaatggagcttatgggttgcgacttgaattcctgttcaatgccactcggaatggagtctaaagccatctctgatgcacagataaccgccagtagctactttacgaacatgtttgctacgtggtcaccctctaaggcaaggcttcatttgcaaggccggtctaatgcctggagacctcaggtgaacaacccgaaagaatggctccaggtggactttcagaagaccatgaaagtaacaggtgtcactactcagggagttaagtccttggataccagcatgtatgtgaaggagttccttatttcctcatcacaagatggccaccagtggaccctcttctttcagaatggtaaggtcaaagtgtttcagggcaatcaagacagcttcacacccgtggtgaacagtcttgatcctccactcttgacacgataccttcgaatccatccacagtcttgggttcaccagattgcattgcgcatggaagtacttggatgcgaggctcaggacctctac

SEQ ID NO: 434 - protein, 1457 aa, synthetic construct
  REGION 1..1457: note = Variant of human B-domain deleted Factor VIII
MQIELSTCFFLCLLRFCFSATRRYYLGAVELSWDYMQSDLGELPVDARFPPRVPKSFPFNTSVVYKKTLFVEFTDHLFNIAKPRPPWMGLLGPTIQAEVYDTVVITLKNMASHPVSLHAVGVSYWKASEGAEYDDQTSQREKEDDKVFPGGSHTYVWQVLKENGPMASDPLCLTYSYLSHVDLVKDLNSGLIGALLVCREGSLAKEKTQTLHKFILLFAVFDEGKSWHSETKNSLMQDRDAASARAWPKMHTVNGYVNRSLPGLIGCHRKSVYWHVIGMGTTPEVHSIFLEGHTFLVRNHRQASLEISPITFLTAQTLLMDLGQFLLFCHISSHQHDGMEAYVKVDSCPEEPQLRMKNNEEAEDYDDDLTDSEMDVVRFDDDNSPSVIQIRSVAKKHPKTWVHYIAAEEEDWDYAPLVLAPDDRSYKSQYLNNGPQRIGRKYKKVRFMAYTDETFKTREAIQHESGILGPLLYGEVGDTLLIIFKNQASRPYNIYPHGITDVRPLYSRRLPKGVKHLKDFPILPGEIFKYKWTVTVEDGPTKSDPRCLTRYYSSFVNMERDLASGLIGPLLICYKESVDQRGNQIMSDKRNVILFSVFDENRSWYLTENIQRFLPNPAGVQLEDPEFQASNIMHSINGYVFDSLQLSVCLHEVAYWYILSIGAQTDFLSVFFSGYTFKHKMVYEDTLTLFPFSGETVFMSMENPGLWILGCHNSDFRNRGMTALLKVSSCDKNTGDYYEDSYEDISAYLLSKNNAIEPRSFSQNPPVLKRHQREITRTTLQSDQEEIDYDDTISVEMKKEDFDIYDEDENQSPRSFQKKTRHYFIAAVERLWDYGMSSSPHVLRNRAQSGSVPQFKKVVFQEFTDGSFTQPLYRGELNEHLGLLGPYIRAEVEDNIMVTFRNQASRPYSFYSSLISYEEDQRQGAEPRKNFVKPNETKTYFWKVQHHMAPTKDEFDCKAWAYFSDVDLEKDVHSGLIGPLLVCHTNTLNPAHGRQVTVQEFALFFTIFDETKSWYFTENMERNCRAPCNIQMEDPTFKENYRFHAINGYIMDTLPGLVMAQDQRIRWYLLSMGSNENIHSIHFSGHVFTVRKKEEYKMALYNLYPGVFETVEMLPSKAGIWRVECLIGEHLHAGMSTLFLVYSNKCQTPLGMASGHIRDFQITASGQYGQWAPKLARLHYSGSINAWSTKEPFSWIKVDLLAPMIIHGIKTQGARQKFSSLYISQFIIMYSLDGKKWQTYRGNSTGTLMVFFGNVDSSGIKHNIFNPPIIARYIRLHPTHYSIRSTLRMELMGCDLNSCSMPLGMESKAISDAQITASSYFTNMFATWSPSKARLHLQGRSNAWRPQVNNPKEWLQVDFQKTMKVTGVTTQGVKSLDTSMYVKEFLISSSQDGHQWTLFFQNGKVKVFQGNQDSFTPVVNSLDPPLLTRYLRIHPQSWVHQIALRMEVLGCEAQDLY

SEQ ID NO: 435 - DNA, 4371 bp, synthetic construct
  misc_feature 1..4371: note = Variant of human B-domain deleted Factor VIII
  source 1..4371: mol_type = other DNA
atgcagattgaactgtctacctgcttcttcctctgtttgctgaggttctgctttagcgccactagacggtactaccttggcgctgtggagctgtcctgggactatatgcagagtgatttgggagagcttcccgtcgacgcacgatttcctcctcgcgttccaaagtcatttcccttcaacacaagcgtggtgtacaagaagacgctcttcgtcgaattcaccgatcacctgttcaatatcgccaaacccagaccaccatggatgggtcttttggggcctaccatacaagcggaggtgtatgacacagttgttatcactctcaagaacatggcttctcatccggtaagtcttcacgcagtgggcgtgtcctactggaaagcttcagaaggagccgagtatgatgatcagacatcccagagggagaaagaagacgacaaggtatttccaggtgggtctcatacctatgtgtggcaagtgctcaaagagaatggccctatggcaagcgatccgctctgtttgacttacagctacctttcacacgttgacctcgtcaaggacctcaactccgggttgattggagccttgttggtatgcagggaaggatctcttgccaaagagaagacacagaccctccacaagtttatccttctctttgctgtgttcgatgagggcaaaagttggcatagcgaaacgaagaattccctcatgcaggatcgcgacgcagccagcgccagagcttggcccaagatgcacactgtgaacggatatgtcaataggtcacttcctggcttgattgggtgtcatcggaaaagtgtctactggcacgtgatcggaatggggacaacaccagaggtccactccatatttctcgaaggccataccttccttgttcgaaaccacagacaggcatccttggagatctctcccattacctttctcactgcccaaacgctccttatggacttgggtcagttccttctcttctgccatatcagctcacaccagcatgatggtatggaagcttatgtgaaagtcgacagttgtcctgaggagccacagttgcgcatgaagaataatgaagaagccgaggattacgacgacgatctcaccgattctgagatggacgtggtgaggtttgatgacgacaactctccctccttcattcaaatccggagcgtggcgaagaaacaccccaagacttgggtccactatatagcggcggaagaggaggattgggattacgctcctcttgtattggcaccagatgaccgctcatacaaaagccagtacctcaacaacggaccgcagagaattggccggaagtataagaaagtgcgatttatggcctatacagacgaaacctttaagacaagggaggccatccagcatgagagtgggattttgggacctcttctttacggcgaagttggtgataccctcctcatcatcttcaagaatcaagcttctcgcccctataacatttacccacacgggatcactgacgttaggcctttgtatagcagaagacttcccaaaggcgtgaagcatctcaaagacttccccattttgccaggcgagatctttaagtacaaatggaccgtcacagtggaagatggaccgactaaatcagaccctcgatgccttacgcggtactattcctccttcgtgaatatggagagagatttggcaagcggactcataggaccactcctcatctgttacaaggaatctgtagaccagaggggtaaccagattatgagtgataaacgcaatgtgatcctttttagcgtcttcgacgagaaccggtcctggtacttgaccgagaatatacaaaggttccttcccaaccccgcaggcgttcagttggaagaccctgagtttcaggccagcaatattatgcactcaatcaacggctatgtgtttgatagtctccagctttctgtttgcctccatgaagtagcctattggtacatcttgtcaattggtgctcaaacagacttcctctccgtcttcttctccggctacacctttaagcacaagatggtgtatgaggacactctcacactctttccattttctggagaaaccgtgttcatgagcatggagaatccaggcctttggatcttgggttgccacaacagtgattttcgcaatcggggaatgactgctctcctcaaagtcagcagctgtgataagaacacaggcgactattacgaagattcttacgaggacataagtgcctacttgacttccaagaataacgccattgagcccagatcattctcccagaatcctcccgtgcttaaaaggcatcagcgcgaaatcaccagaactactcttcagtctgatcaagaggagattgactatgacgacaccataagcgtggaaatgaagaaggaggatttcgatatctatgacgaagatgagaaccagtctccgcggagctttcagaagaagacgcgacactacttcattgcagcagtcgaaaggctttgggactacggtatgtcatcatcccctcatgtgttgcgcaatagagctcagagtggaagtgttccacagttcaagaaagtcgtctttcaagagtttacagatggcagcttcacacagcctctctatcggggcgagcttaacgaacatttgggactccttggtccctatatccgagccgaagtggaggacaacattatggttacctttaggaatcaagcctctcgcccctacagcttctactcctccctcatcagttatgaggaggatcagagacaaggcgctgaaccacggaagaactttgtgaaaccgaatgagacgaagacctacttctggaaagtacagcaccacatggcccccacaaaagacgaattcgattgcaaagcatgggcgtatttttcagacgttgacttggagaaagatgtacattcaggacttattggtcctttgttggtgtgtcacactaacactctcaatccagcccatggcaggcaggtgacagtccaggaattcgctcttttctttaccatctttgatgagaccaagtcctggtacttcacggaaaacatggagcgcaattgcagagccccctgtaacatacagatggaggaccctacctttaaggaaaattatcggttccacgcaatcaacggatacattatggatacactccctggccttgtgatggctcaggaccaacgaatcaggtggtacctcctcagcatgggttctaatgagaacatacactccattcacttttcaggacatgtgttcactgtccggaagaaagaagagtataagatggccctctacaatttgtatccaggcgtgtttgagaccgttgaaatgcttccctctaaagctggcatctggagagtagagtgcttgatcggagaacatcttcacgcaggtatgagcaccttgttcctcgtgtacagcaacaaatgtcagaccccacttggcatggccagtggacacattcgcgactttcagatcacagcatctggccagtatggacaatgggccccaaagttggctcgcctccattactccggtagcataaatgcgtggtccactaaagaacctttcagctggattaaggtcgatcttcttgcccccatgatcatccacggcattaagacacagggagcgaggcagaaattctcctccctctacatctcacagttcattattatgtatagtttggacggcaagaagtggcaaacttatagaggtaacagtactggaacactcatggtgttcttcggcaacgttgatagctctggcatcaaacacaacatctttaatcctcccataatagctcggtacatcagattgcatccgacccactacagcattaggagtacactccgaatggagcttatgggttgcgacttgaattcctgttcaatgccactcggaatggagtctaaagccatctctgatgcacagataaccgccagtagctactttacgaacatgtttgctacgtggtcaccctctaaggcaaggcttcatttgcaaggccggtctaatgcctggagacctcaggtgaacaacccgaaagaatggctccaggtggactttcagaagaccatgaaagtaacaggtgtcactactcagggagttaagtccttggataccagcatgtatgtgaaggagttccttatttcctcatcacaagatggccaccagtggaccctcttctttcagaatggtaaggtcaaagtgtttcagggcaatcaagacagcttcacacccgtggtgaacagtcttgatcctccactcttgacacgataccttcgaatccatccacagtcttgggttcaccagattgcattgcgcatggaagtacttggatgcgaggctcaggacctctac

SEQ ID NO: 436 - protein, 1457 aa, synthetic construct
  REGION 1..1457: note = Variant of human B-domain deleted Factor VIII
MQIELSTCFFLCLLRFCFSATRRYYLGAVELSWDYMQSDLGELPVDARFPPRVPKSFPFNTSVVYKKTLFVEFTDHLFNIAKPRPPWMGLLGPTIQAEVYDTVVITLKNMASHPVSLHAVGVSYWKASEGAEYDDQTSQREKEDDKVFPGGSHTYVWQVLKENGPMASDPLCLTYSYLSHVDLVKDLNSGLIGALLVCREGSLAKEKTQTLHKFILLFAVFDEGKSWHSETKNSLMQDRDAASARAWPKMHTVNGYVNRSLPGLIGCHRKSVYWHVIGMGTTPEVHSIFLEGHTFLVRNHRQASLEISPITFLTAQTLLMDLGQFLLFCHISSHQHDGMEAYVKVDSCPEEPQLRMKNNEEAEDYDDDLTDSEMDVVRFDDDNSPSFIQIRSVAKKHPKTWVHYIAAEEEDWDYAPLVLAPDDRSYKSQYLNNGPQRIGRKYKKVRFMAYTDETFKTREAIQHESGILGPLLYGEVGDTLLIIFKNQASRPYNIYPHGITDVRPLYSRRLPKGVKHLKDFPILPGEIFKYKWTVTVEDGPTKSDPRCLTRYYSSFVNMERDLASGLIGPLLICYKESVDQRGNQIMSDKRNVILFSVFDENRSWYLTENIQRFLPNPAGVQLEDPEFQASNIMHSINGYVFDSLQLSVCLHEVAYWYILSIGAQTDFLSVFFSGYTFKHKMVYEDTLTLFPFSGETVFMSMENPGLWILGCHNSDFRNRGMTALLKVSSCDKNTGDYYEDSYEDISAYLTSKNNAIEPRSFSQNPPVLKRHQREITRTTLQSDQEEIDYDDTISVEMKKEDFDIYDEDENQSPRSFQKKTRHYFIAAVERLWDYGMSSSPHVLRNRAQSGSVPQFKKVVFQEFTDGSFTQPLYRGELNEHLGLLGPYIRAEVEDNIMVTFRNQASRPYSFYSSLISYEEDQRQGAEPRKNFVKPNETKTYFWKVQHHMAPTKDEFDCKAWAYFSDVDLEKDVHSGLIGPLLVCHTNTLNPAHGRQVTVQEFALFFTIFDETKSWYFTENMERNCRAPCNIQMEDPTFKENYRFHAINGYIMDTLPGLVMAQDQRIRWYLLSMGSNENIHSIHFSGHVFTVRKKEEYKMALYNLYPGVFETVEMLPSKAGIWRVECLIGEHLHAGMSTLFLVYSNKCQTPLGMASGHIRDFQITASGQYGQWAPKLARLHYSGSINAWSTKEPFSWIKVDLLAPMIIHGIKTQGARQKFSSLYISQFIIMYSLDGKKWQTYRGNSTGTLMVFFGNVDSSGIKHNIFNPPIIARYIRLHPTHYSIRSTLRMELMGCDLNSCSMPLGMESKAISDAQITASSYFTNMFATWSPSKARLHLQGRSNAWRPQVNNPKEWLQVDFQKTMKVTGVTTQGVKSLDTSMYVKEFLISSSQDGHQWTLFFQNGKVKVFQGNQDSFTPVVNSLDPPLLTRYLRIHPQSWVHQIALRMEVLGCEAQDLY

SEQ ID NO: 437 - DNA, 4371 bp, synthetic construct
  misc_feature 1..4371: note = Variant of human B-domain deleted Factor VIII
  source 1..4371: mol_type = other DNA
atgcagattgaactgtctacctgcttcttcctctgtttgctgaggttctgctttagcgccactagacggtactaccttggcgctgtggagctgtcctgggactatatgcagagtgatttgggagagcttcccgtcgacgcacgatttcctcctcgcgttccaaagtcatttcccttcaacacaagcgtggtgtacaagaagacgctcttcgtcgaattcaccgatcacctgttcaatatcgccaaacccagaccaccatggatgggtcttttggggcctaccatacaagcggaggtgtatgacacagttgttatcactctcaagaacatggcttctcatccggtaagtcttcacgcagtgggcgtgtcctactggaaagcttcagaaggagccgagtatgatgatcagacatcccagagggagaaagaagacgacaaggtatttccaggtgggtctcatacctatgtgtggcaagtgctcaaagagaatggccctatggcaagcgatccgctctgtttgacttacagctacctttcacacgttgacctcgtcaaggacctcaactccgggttgattggagccttgttggtatgcagggaaggatctcttgccaaagagaagacacagaccctccacaagtttatccttctctttgctgtgttcgatgagggcaaaagttggcatagcgaaacgaagaattccctcatgcaggatcgcgacgcagccagcgccagagcttggcccaagatgcacactgtgaacggatatgtcaataggtcacttcctggcttgattgggtgtcatcggaaaagtgtctactggcacgtgatcggaatggggacaacaccagaggtccactccatatttctcgaaggccataccttccttgttcgaaaccacagacaggcatccttggagatctctcccattacctttctcactgcccaaacgctccttatggacttgggtcagttccttctcttctgccatatcagctcacaccagcatgatggtatggaagcttatgtgaaagtcgacagttgtcctgaggagccacagttgcgcatgaagaataatgaagaagccgaggattacgacgacgatctcaccgattctgagatggacgtggtgaggtttgatgacgacaactctccctccttcattcaaatccggagcgtggcgaagaaacaccccaagacttgggtccactatatagcggcggaagaggaggattgggattacgctcctcttgtattggcaccagatgaccgctcatacaaaagccagtacctcaacaacggaccgcagagaattggccggaagtataagaaagtgcgatttatggcctatacagacgaaacctttaagacaagggaggccatccagcatgagagtgggattttgggacctcttctttacggcgaagttggtgataccctcctcatcatcttcaagaatcaagcttctcgcccctataacatttacccacacgggatcactgacgttaggcctttgtatagcagaagacttcccaaaggcgtgaagcatctcaaagacttccccattttgccaggcgagatctttaagtacaaatggaccgtcacagtggaagatggaccgactaaatcagaccctcgatgccttacgcggtactattcctccttcgtgaatatggagagagatttggcaagcggactcataggaccactcctcatctgttacaaggaatctgtagaccagaggggtaaccagattatgagtgataaacgcaatgtgatcctttttagcgtcttcgacgagaaccggtcctggtacttgaccgagaatatacaaaggttccttcccaaccccgcaggcgttcagttggaagaccctgagtttcaggccagcaatattatgcactcaatcaacggctatgtgtttgatagtctccagctttctgtttgcctccatgaagtagcctattggtacatcttgtcaattggtgctcaaacagacttcctctccgtcttcttctccggctacacctttaagcacaagatggtgtatgaggacactctcacactctttccattttctggagaaaccgtgttcatgagcatggagaatccaggcctttggatcttgggttgccacaacagtgattttcgcaatcggggaatgactgctctcctcaaagtcagcagctgtgataagaacacaggcgactattacgaagattcttacgaggacataagtgcctacttgttgtccaagaataacgccattgagcccagatcattctcccagaatcctcccgtgcttaaaaggcatcagcgcgaaatcaccagaactactcttcagtctgatcaagaggagattgactatgacgacaccataagcgtggaaatgaagaaggaggatttcgatatctatgacgaagatgagaaccagtctccgcggagctttcagaagaagacgcgacactacttcattgcagcagtcgaaaggctttgggactacggtatgtcatcatcccctcatgtgttgcgcaatagagctcagagtggaagtgttccacagttcaagaaagtcgtctttcaagagtttacagatggcagcttcacacagcctctctatcggggcgagcttaacgaacatttgggactccttggtccctatatccgagccgaagtggaggacaacattatggttacctttaggaatcaagcctctcgcccctacagcttctactcctccctcatcagttatgaggaggatcagagacaaggcgctgaaccacggaagaactttgtgaaaccgaatgagacgaagacctacttctggaaagtacagcaccacatggcccccacaaaagacgaattcgattgcaaagcatgggcgtatttttcagacgttgacttggagaaagatgtacattcaggacttattggtcctttgttggtgtgtcacactaacactctcaatccagcccatggcaggcaggtgacagtccaggaattcgctcttttctttaccatctttgatgagaccaagtcctggtacttcacggaaaacatggagcgcaattgcagagccccctgtaacatacagatggaggaccctacctttaaggaaaattatcggttccacgcaatcaacggatacattatggatacactccctggccttgtgatggctcaggaccaacgaatcaggtggtacctcctcagcatgggttctaatgagaacatacactccattcacttttcaggacatgtgttcactgtccggaagaaagaagagtataagatggccctctacaatttgtatccaggcgtgtttgagaccgttgaaatgcttccctctaaagctggcatctggagagtagagtgcttgatcggagaacatcttcacgcaggtatgagcaccttgttcctcgtgtacagcaacaaatgtcagaccccacttggcatggccagtggacacattcgcgactttcagatcacagcatctggccagtatggacaatgggccccaaagttggctcgcctccattactccggtagcataaatgcgtggtccactaaagaacctgggagctggattaaggtcgatcttcttgcccccatgatcatccacggcattaagacacagggagcgaggcagaaattctcctccctctacatctcacagttcattattatgtatagtttggacggcaagaagtggcaaacttatagaggtaacagtactggaacactcatggtgttcttcggcaacgttgatagctctggcatcaaacacaacatctttaatcctcccataatagctcggtacatcagattgcatccgacccactacagcattaggagtacactccgaatggagcttatgggttgcgacttgaattcctgttcaatgccactcggaatggagtctaaagccatctctgatgcacagataaccgccagtagctactttacgaacatgtttgctacgtggtcaccctctaaggcaaggcttcatttgcaaggccggtctaatgcctggagacctcaggtgaacaacccgaaagaatggctccaggtggactttcagaagaccatgaaagtaacaggtgtcactactcagggagttaagtccttggataccagcatgtatgtgaaggagttccttatttcctcatcacaagatggccaccagtggaccctcttctttcagaatggtaaggtcaaagtgtttcagggcaatcaagacagcttcacacccgtggtgaacagtcttgatcctccactcttgacacgataccttcgaatccatccacagtcttgggttcaccagattgcattgcgcatggaagtacttggatgcgaggctcaggacctctac

SEQ ID NO: 438 - protein, 1457 aa, synthetic construct
  REGION 1..1457: note = Variant of human B-domain deleted Factor VIII
MQIELSTCFFLCLLRFCFSATRRYYLGAVELSWDYMQSDLGELPVDARFPPRVPKSFPFNTSVVYKKTLFVEFTDHLFNIAKPRPPWMGLLGPTIQAEVYDTVVITLKNMASHPVSLHAVGVSYWKASEGAEYDDQTSQREKEDDKVFPGGSHTYVWQVLKENGPMASDPLCLTYSYLSHVDLVKDLNSGLIGALLVCREGSLAKEKTQTLHKFILLFAVFDEGKSWHSETKNSLMQDRDAASARAWPKMHTVNGYVNRSLPGLIGCHRKSVYWHVIGMGTTPEVHSIFLEGHTFLVRNHRQASLEISPITFLTAQTLLMDLGQFLLFCHISSHQHDGMEAYVKVDSCPEEPQLRMKNNEEAEDYDDDLTDSEMDVVRFDDDNSPSFIQIRSVAKKHPKTWVHYIAAEEEDWDYAPLVLAPDDRSYKSQYLNNGPQRIGRKYKKVRFMAYTDETFKTREAIQHESGILGPLLYGEVGDTLLIIFKNQASRPYNIYPHGITDVRPLYSRRLPKGVKHLKDFPILPGEIFKYKWTVTVEDGPTKSDPRCLTRYYSSFVNMERDLASGLIGPLLICYKESVDQRGNQIMSDKRNVILFSVFDENRSWYLTENIQRFLPNPAGVQLEDPEFQASNIMHSINGYVFDSLQLSVCLHEVAYWYILSIGAQTDFLSVFFSGYTFKHKMVYEDTLTLFPFSGETVFMSMENPGLWILGCHNSDFRNRGMTALLKVSSCDKNTGDYYEDSYEDISAYLLSKNNAIEPRSFSQNPPVLKRHQREITRTTLQSDQEEIDYDDTISVEMKKEDFDIYDEDENQSPRSFQKKTRHYFIAAVERLWDYGMSSSPHVLRNRAQSGSVPQFKKVVFQEFTDGSFTQPLYRGELNEHLGLLGPYIRAEVEDNIMVTFRNQASRPYSFYSSLISYEEDQRQGAEPRKNFVKPNETKTYFWKVQHHMAPTKDEFDCKAWAYFSDVDLEKDVHSGLIGPLLVCHTNTLNPAHGRQVTVQEFALFFTIFDETKSWYFTENMERNCRAPCNIQMEDPTFKENYRFHAINGYIMDTLPGLVMAQDQRIRWYLLSMGSNENIHSIHFSGHVFTVRKKEEYKMALYNLYPGVFETVEMLPSKAGIWRVECLIGEHLHAGMSTLFLVYSNKCQTPLGMASGHIRDFQITASGQYGQWAPKLARLHYSGSINAWSTKEPGSWIKVDLLAPMIIHGIKTQGARQKFSSLYISQFIIMYSLDGKKWQTYRGNSTGTLMVFFGNVDSSGIKHNIFNPPIIARYIRLHPTHYSIRSTLRMELMGCDLNSCSMPLGMESKAISDAQITASSYFTNMFATWSPSKARLHLQGRSNAWRPQVNNPKEWLQVDFQKTMKVTGVTTQGVKSLDTSMYVKEFLISSSQDGHQWTLFFQNGKVKVFQGNQDSFTPVVNSLDPPLLTRYLRIHPQSWVHQIALRMEVLGCEAQDLY

SEQ ID NO: 439 - DNA, 4371 bp, synthetic construct
  misc_feature 1..4371: note = Variant of human B-domain deleted Factor VIII
  source 1..4371: mol_type = other DNA
atgcagattgaactgtctacctgcttcttcctctgtttgctgaggttctgctttagcgccactagacggtactaccttggcgctgtggagctgtcctgggactatatgcagagtgatttgggagagcttcccgtcgacgcacgatttcctcctcgcgttccaaagtcatttcccttcaacacaagcgtggtgtacaagaagacgctcttcgtcgaattcaccgatcacctgttcaatatcgccaaacccagaccaccatggatgggtcttttggggcctaccatacaagcggaggtgtatgacacagttgttatcactctcaagaacatggcttctcatccggtaagtcttcacgcagtgggcgtgtcctactggaaagcttcagaaggagccgagtatgatgatcagacatcccagagggagaaagaagacgacaaggtatttccaggtgggtctcatacctatgtgtggcaagtgctcaaagagaatggccctatggcaagcgatccgctctgtttgacttacagctacctttcacacgttgacctcgtcaaggacctcaactccgggttgattggagccttgttggtatgcagggaaggatctcttgccaaagagaagacacagaccctccacaagtttatccttctctttgctgtgttcgatgagggcaaaagttggcatagcgaaacgaagaattccctcatgcaggatcgcgacgcagccagcgccagagcttggcccaagatgcacactgtgaacggatatgtcaataggtcacttcctggcttgattgggtgtcatcggaaaagtgtctactggcacgtgatcggaatggggacaacaccagaggtccactccatatttctcgaaggccataccttccttgttcgaaaccacagacaggcatccttggagatctctcccattacctttctcactgcccaaacgctccttatggacttgggtcagttccttctcttctgccatatcagctcacaccagcatgatggtatggaagcttatgtgaaagtcgacagttgtcctgaggagccacagttgcgcatgaagaataatgaagaagccgaggattacgacgacgatctcaccgattctgagatggacgtggtgaggtttgatgacgacaactctccctccttcattcaaatccggagcgtggcgaagaaacaccccaagacttgggtccactatatagcggcggaagaggaggattgggattacgctcctcttgtattggcaccagatgaccgctcatacaaaagccagtacctcaacaacggaccgcagagaattggccggaagtataagaaagtgcgatttatggcctatacagacgaaacctttaagacaagggaggccatccagcatgagagtgggattttgggacctcttctttacggcgaagttggtgataccctcctcatcatcttcaagaatcaagcttctcgcccctataacatttacccacacgggatcactgacgttaggcctttgtatagcagaagacttcccaaaggcgtgaagcatctcaaagacttccccattttgccaggcgagatctttaagtacaaatggaccgtcacagtggaagatggaccgactaaatcagaccctcgatgccttacgcggtactattcctccttcgtgaatatggagagagatttggcaagcggactcataggaccactcctcatctgttacaaggaatctgtagaccagaggggtaaccagattatgagtgataaacgcaatgtgatcctttttagcgtcttcgacgagaaccggtcctggtacttgaccgagaatatacaaaggttccttcccaaccccgcaggcgttcagttggaagaccctgagtttcaggccagcaatattatgcactcaatcaacggctatgtgtttgatagtctccagctttctgtttgcctccatgaagtagcctattggtacatcttgtcaattggtgctcaaacagacttcctctccgtcttcttctccggctacacctttaagcacaagatggtgtatgaggacactctcacactctttccattttctggagaaaccgtgttcatgagcatggagaatccaggcctttggatcttgggttgccacaacagtgattttcgcaatcggggaatgactgctctcctcaaagtcagcagctgtgataagaacacaggcgactattacgaagattcttacgaggacataagtgcctacgtgttgtccaagaataacgccattgagcccagatcattctcccagaatcctcccgtgcttaaaaggcatcagcgcgaaatcaccagaactactcttcagtctgatcaagaggagattgactatgacgacaccataagcgtggaaatgaagaaggaggatttcgatatctatgacgaagatgagaaccagtctccgcggagctttcagaagaagacgcgacactacttcattgcagcagtcgaaaggctttgggactacggtatgtcatcatcccctcatgtgttgcgcaatagagctcagagtggaagtgttccacagttcaagaaagtcgtctttcaagagtttacagatggcagcttcacacagcctctctatcggggcgagcttaacgaacatttgggactccttggtccctatatccgagccgaagtggaggacaacattatggttacctttaggaatcaagcctctcgcccctacagcttctactcctccctcatcagttatgaggaggatcagagacaaggcgctgaaccacggaagaactttgtgaaaccgaatgagacgaagacctacttctggaaagtacagcaccacatggcccccacaaaagacgaattcgattgcaaagcatgggcgtatttttcagacgttgacttggagaaagatgtacattcaggacttattggtcctttgttggtgtgtcacactaacactctcaatccagcccatggcaggcaggtgacagtccaggaattcgctcttttctttaccatctttgatgagaccaagtcctggtacttcacggaaaacatggagcgcaattgcagagccccctgtaacatacagatggaggaccctacctttaaggaaaattatcggttccacgcaatcaacggatacattatggatacactccctggccttgtgatggctcaggaccaacgaatcaggtggtacctcctcagcatgggttctaatgagaacatacactccattcacttttcaggacatgtgttcactgtccggaagaaagaagagtataagatggccctctacaatttgtatccaggcgtgtttgagaccgttgaaatgcttccctctaaagctggcatctggagagtagagtgcttgatcggagaacatcttcacgcaggtatgagcaccttgttcctcgtgtacagcaacaaatgtcagaccccacttggcatggccagtggacacattcgcgactttcagatcacagcatctggccagtatggacaatgggccccaaagttggctcgcctccattactccggtagcataaatgcgtggtccactaaagaacctttcagctggattaaggtcgatcttcttgcccccatgatcatccacggcattaagacacagggagcgaggcagaaattctcctccctctacatctcacagttcattattatgtatagtttggacggcaagaagtggcaaacttatagaggtaacagtactggaacactcatggtgttcttcggcaacgttgatagctctggcatcaaacacaacatctttaatcctcccataatagctcggtacatcagattgcatccgacccactacagcattaggagtacactccgaatggagcttatgggttgcgacttgaattcctgttcaatgccactcggaatggagtctaaagccatctctgatgcacagataaccgccagtagctactttacgaacatgtttgctacgtggtcaccctctaaggcaaggcttcatttgcaaggccggtctaatgcctggagacctcaggtgaacaacccgaaagaatggctccaggtggactttcagaagaccatgaaagtaacaggtgtcactactcagggagttaagtccttggataccagcatgtatgtgaaggagttccttatttcctcatcacaagatggccaccagtggaccctcttctttcagaatggtaaggtcaaagtgtttcagggcaatcaagacagcttcacacccgtggtgaacagtcttgatcctccactcttgacacgataccttcgaatccatccacagtcttgggttcaccagattgcattgcgcatggaagtacttggatgcgaggctcaggacctctac

SEQ ID NO: 440 - protein, 1457 aa, synthetic construct
  REGION 1..1457: note = Variant of human B-domain deleted Factor VIII
MQIELSTCFFLCLLRFCFSATRRYYLGAVELSWDYMQSDLGELPVDARFPPRVPKSFPFNTSVVYKKTLFVEFTDHLFNIAKPRPPWMGLLGPTIQAEVYDTVVITLKNMASHPVSLHAVGVSYWKASEGAEYDDQTSQREKEDDKVFPGGSHTYVWQVLKENGPMASDPLCLTYSYLSHVDLVKDLNSGLIGALLVCREGSLAKEKTQTLHKFILLFAVFDEGKSWHSETKNSLMQDRDAASARAWPKMHTVNGYVNRSLPGLIGCHRKSVYWHVIGMGTTPEVHSIFLEGHTFLVRNHRQASLEISPITFLTAQTLLMDLGQFLLFCHISSHQHDGMEAYVKVDSCPEEPQLRMKNNEEAEDYDDDLTDSEMDVVRFDDDNSPSFIQIRSVAKKHPKTWVHYIAAEEEDWDYAPLVLAPDDRSYKSQYLNNGPQRIGRKYKKVRFMAYTDETFKTREAIQHESGILGPLLYGEVGDTLLIIFKNQASRPYNIYPHGITDVRPLYSRRLPKGVKHLKDFPILPGEIFKYKWTVTVEDGPTKSDPRCLTRYYSSFVNMERDLASGLIGPLLICYKESVDQRGNQIMSDKRNVILFSVFDENRSWYLTENIQRFLPNPAGVQLEDPEFQASNIMHSINGYVFDSLQLSVCLHEVAYWYILSIGAQTDFLSVFFSGYTFKHKMVYEDTLTLFPFSGETVFMSMENPGLWILGCHNSDFRNRGMTALLKVSSCDKNTGDYYEDSYEDISAYVLSKNNAIEPRSFSQNPPVLKRHQREITRTTLQSDQEEIDYDDTISVEMKKEDFDIYDEDENQSPRSFQKKTRHYFIAAVERLWDYGMSSSPHVLRNRAQSGSVPQFKKVVFQEFTDGSFTQPLYRGELNEHLGLLGPYIRAEVEDNIMVTFRNQASRPYSFYSSLISYEEDQRQGAEPRKNFVKPNETKTYFWKVQHHMAPTKDEFDCKAWAYFSDVDLEKDVHSGLIGPLLVCHTNTLNPAHGRQVTVQEFALFFTIFDETKSWYFTENMERNCRAPCNIQMEDPTFKENYRFHAINGYIMDTLPGLVMAQDQRIRWYLLSMGSNENIHSIHFSGHVFTVRKKEEYKMALYNLYPGVFETVEMLPSKAGIWRVECLIGEHLHAGMSTLFLVYSNKCQTPLGMASGHIRDFQITASGQYGQWAPKLARLHYSGSINAWSTKEPFSWIKVDLLAPMIIHGIKTQGARQKFSSLYISQFIIMYSLDGKKWQTYRGNSTGTLMVFFGNVDSSGIKHNIFNPPIIARYIRLHPTHYSIRSTLRMELMGCDLNSCSMPLGMESKAISDAQITASSYFTNMFATWSPSKARLHLQGRSNAWRPQVNNPKEWLQVDFQKTMKVTGVTTQGVKSLDTSMYVKEFLISSSQDGHQWTLFFQNGKVKVFQGNQDSFTPVVNSLDPPLLTRYLRIHPQSWVHQIALRMEVLGCEAQDLY

SEQ ID NO: 441 - DNA, 4371 bp, synthetic construct
  misc_feature 1..4371: note = Variant of human B-domain deleted Factor VIII
  source 1..4371: mol_type = other DNA
atgcagattgaactgtctacctgcttcttcctctgtttgctgaggttctgctttagcgccactagacggtactaccttggcgctgtggagctgtcctgggactatatgcagagtgatttgggagagcttcccgtcgacgcacgatttcctcctcgcgttccaaagtcatttcccttcaacacaagcgtggtgtacaagaagacgctcttcgtcgaattcaccgatcacctgttcaatatcgccaaacccagaccaccatggatgggtcttttggggcctaccatacaagcggaggtgtatgacacagttgttatcactctcaagaacatggcttctcatccggtaagtcttcacgcagtgggcgtgtcctactggaaagcttcagaaggagccgagtatgatgatcagacatcccagagggagaaagaagacgacaaggtatttccaggtgggtctcatacctatgtgtggcaagtgctcaaagagaatggccctatggcaagcgatccgctctgtttgacttacagctacctttcacacgttgacctcgtcaaggacctcaactccgggttgattggagccttgttggtatgcagggaaggatctcttgccaaagagaagacacagaccctccacaagtttatccttctctttgctgtgttcgatgagggcaaaagttggcatagcgaaacgaagaattccctcatgcaggatcgcgacgcagccagcgccagagcttggcccaagatgcacactgtgaacggatatgtcaataggtcacttcctggcttgattgggtgtcatcggaaaagtgtctactggcacgtgatcggaatggggacaacaccagaggtccactccatatttctcgaaggccataccttccttgttcgaaaccacagacaggcatccttggagatctctcccattacctttctcactgcccaaacgctccttatggacttgggtcagttccttctcttctgccatatcagctcacaccagcatgatggtatggaagcttatgtgaaagtcgacagttgtcctgaggagccacagttgcgcatgaagaataatgaagaagccgaggattacgacgacgatctcaccgattctgagatggacgtggtgaggtttgatgacgacaactctccctccttcattcaaatccggagcgtggcgaagaaacaccccaagacttgggtccactatatagcggcggaagaggaggattgggattacgctcctcttgtattggcaccagatgaccgctcatacaaaagccagtacctcaacaacggaccgcagagaattggccggaagtataagaaagtgcgatttatggcctatacagacgaaacctttaagacaagggaggccatccagcatgagagtgggattttgggacctcttctttacggcgaagttggtgataccctcctcatcatcttcaagaatcaagcttctcgcccctataacatttacccacacgggatcactgacgttaggcctttgtatagcagaagacttcccaaaggcgtgaagcatctcaaagacttccccattttgccaggcgagatctttaagtacaaatggaccgtcacagtggaagatggaccgactaaatcagaccctcgatgccttacgcggtactattcctccttcgtgaatatggagagagatttggcaagcggactcataggaccactcctcatctgttacaaggaatctgtagaccagaggggtaaccagattatgagtgataaacgcaatgtgatcctttttagcgtcttcgacgagaaccggtcctggtacttgaccgagaatatacaaaggttccttcccaaccccgcaggcgttcagttggaagaccctgagtttcaggccagcaatattatgcactcaatcaacggctatgtgtttgatagtctccagctttctgtttgcctccatgaagtagcctattggtacatcttgtcaattggtgctcaaacagacttcctctccgtcttcttctccggctacacctttaagcacaagatggtgtatgaggacactctcacactctttccattttctggagaaaccgtgttcatgagcatggagaatccaggcctttggatcttgggttgccacaacagtgattttcgcaatcggggaatgactgctctcctcaaagtcagcagctgtgataagaacacaggcgactattacgaagattcttacgaggacataagtgcctacttgttgtccaagaataacgccattgagcccagatcattctcccagaatcctcccgtgcttaaaaggcatcagcgcgaaatcaccagaactactcttcagtctgatcaagaggagattgactatgacgacaccataagcgtggaaatgaagaaggaggatttcgatatctatgacgaagatgagaaccagtctccgcggagctttcagaagaagacgcgacactacttcattgcagcagtcgaaaggctttgggactacggtatgtcatcatcccctcatgtgttgcgcaatagagctcagagtggaagtgttccacagttcaagaaagtcgtctttcaagagtttacagatggcagcttcacacagcctctctatcggggcgagcttaacgaacatttgggactccttggtccctatatccgagccgaagtggaggacaacattatggttacctttaggaatcaagcctctcgcccctacagcttctactcctccctcatcagttatgaggaggatcagagacaaggcgctgaaccacggaagaactttgtgaaaccgaatgagacgaagacctacttctggaaagtacagcaccacatggcccccacaaaagacgaattcgattgcaaagcatgggcgtatttttcagacgttgacttggagaaagatgtacattcaggacttattggtcctttgttggtgtgtcacactaacactctcaatccagcccatggcaggcaggtgacagtccaggaattcgctcttttctttaccatctttgatgagaccaagtcctggtacttcacggaaaacatggagcgcaattgcagagccccctgtaacatacagatggaggaccctacctttaaggaaaattatcggttccacgcaatcaacggatacattatggatacactccctggccttgtgatggctcaggaccaacgaatcaggtggtacctcctcagcatgggttctaatgagaacatacactccattcacttttcaggacatgtgttcactgtccggaagaaagaagagtataagatggccctctacaatttgtatccaggcgtgtttgagaccgttgaaatgcttccctctaaagctggcatctggagagtagagtgcttgatcggagaacatcttcacgcaggtatgagcaccttgttcctcgtgtacagcaacaaatgtcagaccccacttggcatggccagtggacacattcgcgactttcagatcacagcatctggccagtatggacaatgggccccaaagttggctcgcctccattactccggtagcataaatgcgtggtccactaaagaacctttcagctggattaaggtcgatcttcttgcccccatgatcatccacggcattaagacacagggagcgaggcagaaattctcctccctctacatctcacagttcattattatgtatagtttggacggcaagaagtggcaaacttatagaggtaacagtactggaacactcatggtgttcttcggcaacgttgatagctctggcatcaaacacaacatctttaatcctcccataatagctcggtacatcagattgcatccgacccactacagcattaggagtacactccgaatggagcttatgggttgcgacttgaattcctgttcaatgccactcggaatggagtctaaagccatctctgatgcacagataaccgccagtagctactttacgaacatgtttgctacgtggtcaccctctaaggcaaggcttcatttgcaaggccggtctaatgcctggagacctcaggtgaacaacccgaaagaatggctccaggtggactttcagaagaccatgaaagtaacaggtgtcactactcagggagttaagtccttggatgcgagcatgtatgtgaaggagttccttatttcctcatcacaagatggccaccagtggaccctcttctttcagaatggtaaggtcaaagtgtttcagggcaatcaagacagcttcacacccgtggtgaacagtcttgatcctccactcttgacacgataccttcgaatccatccacagtcttgggttcaccagattgcattgcgcatggaagtacttggatgcgaggctcaggacctctac

SEQ ID NO: 442 - protein, 1457 aa, synthetic construct
  REGION 1..1457: note = Variant of human B-domain deleted Factor VIII
MQIELSTCFFLCLLRFCFSATRRYYLGAVELSWDYMQSDLGELPVDARFPPRVPKSFPFNTSVVYKKTLFVEFTDHLFNIAKPRPPWMGLLGPTIQAEVYDTVVITLKNMASHPVSLHAVGVSYWKASEGAEYDDQTSQREKEDDKVFPGGSHTYVWQVLKENGPMASDPLCLTYSYLSHVDLVKDLNSGLIGALLVCREGSLAKEKTQTLHKFILLFAVFDEGKSWHSETKNSLMQDRDAASARAWPKMHTVNGYVNRSLPGLIGCHRKSVYWHVIGMGTTPEVHSIFLEGHTFLVRNHRQASLEISPITFLTAQTLLMDLGQFLLFCHISSHQHDGMEAYVKVDSCPEEPQLRMKNNEEAEDYDDDLTDSEMDVVRFDDDNSPSFIQIRSVAKKHPKTWVHYIAAEEEDWDYAPLVLAPDDRSYKSQYLNNGPQRIGRKYKKVRFMAYTDETFKTREAIQHESGILGPLLYGEVGDTLLIIFKNQASRPYNIYPHGITDVRPLYSRRLPKGVKHLKDFPILPGEIFKYKWTVTVEDGPTKSDPRCLTRYYSSFVNMERDLASGLIGPLLICYKESVDQRGNQIMSDKRNVILFSVFDENRSWYLTENIQRFLPNPAGVQLEDPEFQASNIMHSINGYVFDSLQLSVCLHEVAYWYILSIGAQTDFLSVFFSGYTFKHKMVYEDTLTLFPFSGETVFMSMENPGLWILGCHNSDFRNRGMTALLKVSSCDKNTGDYYEDSYEDISAYLLSKNNAIEPRSFSQNPPVLKRHQREITRTTLQSDQEEIDYDDTISVEMKKEDFDIYDEDENQSPRSFQKKTRHYFIAAVERLWDYGMSSSPHVLRNRAQSGSVPQFKKVVFQEFTDGSFTQPLYRGELNEHLGLLGPYIRAEVEDNIMVTFRNQASRPYSFYSSLISYEEDQRQGAEPRKNFVKPNETKTYFWKVQHHMAPTKDEFDCKAWAYFSDVDLEKDVHSGLIGPLLVCHTNTLNPAHGRQVTVQEFALFFTIFDETKSWYFTENMERNCRAPCNIQMEDPTFKENYRFHAINGYIMDTLPGLVMAQDQRIRWYLLSMGSNENIHSIHFSGHVFTVRKKEEYKMALYNLYPGVFETVEMLPSKAGIWRVECLIGEHLHAGMSTLFLVYSNKCQTPLGMASGHIRDFQITASGQYGQWAPKLARLHYSGSINAWSTKEPFSWIKVDLLAPMIIHGIKTQGARQKFSSLYISQFIIMYSLDGKKWQTYRGNSTGTLMVFFGNVDSSGIKHNIFNPPIIARYIRLHPTHYSIRSTLRMELMGCDLNSCSMPLGMESKAISDAQITASSYFTNMFATWSPSKARLHLQGRSNAWRPQVNNPKEWLQVDFQKTMKVTGVTTQGVKSLDASMYVKEFLISSSQDGHQWTLFFQNGKVKVFQGNQDSFTPVVNSLDPPLLTRYLRIHPQSWVHQIALRMEVLGCEAQDLY

SEQ ID NO: 443 - DNA, 4371 bp, synthetic construct
  misc_feature 1..4371: note = Variant of human B-domain deleted Factor VIII
  source 1..4371: mol_type = other DNA
atgcagattgaactgtctacctgcttcttcctctgtttgctgaggttctgctttagcgccactagacggtactaccttggcgctgtggagctgtcctgggactatatgcagagtgatttgggagagcttcccgtcgacgcacgatttcctcctcgcgttccaaagtcatttcccttcaacacaagcgtggtgtacaagaagacgctcttcgtcgaattcaccgatcacctgttcaatatcgccaaacccagaccaccatggatgggtcttttggggcctaccatacaagcggaggtgtatgacacagttgttatcactctcaagaacatggcttctcatccggtaagtcttcacgcagtgggcgtgtcctactggaaagcttcagaaggagccgagtatgatgatcagacatcccagagggagaaagaagacgacaaggtatttccaggtgggtctcatacctatgtgtggcaagtgctcaaagagaatggccctatggcaagcgatccgctctgtttgacttacagctacctttcacacgttgacctcgtcaaggacctcaactccgggttgattggagccttgttggtatgcagggaaggatctcttgccaaagagaagacacagaccctccacaagtttatccttctctttgctgtgttcgatgagggcaaaagttggcatagcgaaacgaagaattccctcatgcaggatcgcgacgcagccagcgccagagcttggcccaagatgcacactgtgaacggatatgtcaataggtcacttcctggcttgattgggtgtcatcggaaaagtgtctactggcacgtgatcggaatggggacaacaccagaggtccactccatatttctcgaaggccataccttccttgttcgaaaccacagacaggcatccttggagatctctcccattacctttctcactgcccaaacgctccttatggacttgggtcagttccttctcttctgccatatcagctcacaccagcatgatggtatggaagcttatgtgaaagtcgacagttgtcctgaggagccacagttgcgcatgaagaataatgaagaagccgaggattacgacgacgatctcaccgattctgagatggacgtggtgaggtttgatgacgacaactctccctccttcattcaaatccggagcgtggcgaagaaacaccccaagacttgggtccactatatagcggcggaagaggaggattgggattacgctcctcttgtattggcaccagatgaccgctcatacaaaagccagtacctcaacaacggaccgcagagaattggccggaagtataagaaagtgcgatttatggcctatacagacgaaacctttaagacaagggaggccatccagcatgagagtgggattttgggacctcttctttacggcgaagttggtgataccctcctcatcatcttcaagaatcaagcttctcgcccctataacatttacccacacgggatcactgacgttaggcctttgtatagcagaagacttcccaaaggcgtgaagcatctcaaagacttccccattttgccaggcgagatctttaagtacaaatggaccgtcacagtggaagatggaccgactaaatcagaccctcgatgccttacgcggtactattcctccttcgtgaatatggagagagatttggcaagcggactcataggaccactcctcatctgttacaaggaatctgtagaccagaggggtaaccagattatgagtgataaacgcaatgtgatcctttttagcgtcttcgacgagaaccggtcctggtacttgaccgagaatatacaaaggttccttcccaaccccgcaggcgttcagttggaagaccctgagtttcaggccagcaatattatgcactcaatcaacggctatgtgtttgatagtctccagctttctgtttgcctccatgaagtagcctattggtacatcttgtcaattggtgctcaaacagacttcctctccgtcttcttctccggctacacctttaagcacaagatggtgtatgaggacactctcacactctttccattttctggagaaaccgtgttcatgagcatggagaatccaggcctttggatcttgggttgccacaacagtgattttcgcaatcggggaatgactgctctcctcaaagtcagcagctgtgataagaacacaggcgactattacgaagattcttacgaggacataagtgcctacttggtgtccaagaataacgccattgagcccagatcattctcccagaatcctcccgtgcttaaaaggcatcagcgcgaaatcaccagaactactcttcagtctgatcaagaggagattgactatgacgacaccataagcgtggaaatgaagaaggaggatttcgatatctatgacgaagatgagaaccagtctccgcggagctttcagaagaagacgcgacactacttcattgcagcagtcgaaaggctttgggactacggtatgtcatcatcccctcatgtgttgcgcaatagagctcagagtggaagtgttccacagttcaagaaagtcgtctttcaagagtttacagatggcagcttcacacagcctctctatcggggcgagcttaacgaacatttgggactccttggtccctatatccgagccgaagtggaggacaacattatggttacctttaggaatcaagcctctcgcccctacagcttctactcctccctcatcagttatgaggaggatcagagacaaggcgctgaaccacggaagaactttgtgaaaccgaatgagacgaagacctacttctggaaagtacagcaccacatggcccccacaaaagacgaattcgattgcaaagcatgggcgtatttttcagacgttgacttggagaaagatgtacattcaggacttattggtcctttgttggtgtgtcacactaacactctcaatccagcccatggcaggcaggtgacagtccaggaattcgctcttttctttaccatctttgatgagaccaagtcctggtacttcacggaaaacatggagcgcaattgcagagccccctgtaacatacagatggaggaccctacctttaaggaaaattatcggttccacgcaatcaacggatacattatggatacactccctggccttgtgatggctcaggaccaacgaatcaggtggtacctcctcagcatgggttctaatgagaacatacactccattcacttttcaggacatgtgttcactgtccggaagaaagaagagtataagatggccctctacaatttgtatccaggcgtgtttgagaccgttgaaatgcttccctctaaagctggcatctggagagtagagtgcttgatcggagaacatcttcacgcaggtatgagcaccttgttcctcgtgtacagcaacaaatgtcagaccccacttggcatggccagtggacacattcgcgactttcagatcacagcatctggccagtatggacaatgggccccaaagttggctcgcctccattactccggtagcataaatgcgtggtccactaaagaacctttcagctggattaaggtcgatcttcttgcccccatgatcatccacggcattaagacacagggagcgaggcagaaattctcctccctctacatctcacagttcattattatgtatagtttggacggcaagaagtggcaaacttatagaggtaacagtactggaacactcatggtgttcttcggcaacgttgatagctctggcatcaaacacaacatctttaatcctcccataatagctcggtacatcagattgcatccgacccactacagcattaggagtacactccgaatggagcttatgggttgcgacttgaattcctgttcaatgccactcggaatggagtctaaagccatctctgatgcacagataaccgccagtagctactttacgaacatgtttgctacgtggtcaccctctaaggcaaggcttcatttgcaaggccggtctaatgcctggagacctcaggtgaacaacccgaaagaatggctccaggtggactttcagaagaccatgaaagtaacaggtgtcactactcagggagttaagtccttggataccagcatgtatgtgaaggagttccttatttcctcatcacaagatggccaccagtggaccctcttctttcagaatggtaaggtcaaagtgtttcagggcaatcaagacagcttcacacccgtggtgaacagtcttgatcctccactcttgacacgataccttcgaatccatccacagtcttgggttcaccagattgcattgcgcatggaagtacttggatgcgaggctcaggacctctac

SEQ ID NO: 444 - protein, 1457 aa, synthetic construct
  REGION 1..1457: note = Variant of human B-domain deleted Factor VIII
MQIELSTCFFLCLLRFCFSATRRYYLGAVELSWDYMQSDLGELPVDARFPPRVPKSFPFNTSVVYKKTLFVEFTDHLFNIAKPRPPWMGLLGPTIQAEVYDTVVITLKNMASHPVSLHAVGVSYWKASEGAEYDDQTSQREKEDDKVFPGGSHTYVWQVLKENGPMASDPLCLTYSYLSHVDLVKDLNSGLIGALLVCREGSLAKEKTQTLHKFILLFAVFDEGKSWHSETKNSLMQDRDAASARAWPKMHTVNGYVNRSLPGLIGCHRKSVYWHVIGMGTTPEVHSIFLEGHTFLVRNHRQASLEISPITFLTAQTLLMDLGQFLLFCHISSHQHDGMEAYVKVDSCPEEPQLRMKNNEEAEDYDDDLTDSEMDVVRFDDDNSPSFIQIRSVAKKHPKTWVHYIAAEEEDWDYAPLVLAPDDRSYKSQYLNNGPQRIGRKYKKVRFMAYTDETFKTREAIQHESGILGPLLYGEVGDTLLIIFKNQASRPYNIYPHGITDVRPLYSRRLPKGVKHLKDFPILPGEIFKYKWTVTVEDGPTKSDPRCLTRYYSSFVNMERDLASGLIGPLLICYKESVDQRGNQIMSDKRNVILFSVFDENRSWYLTENIQRFLPNPAGVQLEDPEFQASNIMHSINGYVFDSLQLSVCLHEVAYWYILSIGAQTDFLSVFFSGYTFKHKMVYEDTLTLFPFSGETVFMSMENPGLWILGCHNSDFRNRGMTALLKVSSCDKNTGDYYEDSYEDISAYLVSKNNAIEPRSFSQNPPVLKRHQREITRTTLQSDQEEIDYDDTISVEMKKEDFDIYDEDENQSPRSFQKKTRHYFIAAVERLWDYGMSSSPHVLRNRAQSGSVPQFKKVVFQEFTDGSFTQPLYRGELNEHLGLLGPYIRAEVEDNIMVTFRNQASRPYSFYSSLISYEEDQRQGAEPRKNFVKPNETKTYFWKVQHHMAPTKDEFDCKAWAYFSDVDLEKDVHSGLIGPLLVCHTNTLNPAHGRQVTVQEFALFFTIFDETKSWYFTENMERNCRAPCNIQMEDPTFKENYRFHAINGYIMDTLPGLVMAQDQRIRWYLLSMGSNENIHSIHFSGHVFTVRKKEEYKMALYNLYPGVFETVEMLPSKAGIWRVECLIGEHLHAGMSTLFLVYSNKCQTPLGMASGHIRDFQITASGQYGQWAPKLARLHYSGSINAWSTKEPFSWIKVDLLAPMIIHGIKTQGARQKFSSLYISQFIIMYSLDGKKWQTYRGNSTGTLMVFFGNVDSSGIKHNIFNPPIIARYIRLHPTHYSIRSTLRMELMGCDLNSCSMPLGMESKAISDAQITASSYFTNMFATWSPSKARLHLQGRSNAWRPQVNNPKEWLQVDFQKTMKVTGVTTQGVKSLDTSMYVKEFLISSSQDGHQWTLFFQNGKVKVFQGNQDSFTPVVNSLDPPLLTRYLRIHPQSWVHQIALRMEVLGCEAQDLY

SEQ ID NO: 445 - DNA, 4371 bp, synthetic construct
  misc_feature 1..4371: note = Variant of human B-domain deleted Factor VIII
  source 1..4371: mol_type = other DNA
atgcagattgaactgtctacctgcttcttcctctgtttgctgaggttctgctttagcgccactagacggtactaccttggcgctgtggagctgtcctgggactatatgcagagtgatttgggagagcttcccgtcgacgcacgatttcctcctcgcgttccaaagtcatttcccttcaacacaagcgtggtgtacaagaagacgctcttcgtcgaattcaccgatcacctgttcaatatcgccaaacccagaccaccatggatgggtcttttggggcctaccatacaagcggaggtgtatgacacagttgttatcactctcaagaacatggcttctcatccggtaagtcttcacgcagtgggcgtgtcctactggaaagcttcagaaggagccgagtatgatgatcagacatcccagagggagaaagaagacgacaaggtatttccaggtgggtctcatacctatgtgtggcaagtgctcaaagagaatggccctatggcaagcgatccgctctgtttgacttacagctacctttcacacgttgacctcgtcaaggacctcaactccgggttgattggagccttgttggtatgcagggaaggatctcttgccaaagagaagacacagaccctccacaagtttatccttctctttgctgtgttcgatgagggcaaaagttggcatagcgaaacgaagaattccctcatgcaggatcgcgacgcagccagcgccagagcttggcccaagatgcacactgtgaacggatatgtcaataggtcacttcctggcttgattgggtgtcatcggaaaagtgtctactggcacgtgatcggaatggggacaacaccagaggtccactccatatttctcgaaggccataccttccttgttcgaaaccacagacaggcatccttggagatctctcccattacctttctcactgcccaaacgctccttatggacttgggtcagttccttctcttctgccatatcagctcacaccagcatgatggtatggaagcttatgtgaaagtcgacagttgtcctgaggagccacagttgcgcatgaagaataatgaagaagccgaggattacgacgacgatctcaccgattctgagatggacgtggtgaggtttgatgacgacaactctccctccacgattcaaatccggagcgtggcgaagaaacaccccaagacttgggtccactatatagcggcggaagaggaggattgggattacgctcctcttgtattggcaccagatgaccgctcatacaaaagccagtacctcaacaacggaccgcagagaattggccggaagtataagaaagtgcgatttatggcctatacagacgaaacctttaagacaagggaggccatccagcatgagagtgggattttgggacctcttctttacggcgaagttggtgataccctcctcatcatcttcaagaatcaagcttctcgcccctataacatttacccacacgggatcactgacgttaggcctttgtatagcagaagacttcccaaaggcgtgaagcatctcaaagacttccccattttgccaggcgagatctttaagtacaaatggaccgtcacagtggaagatggaccgactaaatcagaccctcgatgccttacgcggtactattcctccttcgtgaatatggagagagatttggcaagcggactcataggaccactcctcatctgttacaaggaatctgtagaccagaggggtaaccagattatgagtgataaacgcaatgtgatcctttttagcgtcttcgacgagaaccggtcctggtacttgaccgagaatatacaaaggttccttcccaaccccgcaggcgttcagttggaagaccctgagtttcaggccagcaatattatgcactcaatcaacggctatgtgtttgatagtctccagctttctgtttgcctccatgaagtagcctattggtacatcttgtcaattggtgctcaaacagacttcctctccgtcttcttctccggctacacctttaagcacaagatggtgtatgaggacactctcacactctttccattttctggagaaaccgtgttcatgagcatggagaatccaggcctttggatcttgggttgccacaacagtgattttcgcaatcggggaatgactgctctcctcaaagtcagcagctgtgataagaacacaggcgactattacgaagattcttacgaggacataagtgcctacttgttgtccaagaataacgccattgagcccagatcattctcccagaatcctcccgtgcttaaaaggcatcagcgcgaaatcaccagaactactcttcagtctgatcaagaggagattgactatgacgacaccataagcgtggaaatgaagaaggaggatttcgatatctatgacgaagatgagaaccagtctccgcggagctttcagaagaagacgcgacactacttcattgcagcagtcgaaaggctttgggactacggtatgtcatcatcccctcatgtgttgcgcaatagagctcagagtggaagtgttccacagttcaagaaagtcgtctttcaagagtttacagatggcagcttcacacagcctctctatcggggcgagcttaacgaacatttgggactccttggtccctatatccgagccgaagtggaggacaacattatggttacctttaggaatcaagcctctcgcccctacagcttctactcctccctcatcagttatgaggaggatcagagacaaggcgctgaaccacggaagaactttgtgaaaccgaatgagacgaagacctacttctggaaagtacagcaccacatggcccccacaaaagacgaattcgattgcaaagcatgggcgtatttttcagacgttgacttggagaaagatgtacattcaggacttattggtcctttgttggtgtgtcacactaacactctcaatccagcccatggcaggcaggtgacagtccaggaattcgctcttttctttaccatctttgatgagaccaagtcctggtacttcacggaaaacatggagcgcaattgcagagccccctgtaacatacagatggaggaccctacctttaaggaaaattatcggttccacgcaatcaacggatacattatggatacactccctggccttgtgatggctcaggaccaacgaatcaggtggtacctcctcagcatgggttctaatgagaacatacactccattcacttttcaggacatgtgttcactgtccggaagaaagaagagtataagatggccctctacaatttgtatccaggcgtgtttgagaccgttgaaatgcttccctctaaagctggcatctggagagtagagtgcttgatcggagaacatcttcacgcaggtatgagcaccttgttcctcgtgtacagcaacaaatgtcagaccccacttggcatggccagtggacacattcgcgactttcagatcacagcatctggccagtatggacaatgggccccaaagttggctcgcctccattactccggtagcataaatgcgtggtccactaaagaacctttcagctggattaaggtcgatcttcttgcccccatgatcatccacggcattaagacacagggagcgaggcagaaattctcctccctctacatctcacagttcattattatgtatagtttggacggcaagaagtggcaaacttatagaggtaacagtactggaacactcatggtgttcttcggcaacgttgatagctctggcatcaaacacaacatctttaatcctcccataatagctcggtacatcagattgcatccgacccactacagcattaggagtacactccgaatggagcttatgggttgcgacttgaattcctgttcaatgccactcggaatggagtctaaagccatctctgatgcacagataaccgccagtagctactttacgaacatgtttgctacgtggtcaccctctaaggcaaggcttcatttgcaaggccggtctaatgcctggagacctcaggtgaacaacccgaaagaatggctccaggtggactttcagaagaccatgaaagtaacaggtgtcactactcagggagttaagtccttggataccagcatgtatgtgaaggagttccttatttcctcatcacaagatggccaccagtggaccctcttctttcagaatggtaaggtcaaagtgtttcagggcaatcaagacagcttcacacccgtggtgaacagtcttgatcctccactcttgacacgataccttcgaatccatccacagtcttgggttcaccagattgcattgcgcatggaagtacttggatgcgaggctcaggacctctac

SEQ ID NO: 446 - protein, 1457 aa, synthetic construct
  REGION 1..1457: note = Variant of human B-domain deleted Factor VIII
MQIELSTCFFLCLLRFCFSATRRYYLGAVELSWDYMQSDLGELPVDARFPPRVPKSFPFNTSVVYKKTLFVEFTDHLFNIAKPRPPWMGLLGPTIQAEVYDTVVITLKNMASHPVSLHAVGVSYWKASEGAEYDDQTSQREKEDDKVFPGGSHTYVWQVLKENGPMASDPLCLTYSYLSHVDLVKDLNSGLIGALLVCREGSLAKEKTQTLHKFILLFAVFDEGKSWHSETKNSLMQDRDAASARAWPKMHTVNGYVNRSLPGLIGCHRKSVYWHVIGMGTTPEVHSIFLEGHTFLVRNHRQASLEISPITFLTAQTLLMDLGQFLLFCHISSHQHDGMEAYVKVDSCPEEPQLRMKNNEEAEDYDDDLTDSEMDVVRFDDDNSPSTIQIRSVAKKHPKTWVHYIAAEEEDWDYAPLVLAPDDRSYKSQYLNNGPQRIGRKYKKVRFMAYTDETFKTREAIQHESGILGPLLYGEVGDTLLIIFKNQASRPYNIYPHGITDVRPLYSRRLPKGVKHLKDFPILPGEIFKYKWTVTVEDGPTKSDPRCLTRYYSSFVNMERDLASGLIGPLLICYKESVDQRGNQIMSDKRNVILFSVFDENRSWYLTENIQRFLPNPAGVQLEDPEFQASNIMHSINGYVFDSLQLSVCLHEVAYWYILSIGAQTDFLSVFFSGYTFKHKMVYEDTLTLFPFSGETVFMSMENPGLWILGCHNSDFRNRGMTALLKVSSCDKNTGDYYEDSYEDISAYLLSKNNAIEPRSFSQNPPVLKRHQREITRTTLQSDQEEIDYDDTISVEMKKEDFDIYDEDENQSPRSFQKKTRHYFIAAVERLWDYGMSSSPHVLRNRAQSGSVPQFKKVVFQEFTDGSFTQPLYRGELNEHLGLLGPYIRAEVEDNIMVTFRNQASRPYSFYSSLISYEEDQRQGAEPRKNFVKPNETKTYFWKVQHHMAPTKDEFDCKAWAYFSDVDLEKDVHSGLIGPLLVCHTNTLNPAHGRQVTVQEFALFFTIFDETKSWYFTENMERNCRAPCNIQMEDPTFKENYRFHAINGYIMDTLPGLVMAQDQRIRWYLLSMGSNENIHSIHFSGHVFTVRKKEEYKMALYNLYPGVFETVEMLPSKAGIWRVECLIGEHLHAGMSTLFLVYSNKCQTPLGMASGHIRDFQITASGQYGQWAPKLARLHYSGSINAWSTKEPFSWIKVDLLAPMIIHGIKTQGARQKFSSLYISQFIIMYSLDGKKWQTYRGNSTGTLMVFFGNVDSSGIKHNIFNPPIIARYIRLHPTHYSIRSTLRMELMGCDLNSCSMPLGMESKAISDAQITASSYFTNMFATWSPSKARLHLQGRSNAWRPQVNNPKEWLQVDFQKTMKVTGVTTQGVKSLDTSMYVKEFLISSSQDGHQWTLFFQNGKVKVFQGNQDSFTPVVNSLDPPLLTRYLRIHPQSWVHQIALRMEVLGCEAQDLY

SEQ ID NO: 447 - DNA, 4371 bp, synthetic construct
  misc_feature 1..4371: note = Variant of human B-domain deleted Factor VIII
  source 1..4371: mol_type = other DNA
atgcagattgaactgtctacctgcttcttcctctgtttgctgaggttctgctttagcgccactagacggtactaccttggcgctgtggagctgtcctgggactatatgcagagtgatttgggagagcttcccgtcgacgcacgatttcctcctcgcgttccaaagtcatttcccttcaacacaagcgtggtgtacaagaagacgctcttcgtcgaattcaccgatcacctgttcaatatcgccaaacccagaccaccatggatgggtcttttggggcctaccatacaagcggaggtgtatgacacagttgttatcactctcaagaacatggcttctcatccggtaagtcttcacgcagtgggcgtgtcctactggaaagcttcagaaggagccgagtatgatgatcagacatcccagagggagaaagaagacgacaaggtatttccaggtgggtctcatacctatgtgtggcaagtgctcaaagagaatggccctatggcaagcgatccgctctgtttgacttacagctacctttcacacgttgacctcgtcaaggacctcaactccgggttgattggagccttgttggtatgcagggaaggatctcttgccaaagagaagacacagaccctccacaagtttatccttctctttgctgtgttcgatgagggcaaaagttggcatagcgaaacgaagaattccctcatgcaggatcgcgacgcagccagcgccagagcttggcccaagatgcacactgtgaacggatatgtcaataggtcacttcctggcttgattgggtgtcatcggaaaagtgtctactggcacgtgatcggaatggggacaacaccagaggtccactccatatttctcgaaggccataccttccttgttcgaaaccacagacaggcatccttggagatctctcccattacctttctcactgcccaaacgctccttatggacttgggtcagttccttctcttctgccatatcagctcacaccagcatgatggtatggaagcttatgtgaaagtcgacagttgtcctgaggagccacagttgcgcatgaagaataatgaagaagccgaggattacgacgacgatctcaccgattctgagatggacgtggtgaggtttgatgacgacaactctccctcccagattcaaatccggagcgtggcgaagaaacaccccaagacttgggtccactatatagcggcggaagaggaggattgggattacgctcctcttgtattggcaccagatgaccgctcatacaaaagccagtacctcaacaacggaccgcagagaattggccggaagtataagaaagtgcgatttatggcctatacagacgaaacctttaagacaagggaggccatccagcatgagagtgggattttgggacctcttctttacggcgaagttggtgataccctcctcatcatcttcaagaatcaagcttctcgcccctataacatttacccacacgggatcactgacgttaggcctttgtatagcagaagacttcccaaaggcgtgaagcatctcaaagacttccccattttgccaggcgagatctttaagtacaaatggaccgtcacagtggaagatggaccgactaaatcagaccctcgatgccttacgcggtactattcctccttcgtgaatatggagagagatttggcaagcggactcataggaccactcctcatctgttacaaggaatctgtagaccagaggggtaaccagattatgagtgataaacgcaatgtgatcctttttagcgtcttcgacgagaaccggtcctggtacttgaccgagaatatacaaaggttccttcccaaccccgcaggcgttcagttggaagaccctgagtttcaggccagcaatattatgcactcaatcaacggctatgtgtttgatagtctccagctttctgtttgcctccatgaagtagcctattggtacatcttgtcaattggtgctcaaacagacttcctctccgtcttcttctccggctacacctttaagcacaagatggtgtatgaggacactctcacactctttccattttctggagaaaccgtgttcatgagcatggagaatccaggcctttggatcttgggttgccacaacagtgattttcgcaatcggggaatgactgctctcctcaaagtcagcagctgtgataagaacacaggcgactattacgaagattcttacgaggacataagtgcctacttgttgtccaagaataacgccattgagcccagatcattctcccagaatcctcccgtgcttaaaaggcatcagcgcgaaatcaccagaactactcttcagtctgatcaagaggagattgactatgacgacaccataagcgtggaaatgaagaaggaggatttcgatatctatgacgaagatgagaaccagtctccgcggagctttcagaagaagacgcgacactacttcattgcagcagtcgaaaggctttgggactacggtatgtcatcatcccctcatgtgttgcgcaatagagctcagagtggaagtgttccacagttcaagaaagtcgtctttcaagagtttacagatggcagcttcacacagcctctctatcggggcgagcttaacgaacatttgggactccttggtccctatatccgagccgaagtggaggacaacattatggttacctttaggaatcaagcctctcgcccctacagcttctactcctccctcatcagttatgaggaggatcagagacaaggcgctgaaccacggaagaactttgtgaaaccgaatgagacgaagacctacttctggaaagtacagcaccacatggcccccacaaaagacgaattcgattgcaaagcatgggcgtatttttcagacgttgacttggagaaagatgtacattcaggacttattggtcctttgttggtgtgtcacactaacactctcaatccagcccatggcaggcaggtgacagtccaggaattcgctcttttctttaccatctttgatgagaccaagtcctggtacttcacggaaaacatggagcgcaattgcagagccccctgtaacatacagatggaggaccctacctttaaggaaaattatcggttccacgcaatcaacggatacattatggatacactccctggccttgtgatggctcaggaccaacgaatcaggtggtacctcctcagcatgggttctaatgagaacatacactccattcacttttcaggacatgtgttcactgtccggaagaaagaagagtataagatggccctctacaatttgtatccaggcgtgtttgagaccgttgaaatgcttccctctaaagctggcatctggagagtagagtgcttgatcggagaacatcttcacgcaggtatgagcaccttgttcctcgtgtacagcaacaaatgtcagaccccacttggcatggccagtggacacattcgcgactttcagatcacagcatctggccagtatggacaatgggccccaaagttggctcgcctccattactccggtagcataaatgcgtggtccactaaagaacctttcagctggattaaggtcgatcttcttgcccccatgatcatccacggcattaagacacagggagcgaggcagaaattctcctccctctacatctcacagttcattattatgtatagtttggacggcaagaagtggcaaacttatagaggtaacagtactggaacactcatggtgttcttcggcaacgttgatagctctggcatcaaacacaacatctttaatcctcccataatagctcggtacatcagattgcatccgacccactacagcattaggagtacactccgaatggagcttatgggttgcgacttgaattcctgttcaatgccactcggaatggagtctaaagccatctctgatgcacagataaccgccagtagctactttacgaacatgtttgctacgtggtcaccctctaaggcaaggcttcatttgcaaggccggtctaatgcctggagacctcaggtgaacaacccgaaagaatggctccaggtggactttcagaagaccatgaaagtaacaggtgtcactactcagggagttaagtccttggataccagcatgtatgtgaaggagttccttatttcctcatcacaagatggccaccagtggaccctcttctttcagaatggtaaggtcaaagtgtttcagggcaatcaagacagcttcacacccgtggtgaacagtcttgatcctccactcttgacacgataccttcgaatccatccacagtcttgggttcaccagattgcattgcgcatggaagtacttggatgcgaggctcaggacctctac

SEQ ID NO: 448 - protein, 1457 aa, synthetic construct
  REGION 1..1457: note = Variant of human B-domain deleted Factor VIII
MQIELSTCFFLCLLRFCFSATRRYYLGAVELSWDYMQSDLGELPVDARFPPRVPKSFPFNTSVVYKKTLFVEFTDHLFNIAKPRPPWMGLLGPTIQAEVYDTVVITLKNMASHPVSLHAVGVSYWKASEGAEYDDQTSQREKEDDKVFPGGSHTYVWQVLKENGPMASDPLCLTYSYLSHVDLVKDLNSGLIGALLVCREGSLAKEKTQTLHKFILLFAVFDEGKSWHSETKNSLMQDRDAASARAWPKMHTVNGYVNRSLPGLIGCHRKSVYWHVIGMGTTPEVHSIFLEGHTFLVRNHRQASLEISPITFLTAQTLLMDLGQFLLFCHISSHQHDGMEAYVKVDSCPEEPQLRMKNNEEAEDYDDDLTDSEMDVVRFDDDNSPSQIQIRSVAKKHPKTWVHYIAAEEEDWDYAPLVLAPDDRSYKSQYLNNGPQRIGRKYKKVRFMAYTDETFKTREAIQHESGILGPLLYGEVGDTLLIIFKNQASRPYNIYPHGITDVRPLYSRRLPKGVKHLKDFPILPGEIFKYKWTVTVEDGPTKSDPRCLTRYYSSFVNMERDLASGLIGPLLICYKESVDQRGNQIMSDKRNVILFSVFDENRSWYLTENIQRFLPNPAGVQLEDPEFQASNIMHSINGYVFDSLQLSVCLHEVAYWYILSIGAQTDFLSVFFSGYTFKHKMVYEDTLTLFPFSGETVFMSMENPGLWILGCHNSDFRNRGMTALLKVSSCDKNTGDYYEDSYEDISAYLLSKNNAIEPRSFSQNPPVLKRHQREITRTTLQSDQEEIDYDDTISVEMKKEDFDIYDEDENQSPRSFQKKTRHYFIAAVERLWDYGMSSSPHVLRNRAQSGSVPQFKKVVFQEFTDGSFTQPLYRGELNEHLGLLGPYIRAEVEDNIMVTFRNQASRPYSFYSSLISYEEDQRQGAEPRKNFVKPNETKTYFWKVQHHMAPTKDEFDCKAWAYFSDVDLEKDVHSGLIGPLLVCHTNTLNPAHGRQVTVQEFALFFTIFDETKSWYFTENMERNCRAPCNIQMEDPTFKENYRFHAINGYIMDTLPGLVMAQDQRIRWYLLSMGSNENIHSIHFSGHVFTVRKKEEYKMALYNLYPGVFETVEMLPSKAGIWRVECLIGEHLHAGMSTLFLVYSNKCQTPLGMASGHIRDFQITASGQYGQWAPKLARLHYSGSINAWSTKEPFSWIKVDLLAPMIIHGIKTQGARQKFSSLYISQFIIMYSLDGKKWQTYRGNSTGTLMVFFGNVDSSGIKHNIFNPPIIARYIRLHPTHYSIRSTLRMELMGCDLNSCSMPLGMESKAISDAQITASSYFTNMFATWSPSKARLHLQGRSNAWRPQVNNPKEWLQVDFQKTMKVTGVTTQGVKSLDTSMYVKEFLISSSQDGHQWTLFFQNGKVKVFQGNQDSFTPVVNSLDPPLLTRYLRIHPQSWVHQIALRMEVLGCEAQDLY

SEQ ID NO: 449 - DNA, 4371 bp, synthetic construct
  misc_feature 1..4371: note = Variant of human B-domain deleted Factor VIII
  source 1..4371: mol_type = other DNA
atgcagattgaactgtctacctgcttcttcctctgtttgctgaggttctgctttagcgccactagacggtactaccttggcgctgtggagctgtcctgggactatatgcagagtgatttgggagagcttcccgtcgacgcacgatttcctcctcgcgttccaaagtcatttcccttcaacacaagcgtggtgtacaagaagacgctcttcgtcgaattcaccgatcacctgttcaatatcgccaaacccagaccaccatggatgggtcttttggggcctaccatacaagcggaggtgtatgacacagttgttatcactctcaagaacatggcttctcatccggtaagtcttcacgcagtgggcgtgtcctactggaaagcttcagaaggagccgagtatgatgatcagacatcccagagggagaaagaagacgacaaggtatttccaggtgggtctcatacctatgtgtggcaagtgctcaaagagaatggccctatggcaagcgatccgctctgtttgacttacagctacctttcacacgttgacctcgtcaaggacctcaactccgggttgattggagccttgttggtatgcagggaaggatctcttgccaaagagaagacacagaccctccacaagtttatccttctctttgctgtgttcgatgagggcaaaagttggcatagcgaaacgaagaattccctcatgcaggatcgcgacgcagccagcgccagagcttggcccaagatgcacactgtgaacggatatgtcaataggtcacttcctggcttgattgggtgtcatcggaaaagtgtctactggcacgtgatcggaatggggacaacaccagaggtccactccatatttctcgaaggccataccttccttgttcgaaaccacagacaggcatccttggagatctctcccattacctttctcactgcccaaacgctccttatggacttgggtcagttccttctcttctgccatatcagctcacaccagcatgatggtatggaagcttatgtgaaagtcgacagttgtcctgaggagccacagttgcgcatgaagaataatgaagaagccgaggattacgacgacgatctcaccgattctgagatggacgtggtgaggtttgatgacgacaactctccctccttcattcaaatccggagcgtggcgaagaaacaccccaagacttgggtccactatatagcggcggaagaggaggattgggattacgctcctcttgtattggcaccagatgaccgctcatacaaaagccagtacctcaacaacggaccgcagagaattggccggaagtataagaaagtgcgatttatggcctatacagacgaaacctttaagacaagggaggccatccagcatgagagtgggattttgggacctcttctttacggcgaagttggtgataccctcctcatcatcttcaagaatcaagcttctcgcccctataacatttacccacacgggatcactgacgttaggcctttgtatagcagaagacttcccaaaggcgtgaagcatctcaaagacttccccattttgccaggcgagatctttaagtacaaatggaccgtcacagtggaagatggaccgactaaatcagaccctcgatgccttacgcggtactattcctccttcgtgaatatggagagagatttggcaagcggactcataggaccactcctcatctgttacaaggaatctgtagaccagaggggtaaccagattatgagtgataaacgcaatgtgatcctttttagcgtcttcgacgagaaccggtcctggtacttgaccgagaatatacaaaggttccttcccaaccccgcaggcgttcagttggaagaccctgagtttcaggccagcaatattatgcactcaatcaacggctatgtgtttgatagtctccagctttctgtttgcctccatgaagtagcctattggtacatcttgtcaattggtgctcaaacagacttcctctccgtcttcttctccggctacacctttaagcacaagatggtgtatgaggacactctcacactctttccattttctggagaaaccgtgttcatgagcatggagaatccaggcctttggatcttgggttgccacaacagtgattttcgcaatcggggaatgactgctctcctcaaagtcagcagctgtgataagaacacaggcgactattacgaagattcttacgaggacataagtgcctacttggcgtccaagaataacgccattgagcccagatcattctcccagaatcctcccgtgcttaaaaggcatcagcgcgaaatcaccagaactactcttcagtctgatcaagaggagattgactatgacgacaccataagcgtggaaatgaagaaggaggatttcgatatctatgacgaagatgagaaccagtctccgcggagctttcagaagaagacgcgacactacttcattgcagcagtcgaaaggctttgggactacggtatgtcatcatcccctcatgtgttgcgcaatagagctcagagtggaagtgttccacagttcaagaaagtcgtctttcaagagtttacagatggcagcttcacacagcctctctatcggggcgagcttaacgaacatttgggactccttggtccctatatccgagccgaagtggaggacaacattatggttacctttaggaatcaagcctctcgcccctacagcttctactcctccctcatcagttatgaggaggatcagagacaaggcgctgaaccacggaagaactttgtgaaaccgaatgagacgaagacctacttctggaaagtacagcaccacatggcccccacaaaagacgaattcgattgcaaagcatgggcgtatttttcagacgttgacttggagaaagatgtacattcaggacttattggtcctttgttggtgtgtcacactaacactctcaatccagcccatggcaggcaggtgacagtccaggaattcgctcttttctttaccatctttgatgagaccaagtcctggtacttcacggaaaacatggagcgcaattgcagagccccctgtaacatacagatggaggaccctacctttaaggaaaattatcggttccacgcaatcaacggatacattatggatacactccctggccttgtgatggctcaggaccaacgaatcaggtggtacctcctcagcatgggttctaatgagaacatacactccattcacttttcaggacatgtgttcactgtccggaagaaagaagagtataagatggccctctacaatttgtatccaggcgtgtttgagaccgttgaaatgcttccctctaaagctggcatctggagagtagagtgcttgatcggagaacatcttcacgcaggtatgagcaccttgttcctcgtgtacagcaacaaatgtcagaccccacttggcatggccagtggacacattcgcgactttcagatcacagcatctggccagtatggacaatgggccccaaagttggctcgcctccattactccggtagcataaatgcgtggtccactaaagaacctttcagctggattaaggtcgatcttcttgcccccatgatcatccacggcattaagacacagggagcgaggcagaaattctcctccctctacatctcacagttcattattatgtatagtttggacggcaagaagtggcaaacttatagaggtaacagtactggaacactcatggtgttcttcggcaacgttgatagctctggcatcaaacacaacatctttaatcctcccataatagctcggtacatcagattgcatccgacccactacagcattaggagtacactccgaatggagcttatgggttgcgacttgaattcctgttcaatgccactcggaatggagtctaaagccatctctgatgcacagataaccgccagtagctactttacgaacatgtttgctacgtggtcaccctctaaggcaaggcttcatttgcaaggccggtctaatgcctggagacctcaggtgaacaacccgaaagaatggctccaggtggactttcagaagaccatgaaagtaacaggtgtcactactcagggagttaagtccttggataccagcatgtatgtgaaggagttccttatttcctcatcacaagatggccaccagtggaccctcttctttcagaatggtaaggtcaaagtgtttcagggcaatcaagacagcttcacacccgtggtgaacagtcttgatcctccactcttgacacgataccttcgaatccatccacagtcttgggttcaccagattgcattgcgcatggaagtacttggatgcgaggctcaggacctctac

SEQ ID NO: 450 - protein, 1457 aa, synthetic construct
  REGION 1..1457: note = Variant of human B-domain deleted Factor VIII
MQIELSTCFFLCLLRFCFSATRRYYLGAVELSWDYMQSDLGELPVDARFPPRVPKSFPFNTSVVYKKTLFVEFTDHLFNIAKPRPPWMGLLGPTIQAEVYDTVVITLKNMASHPVSLHAVGVSYWKASEGAEYDDQTSQREKEDDKVFPGGSHTYVWQVLKENGPMASDPLCLTYSYLSHVDLVKDLNSGLIGALLVCREGSLAKEKTQTLHKFILLFAVFDEGKSWHSETKNSLMQDRDAASARAWPKMHTVNGYVNRSLPGLIGCHRKSVYWHVIGMGTTPEVHSIFLEGHTFLVRNHRQASLEISPITFLTAQTLLMDLGQFLLFCHISSHQHDGMEAYVKVDSCPEEPQLRMKNNEEAEDYDDDLTDSEMDVVRFDDDNSPSFIQIRSVAKKHPKTWVHYIAAEEEDWDYAPLVLAPDDRSYKSQYLNNGPQRIGRKYKKVRFMAYTDETFKTREAIQHESGILGPLLYGEVGDTLLIIFKNQASRPYNIYPHGITDVRPLYSRRLPKGVKHLKDFPILPGEIFKYKWTVTVEDGPTKSDPRCLTRYYSSFVNMERDLASGLIGPLLICYKESVDQRGNQIMSDKRNVILFSVFDENRSWYLTENIQRFLPNPAGVQLEDPEFQASNIMHSINGYVFDSLQLSVCLHEVAYWYILSIGAQTDFLSVFFSGYTFKHKMVYEDTLTLFPFSGETVFMSMENPGLWILGCHNSDFRNRGMTALLKVSSCDKNTGDYYEDSYEDISAYLASKNNAIEPRSFSQNPPVLKRHQREITRTTLQSDQEEIDYDDTISVEMKKEDFDIYDEDENQSPRSFQKKTRHYFIAAVERLWDYGMSSSPHVLRNRAQSGSVPQFKKVVFQEFTDGSFTQPLYRGELNEHLGLLGPYIRAEVEDNIMVTFRNQASRPYSFYSSLISYEEDQRQGAEPRKNFVKPNETKTYFWKVQHHMAPTKDEFDCKAWAYFSDVDLEKDVHSGLIGPLLVCHTNTLNPAHGRQVTVQEFALFFTIFDETKSWYFTENMERNCRAPCNIQMEDPTFKENYRFHAINGYIMDTLPGLVMAQDQRIRWYLLSMGSNENIHSIHFSGHVFTVRKKEEYKMALYNLYPGVFETVEMLPSKAGIWRVECLIGEHLHAGMSTLFLVYSNKCQTPLGMASGHIRDFQITASGQYGQWAPKLARLHYSGSINAWSTKEPFSWIKVDLLAPMIIHGIKTQGARQKFSSLYISQFIIMYSLDGKKWQTYRGNSTGTLMVFFGNVDSSGIKHNIFNPPIIARYIRLHPTHYSIRSTLRMELMGCDLNSCSMPLGMESKAISDAQITASSYFTNMFATWSPSKARLHLQGRSNAWRPQVNNPKEWLQVDFQKTMKVTGVTTQGVKSLDTSMYVKEFLISSSQDGHQWTLFFQNGKVKVFQGNQDSFTPVVNSLDPPLLTRYLRIHPQSWVHQIALRMEVLGCEAQDLY

SEQ ID NO: 451 - DNA, 4371 bp, synthetic construct
  misc_feature 1..4371: note = Variant of human B-domain deleted Factor VIII
  source 1..4371: mol_type = other DNA
atgcagattgaactgtctacctgcttcttcctctgtttgctgaggttctgctttagcgccactagacggtactaccttggcgctgtggagctgtcctgggactatatgcagagtgatttgggagagcttcccgtcgacgcacgatttcctcctcgcgttccaaagtcatttcccttcaacacaagcgtggtgtacaagaagacgctcttcgtcgaattcaccgatcacctgttcaatatcgccaaacccagaccaccatggatgggtcttttggggcctaccatacaagcggaggtgtatgacacagttgttatcactctcaagaacatggcttctcatccggtaagtcttcacgcagtgggcgtgtcctactggaaagcttcagaaggagccgagtatgatgatcagacatcccagagggagaaagaagacgacaaggtatttccaggtgggtctcatacctatgtgtggcaagtgctcaaagagaatggccctatggcaagcgatccgctctgtttgacttacagctacctttcacacgttgacctcgtcaaggacctcaactccgggttgattggagccttgttggtatgcagggaaggatctcttgccaaagagaagacacagaccctccacaagtttatccttctctttgctgtgttcgatgagggcaaaagttggcatagcgaaacgaagaattccctcatgcaggatcgcgacgcagccagcgccagagcttggcccaagatgcacactgtgaacggatatgtcaataggtcacttcctggcttgattgggtgtcatcggaaaagtgtctactggcacgtgatcggaatggggacaacaccagaggtccactccatatttctcgaaggccataccttccttgttcgaaaccacagacaggcatccttggagatctctcccattacctttctcactgcccaaacgctccttatggacttgggtcagttccttctcttctgccatatcagctcacaccagcatgatggtatggaagcttatgtgaaagtcgacagttgtcctgaggagccacagttgcgcatgaagaataatgaagaagccgaggattacgacgacgatctcaccgattctgagatggacgtggtgaggtttgatgacgacaactctccctccttcattcaaatccggagcgtggcgaagaaacaccccaagacttgggtccactatatagcggcggaagaggaggattgggattacgctcctcttgtattggcaccagatgaccgctcatacaaaagccagtacctcaacaacggaccgcagagaattggccggaagtataagaaagtgcgatttatggcctatacagacgaaacctttaagacaagggaggccatccagcatgagagtgggattttgggacctcttctttacggcgaagttggtgataccctcctcatcatcttcaagaatcaagcttctcgcccctataacatttacccacacgggatcactgacgttaggcctttgtatagcagaagacttcccaaaggcgtgaagcatctcaaagacttccccattttgccaggcgagatctttaagtacaaatggaccgtcacagtggaagatggaccgactaaatcagaccctcgatgccttacgcggtactattcctccttcgtgaatatggagagagatttggcaagcggactcataggaccactcctcatctgttacaaggaatctgtagaccagaggggtaaccagattatgagtgataaacgcaatgtgatcctttttagcgtcttcgacgagaaccggtcctggtacttgaccgagaatatacaaaggttccttcccaaccccgcaggcgttcagttggaagaccctgagtttcaggccagcaatattatgcactcaatcaacggctatgtgtttgatagtctccagctttctgtttgcctccatgaagtagcctattggtacatcttgtcaattggtgctcaaacagacttcctctccgtcttcttctccggctacacctttaagcacaagatggtgtatgaggacactctcacactctttccattttctggagaaaccgtgttcatgagcatggagaatccaggcctttggatcttgggttgccacaacagtgattttcgcaatcggggaatgactgctctcctcaaagtcagcagctgtgataagaacacaggcgactattacgaagattcttacgaggacataagtgcctacttgttgtccaagaataacgccattgagcccagatcattctcccagaatcctcccgtgcttaaaaggcatcagcgcgaaatcaccagaactactcttcagtctgatcaagaggagattgactatgacgacaccataagcgtggaaatgaagaaggaggatttcgatatctatgacgaagatgagaaccagtctccgcggagctttcagaagaagacgcgacactacttcattgcagcagtcgaaaggctttgggactacggtatgtcatcatcccctcatgtgttgcgcaatagagctcagagtggaagtgttccacagttcaagaaagtcgtctttcaagagtttacagatggcagcttcacacagcctctctatcggggcgagcttaacgaacatttgggactccttggtccctatatccgagccgaagtggaggacaacattatggttacctttaggaatcaagcctctcgcccctacagcttctactcctccctcatcagttatgaggaggatcagagacaaggcgctgaaccacggaagaactttgtgaaaccgaatgagacgaagacctacttctggaaagtacagcaccacatggcccccacaaaagacgaattcgattgcaaagcatgggcgtatttttcagacgttgacttggagaaagatgtacattcaggacttattggtcctttgttggtgtgtcacactaacactctcaatccagcccatggcaggcaggtgacagtccaggaattcgctcttttctttaccatctttgatgagaccaagtcctggtacttcacggaaaacatggagcgcaattgcagagccccctgtaacatacagatggaggaccctaccaataaggaaaattatcggttccacgcaatcaacggatacattatggatacactccctggccttgtgatggctcaggaccaacgaatcaggtggtacctcctcagcatgggttctaatgagaacatacactccattcacttttcaggacatgtgttcactgtccggaagaaagaagagtataagatggccctctacaatttgtatccaggcgtgtttgagaccgttgaaatgcttccctctaaagctggcatctggagagtagagtgcttgatcggagaacatcttcacgcaggtatgagcaccttgttcctcgtgtacagcaacaaatgtcagaccccacttggcatggccagtggacacattcgcgactttcagatcacagcatctggccagtatggacaatgggccccaaagttggctcgcctccattactccggtagcataaatgcgtggtccactaaagaacctttcagctggattaaggtcgatcttcttgcccccatgatcatccacggcattaagacacagggagcgaggcagaaattctcctccctctacatctcacagttcattattatgtatagtttggacggcaagaagtggcaaacttatagaggtaacagtactggaacactcatggtgttcttcggcaacgttgatagctctggcatcaaacacaacatctttaatcctcccataatagctcggtacatcagattgcatccgacccactacagcattaggagtacactccgaatggagcttatgggttgcgacttgaattcctgttcaatgccactcggaatggagtctaaagccatctctgatgcacagataaccgccagtagctactttacgaacatgtttgctacgtggtcaccctctaaggcaaggcttcatttgcaaggccggtctaatgcctggagacctcaggtgaacaacccgaaagaatggctccaggtggactttcagaagaccatgaaagtaacaggtgtcactactcagggagttaagtccttggataccagcatgtatgtgaaggagttccttatttcctcatcacaagatggccaccagtggaccctcttctttcagaatggtaaggtcaaagtgtttcagggcaatcaagacagcttcacacccgtggtgaacagtcttgatcctccactcttgacacgataccttcgaatccatccacagtcttgggttcaccagattgcattgcgcatggaagtacttggatgcgaggctcaggacctctac

SEQ ID NO: 452 - protein, 1457 aa, synthetic construct
  REGION 1..1457: note = Variant of human B-domain deleted Factor VIII
MQIELSTCFFLCLLRFCFSATRRYYLGAVELSWDYMQSDLGELPVDARFPPRVPKSFPFNTSVVYKKTLFVEFTDHLFNIAKPRPPWMGLLGPTIQAEVYDTVVITLKNMASHPVSLHAVGVSYWKASEGAEYDDQTSQREKEDDKVFPGGSHTYVWQVLKENGPMASDPLCLTYSYLSHVDLVKDLNSGLIGALLVCREGSLAKEKTQTLHKFILLFAVFDEGKSWHSETKNSLMQDRDAASARAWPKMHTVNGYVNRSLPGLIGCHRKSVYWHVIGMGTTPEVHSIFLEGHTFLVRNHRQASLEISPITFLTAQTLLMDLGQFLLFCHISSHQHDGMEAYVKVDSCPEEPQLRMKNNEEAEDYDDDLTDSEMDVVRFDDDNSPSFIQIRSVAKKHPKTWVHYIAAEEEDWDYAPLVLAPDDRSYKSQYLNNGPQRIGRKYKKVRFMAYTDETFKTREAIQHESGILGPLLYGEVGDTLLIIFKNQASRPYNIYPHGITDVRPLYSRRLPKGVKHLKDFPILPGEIFKYKWTVTVEDGPTKSDPRCLTRYYSSFVNMERDLASGLIGPLLICYKESVDQRGNQIMSDKRNVILFSVFDENRSWYLTENIQRFLPNPAGVQLEDPEFQASNIMHSINGYVFDSLQLSVCLHEVAYWYILSIGAQTDFLSVFFSGYTFKHKMVYEDTLTLFPFSGETVFMSMENPGLWILGCHNSDFRNRGMTALLKVSSCDKNTGDYYEDSYEDISAYLLSKNNAIEPRSFSQNPPVLKRHQREITRTTLQSDQEEIDYDDTISVEMKKEDFDIYDEDENQSPRSFQKKTRHYFIAAVERLWDYGMSSSPHVLRNRAQSGSVPQFKKVVFQEFTDGSFTQPLYRGELNEHLGLLGPYIRAEVEDNIMVTFRNQASRPYSFYSSLISYEEDQRQGAEPRKNFVKPNETKTYFWKVQHHMAPTKDEFDCKAWAYFSDVDLEKDVHSGLIGPLLVCHTNTLNPAHGRQVTVQEFALFFTIFDETKSWYFTENMERNCRAPCNIQMEDPTNKENYRFHAINGYIMDTLPGLVMAQDQRIRWYLLSMGSNENIHSIHFSGHVFTVRKKEEYKMALYNLYPGVFETVEMLPSKAGIWRVECLIGEHLHAGMSTLFLVYSNKCQTPLGMASGHIRDFQITASGQYGQWAPKLARLHYSGSINAWSTKEPFSWIKVDLLAPMIIHGIKTQGARQKFSSLYISQFIIMYSLDGKKWQTYRGNSTGTLMVFFGNVDSSGIKHNIFNPPIIARYIRLHPTHYSIRSTLRMELMGCDLNSCSMPLGMESKAISDAQITASSYFTNMFATWSPSKARLHLQGRSNAWRPQVNNPKEWLQVDFQKTMKVTGVTTQGVKSLDTSMYVKEFLISSSQDGHQWTLFFQNGKVKVFQGNQDSFTPVVNSLDPPLLTRYLRIHPQSWVHQIALRMEVLGCEAQDLY

SEQ ID NO: 453 - DNA, 4371 bp, synthetic construct
  misc_feature 1..4371: note = Variant of human B-domain deleted Factor VIII
  source 1..4371: mol_type = other DNA
atgcagattgaactgtctacctgcttcttcctctgtttgctgaggttctgctttagcgccactagacggtactaccttggcgctgtggagctgtcctgggactatatgcagagtgatttgggagagcttcccgtcgacgcacgatttcctcctcgcgttccaaagtcatttcccttcaacacaagcgtggtgtacaagaagacgctcttcgtcgaattcaccgatcacctgttcaatatcgccaaacccagaccaccatggatgggtcttttggggcctaccatacaagcggaggtgtatgacacagttgttatcactctcaagaacatggcttctcatccggtaagtcttcacgcagtgggcgtgtcctactggaaagcttcagaaggagccgagtatgatgatcagacatcccagagggagaaagaagacgacaaggtatttccaggtgggtctcatacctatgtgtggcaagtgctcaaagagaatggccctatggcaagcgatccgctctgtttgacttacagctacctttcacacgttgacctcgtcaaggacctcaactccgggttgattggagccttgttggtatgcagggaaggatctcttgccaaagagaagacacagaccctccacaagtttatccttctctttgctgtgttcgatgagggcaaaagttggcatagcgaaacgaagaattccctcatgcaggatcgcgacgcagccagcgccagagcttggcccaagatgcacactgtgaacggatatgtcaataggtcacttcctggcttgattgggtgtcatcggaaaagtgtctactggcacgtgatcggaatggggacaacaccagaggtccactccatatttctcgaaggccataccttccttgttcgaaaccacagacaggcatccttggagatctctcccattacctttctcactgcccaaacgctccttatggacttgggtcagttccttctcttctgccatatcagctcacaccagcatgatggtatggaagcttatgtgaaagtcgacagttgtcctgaggagccacagttgcgcatgaagaataatgaagaagccgaggattacgacgacgatctcaccgattctgagatggacgtggtgaggtttgatgacgacaactctccctccttcattcaaatccggagcgtggcgaagaaacaccccaagacttgggtccactatatagcggcggaagaggaggattgggattacgctcctcttgtattggcaccagatgaccgctcatacaaaagccagtacctcaacaacggaccgcagagaattggccggaagtataagaaagtgcgatttatggcctatacagacgaaacctttaagacaagggaggccatccagcatgagagtgggattttgggacctcttctttacggcgaagttggtgataccctcctcatcatcttcaagaatcaagcttctcgcccctataacatttacccacacgggatcactgacgttaggcctttgtatagcagaagacttcccaaaggcgtgaagcatctcaaagacttccccattttgccaggcgagatctttaagtacaaatggaccgtcacagtggaagatggaccgactaaatcagaccctcgatgccttacgcggtactattcctccttcgtgaatatggagagagatttggcaagcggactcataggaccactcctcatctgttacaaggaatctgtagaccagaggggtaaccagattatgagtgataaacgcaatgtgatcctttttagcgtcttcgacgagaaccggtcctggtacttgaccgagaatatacaaaggttccttcccaaccccgcaggcgttcagttggaagaccctgagtttcaggccagcaatattatgcactcaatcaacggctatgtgtttgatagtctccagctttctgtttgcctccatgaagtagcctattggtacatcttgtcaattggtgctcaaacagacttcctctccgtcttcttctccggctacacctttaagcacaagatggtgtatgaggacactctcacactctttccattttctggagaaaccgtgttcatgagcatggagaatccaggcctttggatcttgggttgccacaacagtgattttcgcaatcggggaatgactgctctcctcaaagtcagcagctgtgataagaacacaggcgactattacgaagattcttacgaggacataagtgcctacttgttgtccaagaataacgccattgagcccagatcattctcccagaatcctcccgtgcttaaaaggcatcagcgcgaaatcaccagaactactcttcagtctgatcaagaggagattgactatgacgacaccataagcgtggaaatgaagaaggaggatttcgatatctatgacgaagatgagaaccagtctccgcggagctttcagaagaagacgcgacactacttcattgcagcagtcgaaaggctttgggactacggtatgtcatcatcccctcatgtgttgcgcaatagagctcagagtggaagtgttccacagttcaagaaagtcgtctttcaagagtttacagatggcagcttcacacagcctctctatcggggcgagcttaacgaacatttgggactccttggtccctatatccgagccgaagtggaggacaacattatggttacctttaggaatcaagcctctcgcccctacagcttctactcctccctcatcagttatgaggaggatcagagacaaggcgctgaaccacggaagaactttgtgaaaccgaatgagacgaagacctacttctggaaagtacagcaccacatggcccccacaaaagacgaattcgattgcaaagcatgggcgtatttttcagacgttgacttggagaaagatgtacattcaggacttattggtcctttgttggtgtgtcacactaacactctcaatccagcccatggcaggcaggtgacagtccaggaattcgctcttttctttaccatctttgatgagaccaagtcctggtacttcacggaaaacatggagcgcaattgcagagccccctgtaacatacagatggaggaccctacctttaaggaaaattatcggttccacgcaatcaacggatacattatggatacactccctggccttgtgatggctcaggaccaacgaatcaggtggtacctcctcagcatgggttctaatgagaacatacactccattcacttttcaggacatgtgttcactgtccggaagaaagaagagtataagatggccctctacaatttgtatccaggcgtgtttgagaccgttgaaatgcttccctctaaagctggcatctggagagtagagtgcttgatcggagaacatcttcacgcaggtatgagcaccttgttcctcgtgtacagcaacaaatgtcagaccccacttggcatggccagtggacacattcgcgactttcagatcacagcatctggccagtatggacaatgggccccaaagttggctcgcctccattactccggtagcataaatgcgtggtccactaaagaacctttcagctggattaaggtcgatcttcttgcccccatgatcatccacggcattaagacacagggagcgaggcagaaattctcctccctctacatctcacagttcattattatgtatagtttggacggcaagaagtggcaaacttatagaggtaacagtactggaacactcatggtgttcttcggcaacgttgatagctctggcatcaaacacaacatctttaatcctcccataatagctcggtacatcagattgcatccgacccactacagcattaggagtacactccgaatggagcttatgggttgcgacttgaattcctgttcaatgccactcggaatggagtctaaagccatctctgatgcacagataaccgccagtagctactttacgaacatgtttgctacgtggtcaccctctaaggcaaggcttcatttgcaaggccggtctaatgcctggagacctcaggtgaacaacccgaaagaatggctccaggtggactttcagaagaccatgaaagtaacaggtgtcactactcagggagttaagtccttggataccagcatgtatgtgaaggagttccttatttcctcatcacaagatggccaccagtggaccctcttctttcagaatggtaaggtcaaagtgtttcagggcaatcaagacagcttcacacccgtggtgaacagtcttgatcctccactcttgacacgataccttcgaatccatccacagtcttgggttgctcagattgcattgcgcatggaagtacttggatgcgaggctcaggacctctac

SEQ ID NO: 454 - protein, 1457 aa, synthetic construct
  REGION 1..1457: note = Variant of human B-domain deleted Factor VIII
MQIELSTCFFLCLLRFCFSATRRYYLGAVELSWDYMQSDLGELPVDARFPPRVPKSFPFNTSVVYKKTLFVEFTDHLFNIAKPRPPWMGLLGPTIQAEVYDTVVITLKNMASHPVSLHAVGVSYWKASEGAEYDDQTSQREKEDDKVFPGGSHTYVWQVLKENGPMASDPLCLTYSYLSHVDLVKDLNSGLIGALLVCREGSLAKEKTQTLHKFILLFAVFDEGKSWHSETKNSLMQDRDAASARAWPKMHTVNGYVNRSLPGLIGCHRKSVYWHVIGMGTTPEVHSIFLEGHTFLVRNHRQASLEISPITFLTAQTLLMDLGQFLLFCHISSHQHDGMEAYVKVDSCPEEPQLRMKNNEEAEDYDDDLTDSEMDVVRFDDDNSPSFIQIRSVAKKHPKTWVHYIAAEEEDWDYAPLVLAPDDRSYKSQYLNNGPQRIGRKYKKVRFMAYTDETFKTREAIQHESGILGPLLYGEVGDTLLIIFKNQASRPYNIYPHGITDVRPLYSRRLPKGVKHLKDFPILPGEIFKYKWTVTVEDGPTKSDPRCLTRYYSSFVNMERDLASGLIGPLLICYKESVDQRGNQIMSDKRNVILFSVFDENRSWYLTENIQRFLPNPAGVQLEDPEFQASNIMHSINGYVFDSLQLSVCLHEVAYWYILSIGAQTDFLSVFFSGYTFKHKMVYEDTLTLFPFSGETVFMSMENPGLWILGCHNSDFRNRGMTALLKVSSCDKNTGDYYEDSYEDISAYLLSKNNAIEPRSFSQNPPVLKRHQREITRTTLQSDQEEIDYDDTISVEMKKEDFDIYDEDENQSPRSFQKKTRHYFIAAVERLWDYGMSSSPHVLRNRAQSGSVPQFKKVVFQEFTDGSFTQPLYRGELNEHLGLLGPYIRAEVEDNIMVTFRNQASRPYSFYSSLISYEEDQRQGAEPRKNFVKPNETKTYFWKVQHHMAPTKDEFDCKAWAYFSDVDLEKDVHSGLIGPLLVCHTNTLNPAHGRQVTVQEFALFFTIFDETKSWYFTENMERNCRAPCNIQMEDPTFKENYRFHAINGYIMDTLPGLVMAQDQRIRWYLLSMGSNENIHSIHFSGHVFTVRKKEEYKMALYNLYPGVFETVEMLPSKAGIWRVECLIGEHLHAGMSTLFLVYSNKCQTPLGMASGHIRDFQITASGQYGQWAPKLARLHYSGSINAWSTKEPFSWIKVDLLAPMIIHGIKTQGARQKFSSLYISQFIIMYSLDGKKWQTYRGNSTGTLMVFFGNVDSSGIKHNIFNPPIIARYIRLHPTHYSIRSTLRMELMGCDLNSCSMPLGMESKAISDAQITASSYFTNMFATWSPSKARLHLQGRSNAWRPQVNNPKEWLQVDFQKTMKVTGVTTQGVKSLDTSMYVKEFLISSSQDGHQWTLFFQNGKVKVFQGNQDSFTPVVNSLDPPLLTRYLRIHPQSWVAQIALRMEVLGCEAQDLY

SEQ ID NO: 455 - DNA, 4371 bp, synthetic construct
  misc_feature 1..4371: note = Variant of human B-domain deleted Factor VIII
  source 1..4371: mol_type = other DNA
atgcagattgaactgtctacctgcttcttcctctgtttgctgaggttctgctttagcgccactagacggtactaccttggcgctgtggagctgtcctgggactatatgcagagtgatttgggagagcttcccgtcgacgcacgatttcctcctcgcgttccaaagtcatttcccttcaacacaagcgtggtgtacaagaagacgctcttcgtcgaattcaccgatcacctgttcaatatcgccaaacccagaccaccatggatgggtcttttggggcctaccatacaagcggaggtgtatgacacagttgttatcactctcaagaacatggcttctcatccggtaagtcttcacgcagtgggcgtgtcctactggaaagcttcagaaggagccgagtatgatgatcagacatcccagagggagaaagaagacgacaaggtatttccaggtgggtctcatacctatgtgtggcaagtgctcaaagagaatggccctatggcaagcgatccgctctgtttgacttacagctacctttcacacgttgacctcgtcaaggacctcaactccgggttgattggagccttgttggtatgcagggaaggatctcttgccaaagagaagacacagaccctccacaagtttatccttctctttgctgtgttcgatgagggcaaaagttggcatagcgaaacgaagaattccctcatgcaggatcgcgacgcagccagcgccagagcttggcccaagatgcacactgtgaacggatatgtcaataggtcacttcctggcttgattgggtgtcatcggaaaagtgtctactggcacgtgatcggaatggggacaacaccagaggtccactccatatttctcgaaggccataccttccttgttcgaaaccacagacaggcatccttggagatctctcccattacctttctcactgcccaaacgctccttatggacttgggtcagttccttctcttctgccatatcagctcacaccagcatgatggtatggaagcttatgtgaaagtcgacagttgtcctgaggagccacagttgcgcatgaagaataatgaagaagccgaggattacgacgacgatctcaccgattctgagatggacgtggtgaggtttgatgacgacaactctccctccttcattcaaatccggagcgtggcgaagaaacaccccaagacttgggtccactatatagcggcggaagaggaggattgggattacgctcctcttgtattggcaccagatgaccgctcatacaaaagccagtacctcaacaacggaccgcagagaattggccggaagtataagaaagtgcgatttatggcctatacagacgaaacctttaagacaagggaggccatccagcatgagagtgggattttgggacctcttctttacggcgaagttggtgataccctcctcatcatcttcaagaatcaagcttctcgcccctataacatttacccacacgggatcactgacgttaggcctttgtatagcagaagacttcccaaaggcgtgaagcatctcaaagacttccccattttgccaggcgagatctttaagtacaaatggaccgtcacagtggaagatggaccgactaaatcagaccctcgatgccttacgcggtactattcctccttcgtgaatatggagagagatttggcaagcggactcataggaccactcctcatctgttacaaggaatctgtagaccagaggggtaaccagattatgagtgataaacgcaatgtgatcctttttagcgtcttcgacgagaaccggtcctggtacttgaccgagaatatacaaaggttccttcccaaccccgcaggcgttcagttggaagaccctgagtttcaggccagcaatattatgcactcaatcaacggctatgtgtttgatagtctccagctttctgtttgcctccatgaagtagcctattggtacatcttgtcaattggtgctcaaacagacttcctctccgtcttcttctccggctacacctttaagcacaagatggtgtatgaggacactctcacactctttccattttctggagaaaccgtgttcatgagcatggagaatccaggcctttggatcttgggttgccacaacagtgattttcgcaatcggggaatgactgctctcctcaaagtcagcagctgtgataagaacacaggcgactattacgaagattcttacgaggacataagtgcctacttgttgtccaagaataacgccattgagcccagatcattctcccagaatcctcccgtgcttaaaaggcatcagcgcgaaatcaccagaactactcttcagtctgatcaagaggagattgactatgacgacaccataagcgtggaaatgaagaaggaggatttcgatatctatgacgaagatgagaaccagtctccgcggagctttcagaagaagacgcgacactacttcattgcagcagtcgaaaggctttgggactacggtatgtcatcatcccctcatgtgttgcgcaatagagctcagagtggaagtgttccacagttcaagaaagtcgtctttcaagagtttacagatggcagcttcacacagcctctctatcggggcgagcttaacgaacatttgggactccttggtccctatatccgagccgaagtggaggacaacattatggttacctttaggaatcaagcctctcgcccctacagcttctactcctccctcatcagttatgaggaggatcagagacaaggcgctgaaccacggaagaactttgtgaaaccgaatgagacgaagacctacttctggaaagtacagcaccacatggcccccacaaaagacgaattcgattgcaaagcatgggcgtatttttcagacgttgacttggagaaagatgtacattcaggacttattggtcctttgttggtgtgtcacactaacactctcaatccagcccatggcaggcaggtgacagtccaggaattcgctcttttctttaccatctttgatgagaccaagtcctggtacttcacggaaaacatggagcgcaattgcagagccccctgtaacatacagatggaggaccctacctttaaggaaaattatcggttccacgcaatcaacggatacatttcggatacactccctggccttgtgatggctcaggaccaacgaatcaggtggtacctcctcagcatgggttctaatgagaacatacactccattcacttttcaggacatgtgttcactgtccggaagaaagaagagtataagatggccctctacaatttgtatccaggcgtgtttgagaccgttgaaatgcttccctctaaagctggcatctggagagtagagtgcttgatcggagaacatcttcacgcaggtatgagcaccttgttcctcgtgtacagcaacaaatgtcagaccccacttggcatggccagtggacacattcgcgactttcagatcacagcatctggccagtatggacaatgggccccaaagttggctcgcctccattactccggtagcataaatgcgtggtccactaaagaacctttcagctggattaaggtcgatcttcttgcccccatgatcatccacggcattaagacacagggagcgaggcagaaattctcctccctctacatctcacagttcattattatgtatagtttggacggcaagaagtggcaaacttatagaggtaacagtactggaacactcatggtgttcttcggcaacgttgatagctctggcatcaaacacaacatctttaatcctcccataatagctcggtacatcagattgcatccgacccactacagcattaggagtacactccgaatggagcttatgggttgcgacttgaattcctgttcaatgccactcggaatggagtctaaagccatctctgatgcacagataaccgccagtagctactttacgaacatgtttgctacgtggtcaccctctaaggcaaggcttcatttgcaaggccggtctaatgcctggagacctcaggtgaacaacccgaaagaatggctccaggtggactttcagaagaccatgaaagtaacaggtgtcactactcagggagttaagtccttggataccagcatgtatgtgaaggagttccttatttcctcatcacaagatggccaccagtggaccctcttctttcagaatggtaaggtcaaagtgtttcagggcaatcaagacagcttcacacccgtggtgaacagtcttgatcctccactcttgacacgataccttcgaatccatccacagtcttgggttcaccagattgcattgcgcatggaagtacttggatgcgaggctcaggacctctac

SEQ ID NO: 456 - protein, 1457 aa, synthetic construct
  REGION 1..1457: note = Variant of human B-domain deleted Factor VIII
MQIELSTCFFLCLLRFCFSATRRYYLGAVELSWDYMQSDLGELPVDARFPPRVPKSFPFNTSVVYKKTLFVEFTDHLFNIAKPRPPWMGLLGPTIQAEVYDTVVITLKNMASHPVSLHAVGVSYWKASEGAEYDDQTSQREKEDDKVFPGGSHTYVWQVLKENGPMASDPLCLTYSYLSHVDLVKDLNSGLIGALLVCREGSLAKEKTQTLHKFILLFAVFDEGKSWHSETKNSLMQDRDAASARAWPKMHTVNGYVNRSLPGLIGCHRKSVYWHVIGMGTTPEVHSIFLEGHTFLVRNHRQASLEISPITFLTAQTLLMDLGQFLLFCHISSHQHDGMEAYVKVDSCPEEPQLRMKNNEEAEDYDDDLTDSEMDVVRFDDDNSPSFIQIRSVAKKHPKTWVHYIAAEEEDWDYAPLVLAPDDRSYKSQYLNNGPQRIGRKYKKVRFMAYTDETFKTREAIQHESGILGPLLYGEVGDTLLIIFKNQASRPYNIYPHGITDVRPLYSRRLPKGVKHLKDFPILPGEIFKYKWTVTVEDGPTKSDPRCLTRYYSSFVNMERDLASGLIGPLLICYKESVDQRGNQIMSDKRNVILFSVFDENRSWYLTENIQRFLPNPAGVQLEDPEFQASNIMHSINGYVFDSLQLSVCLHEVAYWYILSIGAQTDFLSVFFSGYTFKHKMVYEDTLTLFPFSGETVFMSMENPGLWILGCHNSDFRNRGMTALLKVSSCDKNTGDYYEDSYEDISAYLLSKNNAIEPRSFSQNPPVLKRHQREITRTTLQSDQEEIDYDDTISVEMKKEDFDIYDEDENQSPRSFQKKTRHYFIAAVERLWDYGMSSSPHVLRNRAQSGSVPQFKKVVFQEFTDGSFTQPLYRGELNEHLGLLGPYIRAEVEDNIMVTFRNQASRPYSFYSSLISYEEDQRQGAEPRKNFVKPNETKTYFWKVQHHMAPTKDEFDCKAWAYFSDVDLEKDVHSGLIGPLLVCHTNTLNPAHGRQVTVQEFALFFTIFDETKSWYFTENMERNCRAPCNIQMEDPTFKENYRFHAINGYISDTLPGLVMAQDQRIRWYLLSMGSNENIHSIHFSGHVFTVRKKEEYKMALYNLYPGVFETVEMLPSKAGIWRVECLIGEHLHAGMSTLFLVYSNKCQTPLGMASGHIRDFQITASGQYGQWAPKLARLHYSGSINAWSTKEPFSWIKVDLLAPMIIHGIKTQGARQKFSSLYISQFIIMYSLDGKKWQTYRGNSTGTLMVFFGNVDSSGIKHNIFNPPIIARYIRLHPTHYSIRSTLRMELMGCDLNSCSMPLGMESKAISDAQITASSYFTNMFATWSPSKARLHLQGRSNAWRPQVNNPKEWLQVDFQKTMKVTGVTTQGVKSLDTSMYVKEFLISSSQDGHQWTLFFQNGKVKVFQGNQDSFTPVVNSLDPPLLTRYLRIHPQSWVHQIALRMEVLGCEAQDLY

SEQ ID NO: 457 - DNA, 4371 bp, synthetic construct
  misc_feature 1..4371: note = Variant of human B-domain deleted Factor VIII
  source 1..4371: mol_type = other DNA
atgcagattgaactgtctacctgcttcttcctctgtttgctgaggttctgctttagcgccactagacggtactaccttggcgctgtggagctgtcctgggactatatgcagagtgatttgggagagcttcccgtcgacgcacgatttcctcctcgcgttccaaagtcatttcccttcaacacaagcgtggtgtacaagaagacgctcttcgtcgaattcaccgatcacctgttcaatatcgccaaacccagaccaccatggatgggtcttttggggcctaccatacaagcggaggtgtatgacacagttgttatcactctcaagaacatggcttctcatccggtaagtcttcacgcagtgggcgtgtcctactggaaagcttcagaaggagccgagtatgatgatcagacatcccagagggagaaagaagacgacaaggtatttccaggtgggtctcatacctatgtgtggcaagtgctcaaagagaatggccctatggcaagcgatccgctctgtttgacttacagctacctttcacacgttgacctcgtcaaggacctcaactccgggttgattggagccttgttggtatgcagggaaggatctcttgccaaagagaagacacagaccctccacaagtttatccttctctttgctgtgttcgatgagggcaaaagttggcatagcgaaacgaagaattccctcatgcaggatcgcgacgcagccagcgccagagcttggcccaagatgcacactgtgaacggatatgtcaataggtcacttcctggcttgattgggtgtcatcggaaaagtgtctactggcacgtgatcggaatggggacaacaccagaggtccactccatatttctcgaaggccataccttccttgttcgaaaccacagacaggcatccttggagatctctcccattacctttctcactgcccaaacgctccttatggacttgggtcagttccttctcttctgccatatcagctcacaccagcatgatggtatggaagcttatgtgaaagtcgacagttgtcctgaggagccacagttgcgcatgaagaataatgaagaagccgaggattacgacgacgatctcaccgattctgagatggacgtggtgaggtttgatgacgacaactctccctccttcattcaaatccggagcgtggcgaagaaacaccccaagacttgggtccactatatagcggcggaagaggaggattgggattacgctcctcttgtattggcaccagatgaccgctcatacaaaagccagtacctcaacaacggaccgcagagaattggccggaagtataagaaagtgcgatttatggcctatacagacgaaacctttaagacaagggaggccatccagcatgagagtgggattttgggacctcttctttacggcgaagttggtgataccctcctcatcatcttcaagaatcaagcttctcgcccctataacatttacccacacgggatcactgacgttaggcctttgtatagcagaagacttcccaaaggcgtgaagcatctcaaagacttccccattttgccaggcgagatctttaagtacaaatggaccgtcacagtggaagatggaccgactaaatcagaccctcgatgccttacgcggtactattcctccttcgtgaatatggagagagatttggcaagcggactcataggaccactcctcatctgttacaaggaatctgtagaccagaggggtaaccagattatgagtgataaacgcaatgtgatcctttttagcgtcttcgacgagaaccggtcctggtacttgaccgagaatatacaaaggttccttcccaaccccgcaggcgttcagttggaagaccctgagtttcaggccagcaatattatgcactcaatcaacggctatgtgtttgatagtctccagctttctgtttgcctccatgaagtagcctattggtacatcttgtcaattggtgctcaaacagacttcctctccgtcttcttctccggctacacctttaagcacaagatggtgtatgaggacactctcacactctttccattttctggagaaaccgtgttcatgagcatggagaatccaggcctttggatcttgggttgccacaacagtgattttcgcaatcggggaatgactgctctcctcaaagtcagcagctgtgataagaacacaggcgactattacgaagattcttacgaggacataagtgcctacttgttgtccaagaataacgccattgagcccagatcattctcccagaatcctcccgtgcttaaaaggcatcagcgcgaaatcaccagaactactcttcagtctgatcaagaggagattgactatgacgacaccataagcgtggaaatgaagaaggaggatttcgatatctatgacgaagatgagaaccagtctccgcggagctttcagaagaagacgcgacactacttcattgcagcagtcgaaaggctttgggactacggtatgtcatcatcccctcatgtgttgcgcaatagagctcagagtggaagtgttccacagttcaagaaagtcgtctttcaagagtttacagatggcagcttcacacagcctctctatcggggcgagcttaacgaacatttgggactccttggtccctatatccgagccgaagtggaggacaacattatggttacctttaggaatcaagcctctcgcccctacagcttctactcctccctcatcagttatgaggaggatcagagacaaggcgctgaaccacggaagaactttgtgaaaccgaatgagacgaagacctacttctggaaagtacagcaccacatggcccccacaaaagacgaattcgattgcaaagcatgggcgtatttttcagacgttgacttggagaaagatgtacattcaggacttattggtcctttgttggtgtgtcacactaacactctcaatccagcccatggcaggcaggtgacagtccaggaattcgctcttttctttaccatctttgatgagaccaagtcctggtacttcacggaaaacatggagcgcaattgcagagccccctgtaacatacagatggaggaccctacctttaaggaaaattatcggttccacgcaatcaacggatacattatggatacactccctggccttgtgatggctcaggaccaacgaatcaggtggtacctcctcagcatgggttctaatgagaacatacactccattcacttttcaggacatgtgttcactgtccggaagaaagaagagtataagatggccctctacaatttgtatccaggcgtgtttgagaccgttgaaatgcttccctctaaagctggcatctggagagtagagtgcttgatcggagaacatcttcacgcaggtatgagcaccttgttcctcgtgtacagcaacaaatgtcagaccccacttggcatggccagtggacacattcgcgactttcagatcacagcatctggccagtatggacaatgggccccaaagttggctcgcctccattactccggtagcataaatgcgtggtccactaaagaacctttcagctggattaaggtcgatcttcttgcccccatgatcatccacggcattaagacacagggagcgaggcagaaattctcctccgggtacatctcacagttcattattatgtatagtttggacggcaagaagtggcaaacttatagaggtaacagtactggaacactcatggtgttcttcggcaacgttgatagctctggcatcaaacacaacatctttaatcctcccataatagctcggtacatcagattgcatccgacccactacagcattaggagtacactccgaatggagcttatgggttgcgacttgaattcctgttcaatgccactcggaatggagtctaaagccatctctgatgcacagataaccgccagtagctactttacgaacatgtttgctacgtggtcaccctctaaggcaaggcttcatttgcaaggccggtctaatgcctggagacctcaggtgaacaacccgaaagaatggctccaggtggactttcagaagaccatgaaagtaacaggtgtcactactcagggagttaagtccttggataccagcatgtatgtgaaggagttccttatttcctcatcacaagatggccaccagtggaccctcttctttcagaatggtaaggtcaaagtgtttcagggcaatcaagacagcttcacacccgtggtgaacagtcttgatcctccactcttgacacgataccttcgaatccatccacagtcttgggttcaccagattgcattgcgcatggaagtacttggatgcgaggctcaggacctctac

SEQ ID NO: 458 - protein, 1457 aa, synthetic construct
  REGION 1..1457: note = Variant of human B-domain deleted Factor VIII
MQIELSTCFFLCLLRFCFSATRRYYLGAVELSWDYMQSDLGELPVDARFPPRVPKSFPFNTSVVYKKTLFVEFTDHLFNIAKPRPPWMGLLGPTIQAEVYDTVVITLKNMASHPVSLHAVGVSYWKASEGAEYDDQTSQREKEDDKVFPGGSHTYVWQVLKENGPMASDPLCLTYSYLSHVDLVKDLNSGLIGALLVCREGSLAKEKTQTLHKFILLFAVFDEGKSWHSETKNSLMQDRDAASARAWPKMHTVNGYVNRSLPGLIGCHRKSVYWHVIGMGTTPEVHSIFLEGHTFLVRNHRQASLEISPITFLTAQTLLMDLGQFLLFCHISSHQHDGMEAYVKVDSCPEEPQLRMKNNEEAEDYDDDLTDSEMDVVRFDDDNSPSFIQIRSVAKKHPKTWVHYIAAEEEDWDYAPLVLAPDDRSYKSQYLNNGPQRIGRKYKKVRFMAYTDETFKTREAIQHESGILGPLLYGEVGDTLLIIFKNQASRPYNIYPHGITDVRPLYSRRLPKGVKHLKDFPILPGEIFKYKWTVTVEDGPTKSDPRCLTRYYSSFVNMERDLASGLIGPLLICYKESVDQRGNQIMSDKRNVILFSVFDENRSWYLTENIQRFLPNPAGVQLEDPEFQASNIMHSINGYVFDSLQLSVCLHEVAYWYILSIGAQTDFLSVFFSGYTFKHKMVYEDTLTLFPFSGETVFMSMENPGLWILGCHNSDFRNRGMTALLKVSSCDKNTGDYYEDSYEDISAYLLSKNNAIEPRSFSQNPPVLKRHQREITRTTLQSDQEEIDYDDTISVEMKKEDFDIYDEDENQSPRSFQKKTRHYFIAAVERLWDYGMSSSPHVLRNRAQSGSVPQFKKVVFQEFTDGSFTQPLYRGELNEHLGLLGPYIRAEVEDNIMVTFRNQASRPYSFYSSLISYEEDQRQGAEPRKNFVKPNETKTYFWKVQHHMAPTKDEFDCKAWAYFSDVDLEKDVHSGLIGPLLVCHTNTLNPAHGRQVTVQEFALFFTIFDETKSWYFTENMERNCRAPCNIQMEDPTFKENYRFHAINGYIMDTLPGLVMAQDQRIRWYLLSMGSNENIHSIHFSGHVFTVRKKEEYKMALYNLYPGVFETVEMLPSKAGIWRVECLIGEHLHAGMSTLFLVYSNKCQTPLGMASGHIRDFQITASGQYGQWAPKLARLHYSGSINAWSTKEPFSWIKVDLLAPMIIHGIKTQGARQKFSSGYISQFIIMYSLDGKKWQTYRGNSTGTLMVFFGNVDSSGIKHNIFNPPIIARYIRLHPTHYSIRSTLRMELMGCDLNSCSMPLGMESKAISDAQITASSYFTNMFATWSPSKARLHLQGRSNAWRPQVNNPKEWLQVDFQKTMKVTGVTTQGVKSLDTSMYVKEFLISSSQDGHQWTLFFQNGKVKVFQGNQDSFTPVVNSLDPPLLTRYLRIHPQSWVHQIALRMEVLGCEAQDLY

SEQ ID NO: 459 - DNA, 4371 bp, synthetic construct
  misc_feature 1..4371: note = Variant of human B-domain deleted Factor VIII
  source 1..4371: mol_type = other DNA
atgcagattgaactgtctacctgcttcttcctctgtttgctgaggttctgctttagcgccactagacggtactaccttggcgctgtggagctgtcctgggactatatgcagagtgatttgggagagcttcccgtcgacgcacgatttcctcctcgcgttccaaagtcatttcccttcaacacaagcgtggtgtacaagaagacgctcttcgtcgaattcaccgatcacctgttcaatatcgccaaacccagaccaccatggatgggtcttttggggcctaccatacaagcggaggtgtatgacacagttgttatcactctcaagaacatggcttctcatccggtaagtcttcacgcagtgggcgtgtcctactggaaagcttcagaaggagccgagtatgatgatcagacatcccagagggagaaagaagacgacaaggtatttccaggtgggtctcatacctatgtgtggcaagtgctcaaagagaatggccctatggcaagcgatccgctctgtttgacttacagctacctttcacacgttgacctcgtcaaggacctcaactccgggttgattggagccttgttggtatgcagggaaggatctcttgccaaagagaagacacagaccctccacaagtttatccttctctttgctgtgttcgatgagggcaaaagttggcatagcgaaacgaagaattccctcatgcaggatcgcgacgcagccagcgccagagcttggcccaagatgcacactgtgaacggatatgtcaataggtcacttcctggcttgattgggtgtcatcggaaaagtgtctactggcacgtgatcggaatggggacaacaccagaggtccactccatatttctcgaaggccataccttccttgttcgaaaccacagacaggcatccttggagatctctcccattacctttctcactgcccaaacgctccttatggacttgggtcagttccttctcttctgccatatcagctcacaccagcatgatggtatggaagcttatgtgaaagtcgacagttgtcctgaggagccacagttgcgcatgaagaataatgaagaagccgaggattacgacgacgatctcaccgattctgagatggacgtggtgaggtttgatgacgacaactctccctccttcattcaaatccggagcgtggcgaagaaacaccccaagacttgggtccactatatagcggcggaagaggaggattgggattacgctcctcttgtattggcaccagatgaccgctcatacaaaagccagtacctcaacaacggaccgcagagaattggccggaagtataagaaagtgcgatttatggcctatacagacgaaacctttaagacaagggaggccatccagcatgagagtgggattttgggacctcttctttacggcgaagttggtgataccctcctcatcatcttcaagaatcaagcttctcgcccctataacatttacccacacgggatcactgacgttaggcctttgtatagcagaagacttcccaaaggcgtgaagcatctcaaagacttccccattttgccaggcgagatctttaagtacaaatggaccgtcacagtggaagatggaccgactaaatcagaccctcgatgccttacgcggtactattcctccttcgtgaatatggagagagatttggcaagcggactcataggaccactcctcatctgttacaaggaatctgtagaccagaggggtaaccagattatgagtgataaacgcaatgtgatcctttttagcgtcttcgacgagaaccggtcctggtacttgaccgagaatatacaaaggttccttcccaaccccgcaggcgttcagttggaagaccctgagtttcaggccagcaatattatgcactcaatcaacggctatgtgtttgatagtctccagctttctgtttgcctccatgaagtagcctattggtacatcttgtcaattggtgctcaaacagacttcctctccgtcttcttctccggctacacctttaagcacaagatggtgtatgaggacactctcacactctttccattttctggagaaaccgtgttcatgagcatggagaatccaggcctttggatcttgggttgccacaacagtgattttcgcaatcggggaatgactgctctcctcaaagtcagcagctgtgataagaacacaggcgactattacgaagattcttacgaggacataagtgcctacttgttgtccaagaataacgccattgagcccagatcattctcccagaatcctcccgtgcttaaaaggcatcagcgcgaaatcaccagaactactcttcagtctgatcaagaggagattgactatgacgacaccataagcgtggaaatgaagaaggaggatttcgatatctatgacgaagatgagaaccagtctccgcggagctttcagaagaagacgcgacactacttcattgcagcagtcgaaaggctttgggactacggtatgtcatcatcccctcatgtgttgcgcaatagagctcagagtggaagtgttccacagttcaagaaagtcgtctttcaagagtttacagatggcagcttcacacagcctctctatcggggcgagcttaacgaacatttgggactccttggtccctatatccgagccgaagtggaggacaacattatggttacctttaggaatcaagcctctcgcccctacagcttctactcctccctcatcagttatgaggaggatcagagacaaggcgctgaaccacggaagaactttgtgaaaccgaatgagacgaagacctacttctggaaagtacagcaccacatggcccccacaaaagacgaattcgattgcaaagcatgggcgtatttttcagacgttgacttggagaaagatgtacattcaggacttattggtcctttgttggtgtgtcacactaacactctcaatccagcccatggcaggcaggtgacagtccaggaattcgctcttttctttaccatctttgatgagaccaagtcctggtacttcacggaaaacatggagcgcaattgcagagccccctgtaacatacagatggaggaccctacctttaaggaaaattatcggttccacgcaatcaacggatacattatggatacactccctggccttgtgatggctcaggaccaacgaatcaggtggtacctcctcagcatgggttctaatgagaacatacactccattcacttttcaggacatgtgttcactgtccggaagaaagaagagtataagatggccctctacaatttgtatccaggcgtgtttgagaccgttgaaatgcttccctctaaagctggcatctggagagtagagtgcttgatcggagaacatcttcacgcaggtatgagcaccttgttcctcgtgtacagcaacaaatgtcagaccccacttggcatggccagtggacacattcgcgactttcagatcacagcatctggccagtatggacaatgggccccaaagttggctcgcctccattactccggtagcataaatgcgtggtccactaaagaacctttcagctggattaaggtcgatcttcttgcccccatgatcatccacggcattaagacacagggagcgaggcagaaattctcctccctctacatctcacagttcattattatgtatagtttggacggcaagaagtggcaaacttatagaggtaacagtactggaacactcatggtgttcttcggcaacgttgatagctctggcatcaaacacaacatctttaatcctcccataatagctcggtacatcagattgcatccgacccactacagcattaggagtacactccgaatggagcttatgggttgcgacttgaattcctgttcaatgccactcggaatggagtctaaagccatctctgatgcacagataaccgccagtagctactttacgaacatgtttgctacgtggtcaccctctaaggcaaggcttcatttgcaaggccggtctaatgcctggagacctcaggtgaacaacccgaaagaatggctccaggtggactttcagaagaccatgaaagtaacaggtgtcactactcagggagttaagtccttggatgatagcatgtatgtgaaggagttccttatttcctcatcacaagatggccaccagtggaccctcttctttcagaatggtaaggtcaaagtgtttcagggcaatcaagacagcttcacacccgtggtgaacagtcttgatcctccactcttgacacgataccttcgaatccatccacagtcttgggttcaccagattgcattgcgcatggaagtacttggatgcgaggctcaggacctctac

SEQ ID NO: 460 - protein, 1457 aa, synthetic construct
  REGION 1..1457: note = Variant of human B-domain deleted Factor VIII
MQIELSTCFFLCLLRFCFSATRRYYLGAVELSWDYMQSDLGELPVDARFPPRVPKSFPFNTSVVYKKTLFVEFTDHLFNIAKPRPPWMGLLGPTIQAEVYDTVVITLKNMASHPVSLHAVGVSYWKASEGAEYDDQTSQREKEDDKVFPGGSHTYVWQVLKENGPMASDPLCLTYSYLSHVDLVKDLNSGLIGALLVCREGSLAKEKTQTLHKFILLFAVFDEGKSWHSETKNSLMQDRDAASARAWPKMHTVNGYVNRSLPGLIGCHRKSVYWHVIGMGTTPEVHSIFLEGHTFLVRNHRQASLEISPITFLTAQTLLMDLGQFLLFCHISSHQHDGMEAYVKVDSCPEEPQLRMKNNEEAEDYDDDLTDSEMDVVRFDDDNSPSFIQIRSVAKKHPKTWVHYIAAEEEDWDYAPLVLAPDDRSYKSQYLNNGPQRIGRKYKKVRFMAYTDETFKTREAIQHESGILGPLLYGEVGDTLLIIFKNQASRPYNIYPHGITDVRPLYSRRLPKGVKHLKDFPILPGEIFKYKWTVTVEDGPTKSDPRCLTRYYSSFVNMERDLASGLIGPLLICYKESVDQRGNQIMSDKRNVILFSVFDENRSWYLTENIQRFLPNPAGVQLEDPEFQASNIMHSINGYVFDSLQLSVCLHEVAYWYILSIGAQTDFLSVFFSGYTFKHKMVYEDTLTLFPFSGETVFMSMENPGLWILGCHNSDFRNRGMTALLKVSSCDKNTGDYYEDSYEDISAYLLSKNNAIEPRSFSQNPPVLKRHQREITRTTLQSDQEEIDYDDTISVEMKKEDFDIYDEDENQSPRSFQKKTRHYFIAAVERLWDYGMSSSPHVLRNRAQSGSVPQFKKVVFQEFTDGSFTQPLYRGELNEHLGLLGPYIRAEVEDNIMVTFRNQASRPYSFYSSLISYEEDQRQGAEPRKNFVKPNETKTYFWKVQHHMAPTKDEFDCKAWAYFSDVDLEKDVHSGLIGPLLVCHTNTLNPAHGRQVTVQEFALFFTIFDETKSWYFTENMERNCRAPCNIQMEDPTFKENYRFHAINGYIMDTLPGLVMAQDQRIRWYLLSMGSNENIHSIHFSGHVFTVRKKEEYKMALYNLYPGVFETVEMLPSKAGIWRVECLIGEHLHAGMSTLFLVYSNKCQTPLGMASGHIRDFQITASGQYGQWAPKLARLHYSGSINAWSTKEPFSWIKVDLLAPMIIHGIKTQGARQKFSSLYISQFIIMYSLDGKKWQTYRGNSTGTLMVFFGNVDSSGIKHNIFNPPIIARYIRLHPTHYSIRSTLRMELMGCDLNSCSMPLGMESKAISDAQITASSYFTNMFATWSPSKARLHLQGRSNAWRPQVNNPKEWLQVDFQKTMKVTGVTTQGVKSLDDSMYVKEFLISSSQDGHQWTLFFQNGKVKVFQGNQDSFTPVVNSLDPPLLTRYLRIHPQSWVHQIALRMEVLGCEAQDLY

SEQ ID NO: 461 - DNA, 4371 bp, synthetic construct
  misc_feature 1..4371: note = Variant of human B-domain deleted Factor VIII
  source 1..4371: mol_type = other DNA
atgcagattgaactgtctacctgcttcttcctctgtttgctgaggttctgctttagcgccactagacggtactaccttggcgctgtggagctgtcctgggactatatgcagagtgatttgggagagcttcccgtcgacgcacgatttcctcctcgcgttccaaagtcatttcccttcaacacaagcgtggtgtacaagaagacgctcttcgtcgaattcaccgatcacctgttcaatatcgccaaacccagaccaccatggatgggtcttttggggcctaccatacaagcggaggtgtatgacacagttgttatcactctcaagaacatggcttctcatccggtaagtcttcacgcagtgggcgtgtcctactggaaagcttcagaaggagccgagtatgatgatcagacatcccagagggagaaagaagacgacaaggtatttccaggtgggtctcatacctatgtgtggcaagtgctcaaagagaatggccctatggcaagcgatccgctctgtttgacttacagctacctttcacacgttgacctcgtcaaggacctcaactccgggttgattggagccttgttggtatgcagggaaggatctcttgccaaagagaagacacagaccctccacaagtttatccttctctttgctgtgttcgatgagggcaaaagttggcatagcgaaacgaagaattccctcatgcaggatcgcgacgcagccagcgccagagcttggcccaagatgcacactgtgaacggatatgtcaataggtcacttcctggcttgattgggtgtcatcggaaaagtgtctactggcacgtgatcggaatggggacaacaccagaggtccactccatatttctcgaaggccataccttccttgttcgaaaccacagacaggcatccttggagatctctcccattacctttctcactgcccaaacgctccttatggacttgggtcagttccttctcttctgccatatcagctcacaccagcatgatggtatggaagcttatgtgaaagtcgacagttgtcctgaggagccacagttgcgcatgaagaataatgaagaagccgaggattacgacgacgatctcaccgattctgagatggacgtggtgaggtttgatgacgacaactctccctccttcattcaaatccggagcgtggcgaagaaacaccccaagacttgggtccactatatagcggcggaagaggaggattgggattacgctcctcttgtattggcaccagatgaccgctcatacaaaagccagtacctcaacaacggaccgcagagaattggccggaagtataagaaagtgcgatttatggcctatacagacgaaacctttaagacaagggaggccatccagcatgagagtgggattttgggacctcttctttacggcgaagttggtgataccctcctcatcatcttcaagaatcaagcttctcgcccctataacatttacccacacgggatcactgacgttaggcctttgtatagcagaagacttcccaaaggcgtgaagcatctcaaagacttccccattttgccaggcgagatctttaagtacaaatggaccgtcacagtggaagatggaccgactaaatcagaccctcgatgccttacgcggtactattcctccttcgtgaatatggagagagatttggcaagcggactcataggaccactcctcatctgttacaaggaatctgtagaccagaggggtaaccagattatgagtgataaacgcaatgtgatcctttttagcgtcttcgacgagaaccggtcctggtacttgaccgagaatatacaaaggttccttcccaaccccgcaggcgttcagttggaagaccctgagtttcaggccagcaatattatgcactcaatcaacggctatgtgtttgatagtctccagctttctgtttgcctccatgaagtagcctattggtacatcttgtcaattggtgctcaaacagacttcctctccgtcttcttctccggctacacctttaagcacaagatggtgtatgaggacactctcacactctttccattttctggagaaaccgtgttcatgagcatggagaatccaggcctttggatcttgggttgccacaacagtgattttcgcaatcggggaatgactgctctcctcaaagtcagcagctgtgataagaacacaggcgactattacgaagattcttacgaggacataagtgcctacttgttgtccaagaataacgccattgagcccagatcattctcccagaatcctcccgtgcttaaaaggcatcagcgcgaaatcaccagaactactcttcagtctgatcaagaggagattgactatgacgacaccataagcgtggaaatgaagaaggaggatttcgatatctatgacgaagatgagaaccagtctccgcggagctttcagaagaagacgcgacactacttcattgcagcagtcgaaaggctttgggactacggtatgtcatcatcccctcatgtgttgcgcaatagagctcagagtggaagtgttccacagttcaagaaagtcgtctttcaagagtttacagatggcagcttcacacagcctctctatcggggcgagcttaacgaacatttgggactccttggtccctatatccgagccgaagtggaggacaacattatggttacctttaggaatcaagcctctcgcccctacagcttctactcctccctcatcagttatgaggaggatcagagacaaggcgctgaaccacggaagaactttgtgaaaccgaatgagacgaagacctacttctggaaagtacagcaccacatggcccccacaaaagacgaattcgattgcaaagcatgggcgtatttttcagacgttgacttggagaaagatgtacattcaggacttattggtcctttgttggtgtgtcacactaacactctcaatccagcccatggcaggcaggtgacagtccaggaattcgctcttttctttaccatctttgatgagaccaagtcctggtacttcacggaaaacatggagcgcaattgcagagccccctgtaacatacagatggaggaccctacctttaaggaaaattatcggttccacgcaatcaacggatacattatggatacactccctggccttgtgatggctcaggaccaacgaatcaggtggtacctcctcagcatgggttctaatgagaacatacactccattcacttttcaggacatgtgttcactgtccggaagaaagaagagtataagatggccctctacaatttgtatccaggcgtgtttgagaccgttgaaatgcttccctctaaagctggcatctggagagtagagtgcttgatcggagaacatcttcacgcaggtatgagcaccttgttcctcgtgtacagcaacaaatgtcagaccccacttggcatggccagtggacacattcgcgactttcagatcacagcatctggccagtatggacaatgggccccaaagttggctcgcctccattactccggtagcataaatgcgtggtccactaaagaacctttcagctggattaaggtcgatcttcttgcccccatgatcatccacggcattaagacacagggagcgaggcagaaattctcctccctctacatctcacagttcattattatgtatagtttggacggcaagaagtggcaaacttatagaggtaacagtactggaacactcatggtgttcttcggcaacgttgatagctctggcatcaaacacaacatctttaatcctcccataatagctcggtacatcagattgcatccgacccactacagcattaggagtacactccgaatggagcttatgggttgcgacttgaattcctgttcaatgccactcggaatggagtctaaagccatctctgatgcacagataaccgccagtagctactttacgaacatgtttgctacgtggtcaccctctaaggcaaggcttcatttgcaaggccggtctaatgcctggagacctcaggtgaacaacccgaaagaatggctccaggtggactttcagaagaccatgaaagtaacaggtgtcactactcagggagttaagtccttggataccagcatgtatgtgaaggagttccttatttcctcatcacaagatggccaccagtggaccctcttctttcagaatggtaaggtcaaagtgtttcagggcaatcaagacagcttcacacccgtggtgaacagtcttgatcctccactcttgacacgataccttcgaatccatccacagtcttgggtttcgcagattgcattgcgcatggaagtacttggatgcgaggctcaggacctctac

SEQ ID NO: 462 - protein, 1457 aa, synthetic construct
  REGION 1..1457: note = Variant of human B-domain deleted Factor VIII
MQIELSTCFFLCLLRFCFSATRRYYLGAVELSWDYMQSDLGELPVDARFPPRVPKSFPFNTSVVYKKTLFVEFTDHLFNIAKPRPPWMGLLGPTIQAEVYDTVVITLKNMASHPVSLHAVGVSYWKASEGAEYDDQTSQREKEDDKVFPGGSHTYVWQVLKENGPMASDPLCLTYSYLSHVDLVKDLNSGLIGALLVCREGSLAKEKTQTLHKFILLFAVFDEGKSWHSETKNSLMQDRDAASARAWPKMHTVNGYVNRSLPGLIGCHRKSVYWHVIGMGTTPEVHSIFLEGHTFLVRNHRQASLEISPITFLTAQTLLMDLGQFLLFCHISSHQHDGMEAYVKVDSCPEEPQLRMKNNEEAEDYDDDLTDSEMDVVRFDDDNSPSFIQIRSVAKKHPKTWVHYIAAEEEDWDYAPLVLAPDDRSYKSQYLNNGPQRIGRKYKKVRFMAYTDETFKTREAIQHESGILGPLLYGEVGDTLLIIFKNQASRPYNIYPHGITDVRPLYSRRLPKGVKHLKDFPILPGEIFKYKWTVTVEDGPTKSDPRCLTRYYSSFVNMERDLASGLIGPLLICYKESVDQRGNQIMSDKRNVILFSVFDENRSWYLTENIQRFLPNPAGVQLEDPEFQASNIMHSINGYVFDSLQLSVCLHEVAYWYILSIGAQTDFLSVFFSGYTFKHKMVYEDTLTLFPFSGETVFMSMENPGLWILGCHNSDFRNRGMTALLKVSSCDKNTGDYYEDSYEDISAYLLSKNNAIEPRSFSQNPPVLKRHQREITRTTLQSDQEEIDYDDTISVEMKKEDFDIYDEDENQSPRSFQKKTRHYFIAAVERLWDYGMSSSPHVLRNRAQSGSVPQFKKVVFQEFTDGSFTQPLYRGELNEHLGLLGPYIRAEVEDNIMVTFRNQASRPYSFYSSLISYEEDQRQGAEPRKNFVKPNETKTYFWKVQHHMAPTKDEFDCKAWAYFSDVDLEKDVHSGLIGPLLVCHTNTLNPAHGRQVTVQEFALFFTIFDETKSWYFTENMERNCRAPCNIQMEDPTFKENYRFHAINGYIMDTLPGLVMAQDQRIRWYLLSMGSNENIHSIHFSGHVFTVRKKEEYKMALYNLYPGVFETVEMLPSKAGIWRVECLIGEHLHAGMSTLFLVYSNKCQTPLGMASGHIRDFQITASGQYGQWAPKLARLHYSGSINAWSTKEPFSWIKVDLLAPMIIHGIKTQGARQKFSSLYISQFIIMYSLDGKKWQTYRGNSTGTLMVFFGNVDSSGIKHNIFNPPIIARYIRLHPTHYSIRSTLRMELMGCDLNSCSMPLGMESKAISDAQITASSYFTNMFATWSPSKARLHLQGRSNAWRPQVNNPKEWLQVDFQKTMKVTGVTTQGVKSLDTSMYVKEFLISSSQDGHQWTLFFQNGKVKVFQGNQDSFTPVVNSLDPPLLTRYLRIHPQSWVSQIALRMEVLGCEAQDLY

SEQ ID NO: 463 - DNA, 4371 bp, synthetic construct
  misc_feature 1..4371: note = Variant of human B-domain deleted Factor VIII
  source 1..4371: mol_type = other DNA
atgcagattgaactgtctacctgcttcttcctctgtttgctgaggttctgctttagcgccactagacggtactaccttggcgctgtggagctgtcctgggactatatgcagagtgatttgggagagcttcccgtcgacgcacgatttcctcctcgcgttccaaagtcatttcccttcaacacaagcgtggtgtacaagaagacgctcttcgtcgaattcaccgatcacctgttcaatatcgccaaacccagaccaccatggatgggtcttttggggcctaccatacaagcggaggtgtatgacacagttgttatcactctcaagaacatggcttctcatccggtaagtcttcacgcagtgggcgtgtcctactggaaagcttcagaaggagccgagtatgatgatcagacatcccagagggagaaagaagacgacaaggtatttccaggtgggtctcatacctatgtgtggcaagtgctcaaagagaatggccctatggcaagcgatccgctctgtttgacttacagctacctttcacacgttgacctcgtcaaggacctcaactccgggttgattggagccttgttggtatgcagggaaggatctcttgccaaagagaagacacagaccctccacaagtttatccttctctttgctgtgttcgatgagggcaaaagttggcatagcgaaacgaagaattccctcatgcaggatcgcgacgcagccagcgccagagcttggcccaagatgcacactgtgaacggatatgtcaataggtcacttcctggcttgattgggtgtcatcggaaaagtgtctactggcacgtgatcggaatggggacaacaccagaggtccactccatatttctcgaaggccataccttccttgttcgaaaccacagacaggcatccttggagatctctcccattacctttctcactgcccaaacgctccttatggacttgggtcagttccttctcttctgccatatcagctcacaccagcatgatggtatggaagcttatgtgaaagtcgacagttgtcctgaggagccacagttgcgcatgaagaataatgaagaagccgaggattacgacgacgatctcaccgattctgagatggacgtggtgaggtttgatgacgacaactctccctccaggattcaaatccggagcgtggcgaagaaacaccccaagacttgggtccactatatagcggcggaagaggaggattgggattacgctcctcttgtattggcaccagatgaccgctcatacaaaagccagtacctcaacaacggaccgcagagaattggccggaagtataagaaagtgcgatttatggcctatacagacgaaacctttaagacaagggaggccatccagcatgagagtgggattttgggacctcttctttacggcgaagttggtgataccctcctcatcatcttcaagaatcaagcttctcgcccctataacatttacccacacgggatcactgacgttaggcctttgtatagcagaagacttcccaaaggcgtgaagcatctcaaagacttccccattttgccaggcgagatctttaagtacaaatggaccgtcacagtggaagatggaccgactaaatcagaccctcgatgccttacgcggtactattcctccttcgtgaatatggagagagatttggcaagcggactcataggaccactcctcatctgttacaaggaatctgtagaccagaggggtaaccagattatgagtgataaacgcaatgtgatcctttttagcgtcttcgacgagaaccggtcctggtacttgaccgagaatatacaaaggttccttcccaaccccgcaggcgttcagttggaagaccctgagtttcaggccagcaatattatgcactcaatcaacggctatgtgtttgatagtctccagctttctgtttgcctccatgaagtagcctattggtacatcttgtcaattggtgctcaaacagacttcctctccgtcttcttctccggctacacctttaagcacaagatggtgtatgaggacactctcacactctttccattttctggagaaaccgtgttcatgagcatggagaatccaggcctttggatcttgggttgccacaacagtgattttcgcaatcggggaatgactgctctcctcaaagtcagcagctgtgataagaacacaggcgactattacgaagattcttacgaggacataagtgcctacttgttgtccaagaataacgccattgagcccagatcattctcccagaatcctcccgtgcttaaaaggcatcagcgcgaaatcaccagaactactcttcagtctgatcaagaggagattgactatgacgacaccataagcgtggaaatgaagaaggaggatttcgatatctatgacgaagatgagaaccagtctccgcggagctttcagaagaagacgcgacactacttcattgcagcagtcgaaaggctttgggactacggtatgtcatcatcccctcatgtgttgcgcaatagagctcagagtggaagtgttccacagttcaagaaagtcgtctttcaagagtttacagatggcagcttcacacagcctctctatcggggcgagcttaacgaacatttgggactccttggtccctatatccgagccgaagtggaggacaacattatggttacctttaggaatcaagcctctcgcccctacagcttctactcctccctcatcagttatgaggaggatcagagacaaggcgctgaaccacggaagaactttgtgaaaccgaatgagacgaagacctacttctggaaagtacagcaccacatggcccccacaaaagacgaattcgattgcaaagcatgggcgtatttttcagacgttgacttggagaaagatgtacattcaggacttattggtcctttgttggtgtgtcacactaacactctcaatccagcccatggcaggcaggtgacagtccaggaattcgctcttttctttaccatctttgatgagaccaagtcctggtacttcacggaaaacatggagcgcaattgcagagccccctgtaacatacagatggaggaccctacctttaaggaaaattatcggttccacgcaatcaacggatacattatggatacactccctggccttgtgatggctcaggaccaacgaatcaggtggtacctcctcagcatgggttctaatgagaacatacactccattcacttttcaggacatgtgttcactgtccggaagaaagaagagtataagatggccctctacaatttgtatccaggcgtgtttgagaccgttgaaatgcttccctctaaagctggcatctggagagtagagtgcttgatcggagaacatcttcacgcaggtatgagcaccttgttcctcgtgtacagcaacaaatgtcagaccccacttggcatggccagtggacacattcgcgactttcagatcacagcatctggccagtatggacaatgggccccaaagttggctcgcctccattactccggtagcataaatgcgtggtccactaaagaacctttcagctggattaaggtcgatcttcttgcccccatgatcatccacggcattaagacacagggagcgaggcagaaattctcctccctctacatctcacagttcattattatgtatagtttggacggcaagaagtggcaaacttatagaggtaacagtactggaacactcatggtgttcttcggcaacgttgatagctctggcatcaaacacaacatctttaatcctcccataatagctcggtacatcagattgcatccgacccactacagcattaggagtacactccgaatggagcttatgggttgcgacttgaattcctgttcaatgccactcggaatggagtctaaagccatctctgatgcacagataaccgccagtagctactttacgaacatgtttgctacgtggtcaccctctaaggcaaggcttcatttgcaaggccggtctaatgcctggagacctcaggtgaacaacccgaaagaatggctccaggtggactttcagaagaccatgaaagtaacaggtgtcactactcagggagttaagtccttggataccagcatgtatgtgaaggagttccttatttcctcatcacaagatggccaccagtggaccctcttctttcagaatggtaaggtcaaagtgtttcagggcaatcaagacagcttcacacccgtggtgaacagtcttgatcctccactcttgacacgataccttcgaatccatccacagtcttgggttcaccagattgcattgcgcatggaagtacttggatgcgaggctcaggacctctac

SEQ ID NO: 464 - protein, 1457 aa, synthetic construct
  REGION 1..1457: note = Variant of human B-domain deleted Factor VIII
MQIELSTCFFLCLLRFCFSATRRYYLGAVELSWDYMQSDLGELPVDARFPPRVPKSFPFNTSVVYKKTLFVEFTDHLFNIAKPRPPWMGLLGPTIQAEVYDTVVITLKNMASHPVSLHAVGVSYWKASEGAEYDDQTSQREKEDDKVFPGGSHTYVWQVLKENGPMASDPLCLTYSYLSHVDLVKDLNSGLIGALLVCREGSLAKEKTQTLHKFILLFAVFDEGKSWHSETKNSLMQDRDAASARAWPKMHTVNGYVNRSLPGLIGCHRKSVYWHVIGMGTTPEVHSIFLEGHTFLVRNHRQASLEISPITFLTAQTLLMDLGQFLLFCHISSHQHDGMEAYVKVDSCPEEPQLRMKNNEEAEDYDDDLTDSEMDVVRFDDDNSPSRIQIRSVAKKHPKTWVHYIAAEEEDWDYAPLVLAPDDRSYKSQYLNNGPQRIGRKYKKVRFMAYTDETFKTREAIQHESGILGPLLYGEVGDTLLIIFKNQASRPYNIYPHGITDVRPLYSRRLPKGVKHLKDFPILPGEIFKYKWTVTVEDGPTKSDPRCLTRYYSSFVNMERDLASGLIGPLLICYKESVDQRGNQIMSDKRNVILFSVFDENRSWYLTENIQRFLPNPAGVQLEDPEFQASNIMHSINGYVFDSLQLSVCLHEVAYWYILSIGAQTDFLSVFFSGYTFKHKMVYEDTLTLFPFSGETVFMSMENPGLWILGCHNSDFRNRGMTALLKVSSCDKNTGDYYEDSYEDISAYLLSKNNAIEPRSFSQNPPVLKRHQREITRTTLQSDQEEIDYDDTISVEMKKEDFDIYDEDENQSPRSFQKKTRHYFIAAVERLWDYGMSSSPHVLRNRAQSGSVPQFKKVVFQEFTDGSFTQPLYRGELNEHLGLLGPYIRAEVEDNIMVTFRNQASRPYSFYSSLISYEEDQRQGAEPRKNFVKPNETKTYFWKVQHHMAPTKDEFDCKAWAYFSDVDLEKDVHSGLIGPLLVCHTNTLNPAHGRQVTVQEFALFFTIFDETKSWYFTENMERNCRAPCNIQMEDPTFKENYRFHAINGYIMDTLPGLVMAQDQRIRWYLLSMGSNENIHSIHFSGHVFTVRKKEEYKMALYNLYPGVFETVEMLPSKAGIWRVECLIGEHLHAGMSTLFLVYSNKCQTPLGMASGHIRDFQITASGQYGQWAPKLARLHYSGSINAWSTKEPFSWIKVDLLAPMIIHGIKTQGARQKFSSLYISQFIIMYSLDGKKWQTYRGNSTGTLMVFFGNVDSSGIKHNIFNPPIIARYIRLHPTHYSIRSTLRMELMGCDLNSCSMPLGMESKAISDAQITASSYFTNMFATWSPSKARLHLQGRSNAWRPQVNNPKEWLQVDFQKTMKVTGVTTQGVKSLDTSMYVKEFLISSSQDGHQWTLFFQNGKVKVFQGNQDSFTPVVNSLDPPLLTRYLRIHPQSWVHQIALRMEVLGCEAQDLY

SEQ ID NO: 465 - DNA, 4371 bp, synthetic construct
  misc_feature 1..4371: note = Variant of human B-domain deleted Factor VIII
  source 1..4371: mol_type = other DNA
atgcagattgaactgtctacctgcttcttcctctgtttgctgaggttctgctttagcgccactagacggtactaccttggcgctgtggagctgtcctgggactatatgcagagtgatttgggagagcttcccgtcgacgcacgatttcctcctcgcgttccaaagtcatttcccttcaacacaagcgtggtgtacaagaagacgctcttcgtcgaattcaccgatcacctgttcaatatcgccaaacccagaccaccatggatgggtcttttggggcctaccatacaagcggaggtgtatgacacagttgttatcactctcaagaacatggcttctcatccggtaagtcttcacgcagtgggcgtgtcctactggaaagcttcagaaggagccgagtatgatgatcagacatcccagagggagaaagaagacgacaaggtatttccaggtgggtctcatacctatgtgtggcaagtgctcaaagagaatggccctatggcaagcgatccgctctgtttgacttacagctacctttcacacgttgacctcgtcaaggacctcaactccgggttgattggagccttgttggtatgcagggaaggatctcttgccaaagagaagacacagaccctccacaagtttatccttctctttgctgtgttcgatgagggcaaaagttggcatagcgaaacgaagaattccctcatgcaggatcgcgacgcagccagcgccagagcttggcccaagatgcacactgtgaacggatatgtcaataggtcacttcctggcttgattgggtgtcatcggaaaagtgtctactggcacgtgatcggaatggggacaacaccagaggtccactccatatttctcgaaggccataccttccttgttcgaaaccacagacaggcatccttggagatctctcccattacctttctcactgcccaaacgctccttatggacttgggtcagttccttctcttctgccatatcagctcacaccagcatgatggtatggaagcttatgtgaaagtcgacagttgtcctgaggagccacagttgcgcatgaagaataatgaagaagccgaggattacgacgacgatctcaccgattctgagatggacgtggtgaggtttgatgacgacaactctccctccttcattcaaatccggagcgtggcgaagaaacaccccaagacttgggtccactatatagcggcggaagaggaggattgggattacgctcctcttgtattggcaccagatgaccgctcatacaaaagccagtacctcaacaacggaccgcagagaattggccggaagtataagaaagtgcgatttatggcctatacagacgaaacctttaagacaagggaggccatccagcatgagagtgggattttgggacctcttctttacggcgaagttggtgataccctcctcatcatcttcaagaatcaagcttctcgcccctataacatttacccacacgggatcactgacgttaggcctttgtatagcagaagacttcccaaaggcgtgaagcatctcaaagacttccccattttgccaggcgagatctttaagtacaaatggaccgtcacagtggaagatggaccgactaaatcagaccctcgatgccttacgcggtactattcctccttcgtgaatatggagagagatttggcaagcggactcataggaccactcctcatctgttacaaggaatctgtagaccagaggggtaaccagattatgagtgataaacgcaatgtgatcctttttagcgtcttcgacgagaaccggtcctggtacttgaccgagaatatacaaaggttccttcccaaccccgcaggcgttcagttggaagaccctgagtttcaggccagcaatattatgcactcaatcaacggctatgtgtttgatagtctccagctttctgtttgcctccatgaagtagcctattggtacatcttgtcaattggtgctcaaacagacttcctctccgtcttcttctccggctacacctttaagcacaagatggtgtatgaggacactctcacactctttccattttctggagaaaccgtgttcatgagcatggagaatccaggcctttggatcttgggttgccacaacagtgattttcgcaatcggggaatgactgctctcctcaaagtcagcagctgtgataagaacacaggcgactattacgaagattcttacgaggacataagtgcctacttgttgtccaagaataacgccattgagcccagatcattctcccagaatcctcccgtgcttaaaaggcatcagcgcgaaatcaccagaactactcttcagtctgatcaagaggagattgactatgacgacaccataagcgtggaaatgaagaaggaggatttcgatatctatgacgaagatgagaaccagtctccgcggagctttcagaagaagacgcgacactacttcattgcagcagtcgaaaggctttgggactacggtatgtcatcatcccctcatgtgttgcgcaatagagctcagagtggaagtgttccacagttcaagaaagtcgtctttcaagagtttacagatggcagcttcacacagcctctctatcggggcgagcttaacgaacatttgggactccttggtccctatatccgagccgaagtggaggacaacattatggttacctttaggaatcaagcctctcgcccctacagcttctactcctccctcatcagttatgaggaggatcagagacaaggcgctgaaccacggaagaactttgtgaaaccgaatgagacgaagacctacttctggaaagtacagcaccacatggcccccacaaaagacgaattcgattgcaaagcatgggcgtatttttcagacgttgacttggagaaagatgtacattcaggacttattggtcctttgttggtgtgtcacactaacactctcaatccagcccatggcaggcaggtgacagtccaggaattcgctcttttctttaccatctttgatgagaccaagtcctggtacttcacggaaaacatggagcgcaattgcagagccccctgtaacatacagatggaggaccctacctttaaggaaaattatcggttccacgcaatcaacggatacattatggatacactccctggccttgtgatggctcaggaccaacgaatcaggtggtacctcctcagcatgggttctaatgagaacatacactccattcacttttcaggacatgtgttcactgtccggaagaaagaagagtataagatggccctctacaatttgtatccaggcgtgtttgagaccgttgaaatgcttccctctaaagctggcatctggagagtagagtgcttgatcggagaacatcttcacgcaggtatgagcaccttgttcctcgtgtacagcaacaaatgtcagaccccacttggcatggccagtggacacattcgcgactttcagatcacagcatctggccagtatggacaatgggccccaaagttggctcgcctccattactccggtagcataaatgcgtggtccactaaagaacctgcgagctggattaaggtcgatcttcttgcccccatgatcatccacggcattaagacacagggagcgaggcagaaattctcctccctctacatctcacagttcattattatgtatagtttggacggcaagaagtggcaaacttatagaggtaacagtactggaacactcatggtgttcttcggcaacgttgatagctctggcatcaaacacaacatctttaatcctcccataatagctcggtacatcagattgcatccgacccactacagcattaggagtacactccgaatggagcttatgggttgcgacttgaattcctgttcaatgccactcggaatggagtctaaagccatctctgatgcacagataaccgccagtagctactttacgaacatgtttgctacgtggtcaccctctaaggcaaggcttcatttgcaaggccggtctaatgcctggagacctcaggtgaacaacccgaaagaatggctccaggtggactttcagaagaccatgaaagtaacaggtgtcactactcagggagttaagtccttggataccagcatgtatgtgaaggagttccttatttcctcatcacaagatggccaccagtggaccctcttctttcagaatggtaaggtcaaagtgtttcagggcaatcaagacagcttcacacccgtggtgaacagtcttgatcctccactcttgacacgataccttcgaatccatccacagtcttgggttcaccagattgcattgcgcatggaagtacttggatgcgaggctcaggacctctac

SEQ ID NO: 466 - protein, 1457 aa, synthetic construct
  REGION 1..1457: note = Variant of human B-domain deleted Factor VIII
MQIELSTCFFLCLLRFCFSATRRYYLGAVELSWDYMQSDLGELPVDARFPPRVPKSFPFNTSVVYKKTLFVEFTDHLFNIAKPRPPWMGLLGPTIQAEVYDTVVITLKNMASHPVSLHAVGVSYWKASEGAEYDDQTSQREKEDDKVFPGGSHTYVWQVLKENGPMASDPLCLTYSYLSHVDLVKDLNSGLIGALLVCREGSLAKEKTQTLHKFILLFAVFDEGKSWHSETKNSLMQDRDAASARAWPKMHTVNGYVNRSLPGLIGCHRKSVYWHVIGMGTTPEVHSIFLEGHTFLVRNHRQASLEISPITFLTAQTLLMDLGQFLLFCHISSHQHDGMEAYVKVDSCPEEPQLRMKNNEEAEDYDDDLTDSEMDVVRFDDDNSPSFIQIRSVAKKHPKTWVHYIAAEEEDWDYAPLVLAPDDRSYKSQYLNNGPQRIGRKYKKVRFMAYTDETFKTREAIQHESGILGPLLYGEVGDTLLIIFKNQASRPYNIYPHGITDVRPLYSRRLPKGVKHLKDFPILPGEIFKYKWTVTVEDGPTKSDPRCLTRYYSSFVNMERDLASGLIGPLLICYKESVDQRGNQIMSDKRNVILFSVFDENRSWYLTENIQRFLPNPAGVQLEDPEFQASNIMHSINGYVFDSLQLSVCLHEVAYWYILSIGAQTDFLSVFFSGYTFKHKMVYEDTLTLFPFSGETVFMSMENPGLWILGCHNSDFRNRGMTALLKVSSCDKNTGDYYEDSYEDISAYLLSKNNAIEPRSFSQNPPVLKRHQREITRTTLQSDQEEIDYDDTISVEMKKEDFDIYDEDENQSPRSFQKKTRHYFIAAVERLWDYGMSSSPHVLRNRAQSGSVPQFKKVVFQEFTDGSFTQPLYRGELNEHLGLLGPYIRAEVEDNIMVTFRNQASRPYSFYSSLISYEEDQRQGAEPRKNFVKPNETKTYFWKVQHHMAPTKDEFDCKAWAYFSDVDLEKDVHSGLIGPLLVCHTNTLNPAHGRQVTVQEFALFFTIFDETKSWYFTENMERNCRAPCNIQMEDPTFKENYRFHAINGYIMDTLPGLVMAQDQRIRWYLLSMGSNENIHSIHFSGHVFTVRKKEEYKMALYNLYPGVFETVEMLPSKAGIWRVECLIGEHLHAGMSTLFLVYSNKCQTPLGMASGHIRDFQITASGQYGQWAPKLARLHYSGSINAWSTKEPASWIKVDLLAPMIIHGIKTQGARQKFSSLYISQFIIMYSLDGKKWQTYRGNSTGTLMVFFGNVDSSGIKHNIFNPPIIARYIRLHPTHYSIRSTLRMELMGCDLNSCSMPLGMESKAISDAQITASSYFTNMFATWSPSKARLHLQGRSNAWRPQVNNPKEWLQVDFQKTMKVTGVTTQGVKSLDTSMYVKEFLISSSQDGHQWTLFFQNGKVKVFQGNQDSFTPVVNSLDPPLLTRYLRIHPQSWVHQIALRMEVLGCEAQDLY

SEQ ID NO: 467 - DNA, 4371 bp, synthetic construct
  misc_feature 1..4371: note = Variant of human B-domain deleted Factor VIII
  source 1..4371: mol_type = other DNA
atgcagattgaactgtctacctgcttcttcctctgtttgctgaggttctgctttagcgccactagacggtactaccttggcgctgtggagctgtcctgggactatatgcagagtgatttgggagagcttcccgtcgacgcacgatttcctcctcgcgttccaaagtcatttcccttcaacacaagcgtggtgtacaagaagacgctcttcgtcgaattcaccgatcacctgttcaatatcgccaaacccagaccaccatggatgggtcttttggggcctaccatacaagcggaggtgtatgacacagttgttatcactctcaagaacatggcttctcatccggtaagtcttcacgcagtgggcgtgtcctactggaaagcttcagaaggagccgagtatgatgatcagacatcccagagggagaaagaagacgacaaggtatttccaggtgggtctcatacctatgtgtggcaagtgctcaaagagaatggccctatggcaagcgatccgctctgtttgacttacagctacctttcacacgttgacctcgtcaaggacctcaactccgggttgattggagccttgttggtatgcagggaaggatctcttgccaaagagaagacacagaccctccacaagtttatccttctctttgctgtgttcgatgagggcaaaagttggcatagcgaaacgaagaattccctcatgcaggatcgcgacgcagccagcgccagagcttggcccaagatgcacactgtgaacggatatgtcaataggtcacttcctggcttgattgggtgtcatcggaaaagtgtctactggcacgtgatcggaatggggacaacaccagaggtccactccatatttctcgaaggccataccttccttgttcgaaaccacagacaggcatccttggagatctctcccattacctttctcactgcccaaacgctccttatggacttgggtcagttccttctcttctgccatatcagctcacaccagcatgatggtatggaagcttatgtgaaagtcgacagttgtcctgaggagccacagttgcgcatgaagaataatgaagaagccgaggattacgacgacgatctcaccgattctgagatggacgtggtgaggtttgatgacgacaactctccctccattattcaaatccggagcgtggcgaagaaacaccccaagacttgggtccactatatagcggcggaagaggaggattgggattacgctcctcttgtattggcaccagatgaccgctcatacaaaagccagtacctcaacaacggaccgcagagaattggccggaagtataagaaagtgcgatttatggcctatacagacgaaacctttaagacaagggaggccatccagcatgagagtgggattttgggacctcttctttacggcgaagttggtgataccctcctcatcatcttcaagaatcaagcttctcgcccctataacatttacccacacgggatcactgacgttaggcctttgtatagcagaagacttcccaaaggcgtgaagcatctcaaagacttccccattttgccaggcgagatctttaagtacaaatggaccgtcacagtggaagatggaccgactaaatcagaccctcgatgccttacgcggtactattcctccttcgtgaatatggagagagatttggcaagcggactcataggaccactcctcatctgttacaaggaatctgtagaccagaggggtaaccagattatgagtgataaacgcaatgtgatcctttttagcgtcttcgacgagaaccggtcctggtacttgaccgagaatatacaaaggttccttcccaaccccgcaggcgttcagttggaagaccctgagtttcaggccagcaatattatgcactcaatcaacggctatgtgtttgatagtctccagctttctgtttgcctccatgaagtagcctattggtacatcttgtcaattggtgctcaaacagacttcctctccgtcttcttctccggctacacctttaagcacaagatggtgtatgaggacactctcacactctttccattttctggagaaaccgtgttcatgagcatggagaatccaggcctttggatcttgggttgccacaacagtgattttcgcaatcggggaatgactgctctcctcaaagtcagcagctgtgataagaacacaggcgactattacgaagattcttacgaggacataagtgcctacttgttgtccaagaataacgccattgagcccagatcattctcccagaatcctcccgtgcttaaaaggcatcagcgcgaaatcaccagaactactcttcagtctgatcaagaggagattgactatgacgacaccataagcgtggaaatgaagaaggaggatttcgatatctatgacgaagatgagaaccagtctccgcggagctttcagaagaagacgcgacactacttcattgcagcagtcgaaaggctttgggactacggtatgtcatcatcccctcatgtgttgcgcaatagagctcagagtggaagtgttccacagttcaagaaagtcgtctttcaagagtttacagatggcagcttcacacagcctctctatcggggcgagcttaacgaacatttgggactccttggtccctatatccgagccgaagtggaggacaacattatggttacctttaggaatcaagcctctcgcccctacagcttctactcctccctcatcagttatgaggaggatcagagacaaggcgctgaaccacggaagaactttgtgaaaccgaatgagacgaagacctacttctggaaagtacagcaccacatggcccccacaaaagacgaattcgattgcaaagcatgggcgtatttttcagacgttgacttggagaaagatgtacattcaggacttattggtcctttgttggtgtgtcacactaacactctcaatccagcccatggcaggcaggtgacagtccaggaattcgctcttttctttaccatctttgatgagaccaagtcctggtacttcacggaaaacatggagcgcaattgcagagccccctgtaacatacagatggaggaccctacctttaaggaaaattatcggttccacgcaatcaacggatacattatggatacactccctggccttgtgatggctcaggaccaacgaatcaggtggtacctcctcagcatgggttctaatgagaacatacactccattcacttttcaggacatgtgttcactgtccggaagaaagaagagtataagatggccctctacaatttgtatccaggcgtgtttgagaccgttgaaatgcttccctctaaagctggcatctggagagtagagtgcttgatcggagaacatcttcacgcaggtatgagcaccttgttcctcgtgtacagcaacaaatgtcagaccccacttggcatggccagtggacacattcgcgactttcagatcacagcatctggccagtatggacaatgggccccaaagttggctcgcctccattactccggtagcataaatgcgtggtccactaaagaacctttcagctggattaaggtcgatcttcttgcccccatgatcatccacggcattaagacacagggagcgaggcagaaattctcctccctctacatctcacagttcattattatgtatagtttggacggcaagaagtggcaaacttatagaggtaacagtactggaacactcatggtgttcttcggcaacgttgatagctctggcatcaaacacaacatctttaatcctcccataatagctcggtacatcagattgcatccgacccactacagcattaggagtacactccgaatggagcttatgggttgcgacttgaattcctgttcaatgccactcggaatggagtctaaagccatctctgatgcacagataaccgccagtagctactttacgaacatgtttgctacgtggtcaccctctaaggcaaggcttcatttgcaaggccggtctaatgcctggagacctcaggtgaacaacccgaaagaatggctccaggtggactttcagaagaccatgaaagtaacaggtgtcactactcagggagttaagtccttggataccagcatgtatgtgaaggagttccttatttcctcatcacaagatggccaccagtggaccctcttctttcagaatggtaaggtcaaagtgtttcagggcaatcaagacagcttcacacccgtggtgaacagtcttgatcctccactcttgacacgataccttcgaatccatccacagtcttgggttcaccagattgcattgcgcatggaagtacttggatgcgaggctcaggacctctac

SEQ ID NO: 468 - protein, 1457 aa, synthetic construct
  REGION 1..1457: note = Variant of human B-domain deleted Factor VIII
MQIELSTCFFLCLLRFCFSATRRYYLGAVELSWDYMQSDLGELPVDARFPPRVPKSFPFNTSVVYKKTLFVEFTDHLFNIAKPRPPWMGLLGPTIQAEVYDTVVITLKNMASHPVSLHAVGVSYWKASEGAEYDDQTSQREKEDDKVFPGGSHTYVWQVLKENGPMASDPLCLTYSYLSHVDLVKDLNSGLIGALLVCREGSLAKEKTQTLHKFILLFAVFDEGKSWHSETKNSLMQDRDAASARAWPKMHTVNGYVNRSLPGLIGCHRKSVYWHVIGMGTTPEVHSIFLEGHTFLVRNHRQASLEISPITFLTAQTLLMDLGQFLLFCHISSHQHDGMEAYVKVDSCPEEPQLRMKNNEEAEDYDDDLTDSEMDVVRFDDDNSPSIIQIRSVAKKHPKTWVHYIAAEEEDWDYAPLVLAPDDRSYKSQYLNNGPQRIGRKYKKVRFMAYTDETFKTREAIQHESGILGPLLYGEVGDTLLIIFKNQASRPYNIYPHGITDVRPLYSRRLPKGVKHLKDFPILPGEIFKYKWTVTVEDGPTKSDPRCLTRYYSSFVNMERDLASGLIGPLLICYKESVDQRGNQIMSDKRNVILFSVFDENRSWYLTENIQRFLPNPAGVQLEDPEFQASNIMHSINGYVFDSLQLSVCLHEVAYWYILSIGAQTDFLSVFFSGYTFKHKMVYEDTLTLFPFSGETVFMSMENPGLWILGCHNSDFRNRGMTALLKVSSCDKNTGDYYEDSYEDISAYLLSKNNAIEPRSFSQNPPVLKRHQREITRTTLQSDQEEIDYDDTISVEMKKEDFDIYDEDENQSPRSFQKKTRHYFIAAVERLWDYGMSSSPHVLRNRAQSGSVPQFKKVVFQEFTDGSFTQPLYRGELNEHLGLLGPYIRAEVEDNIMVTFRNQASRPYSFYSSLISYEEDQRQGAEPRKNFVKPNETKTYFWKVQHHMAPTKDEFDCKAWAYFSDVDLEKDVHSGLIGPLLVCHTNTLNPAHGRQVTVQEFALFFTIFDETKSWYFTENMERNCRAPCNIQMEDPTFKENYRFHAINGYIMDTLPGLVMAQDQRIRWYLLSMGSNENIHSIHFSGHVFTVRKKEEYKMALYNLYPGVFETVEMLPSKAGIWRVECLIGEHLHAGMSTLFLVYSNKCQTPLGMASGHIRDFQITASGQYGQWAPKLARLHYSGSINAWSTKEPFSWIKVDLLAPMIIHGIKTQGARQKFSSLYISQFIIMYSLDGKKWQTYRGNSTGTLMVFFGNVDSSGIKHNIFNPPIIARYIRLHPTHYSIRSTLRMELMGCDLNSCSMPLGMESKAISDAQITASSYFTNMFATWSPSKARLHLQGRSNAWRPQVNNPKEWLQVDFQKTMKVTGVTTQGVKSLDTSMYVKEFLISSSQDGHQWTLFFQNGKVKVFQGNQDSFTPVVNSLDPPLLTRYLRIHPQSWVHQIALRMEVLGCEAQDLY

SEQ ID NO: 469 - DNA, 4371 bp, synthetic construct
  misc_feature 1..4371: note = Variant of human B-domain deleted Factor VIII
  source 1..4371: mol_type = other DNA
atgcagattgaactgtctacctgcttcttcctctgtttgctgaggttctgctttagcgccactagacggtactaccttggcgctgtggagctgtcctgggactatatgcagagtgatttgggagagcttcccgtcgacgcacgatttcctcctcgcgttccaaagtcatttcccttcaacacaagcgtggtgtacaagaagacgctcttcgtcgaattcaccgatcacctgttcaatatcgccaaacccagaccaccatggatgggtcttttggggcctaccatacaagcggaggtgtatgacacagttgttatcactctcaagaacatggcttctcatccggtaagtcttcacgcagtgggcgtgtcctactggaaagcttcagaaggagccgagtatgatgatcagacatcccagagggagaaagaagacgacaaggtatttccaggtgggtctcatacctatgtgtggcaagtgctcaaagagaatggccctatggcaagcgatccgctctgtttgacttacagctacctttcacacgttgacctcgtcaaggacctcaactccgggttgattggagccttgttggtatgcagggaaggatctcttgccaaagagaagacacagaccctccacaagtttatccttctctttgctgtgttcgatgagggcaaaagttggcatagcgaaacgaagaattccctcatgcaggatcgcgacgcagccagcgccagagcttggcccaagatgcacactgtgaacggatatgtcaataggtcacttcctggcttgattgggtgtcatcggaaaagtgtctactggcacgtgatcggaatggggacaacaccagaggtccactccatatttctcgaaggccataccttccttgttcgaaaccacagacaggcatccttggagatctctcccattacctttctcactgcccaaacgctccttatggacttgggtcagttccttctcttctgccatatcagctcacaccagcatgatggtatggaagcttatgtgaaagtcgacagttgtcctgaggagccacagttgcgcatgaagaataatgaagaagccgaggattacgacgacgatctcaccgattctgagatggacgtggtgaggtttgatgacgacaactctccctccttcattcaaatccggagcgtggcgaagaaacaccccaagacttgggtccactatatagcggcggaagaggaggattgggattacgctcctcttgtattggcaccagatgaccgctcatacaaaagccagtacctcaacaacggaccgcagagaattggccggaagtataagaaagtgcgatttatggcctatacagacgaaacctttaagacaagggaggccatccagcatgagagtgggattttgggacctcttctttacggcgaagttggtgataccctcctcatcatcttcaagaatcaagcttctcgcccctataacatttacccacacgggatcactgacgttaggcctttgtatagcagaagacttcccaaaggcgtgaagcatctcaaagacttccccattttgccaggcgagatctttaagtacaaatggaccgtcacagtggaagatggaccgactaaatcagaccctcgatgccttacgcggtactattcctccttcgtgaatatggagagagatttggcaagcggactcataggaccactcctcatctgttacaaggaatctgtagaccagaggggtaaccagattatgagtgataaacgcaatgtgatcctttttagcgtcttcgacgagaaccggtcctggtacttgaccgagaatatacaaaggttccttcccaaccccgcaggcgttcagttggaagaccctgagtttcaggccagcaatattatgcactcaatcaacggctatgtgtttgatagtctccagctttctgtttgcctccatgaagtagcctattggtacatcttgtcaattggtgctcaaacagacttcctctccgtcttcttctccggctacacctttaagcacaagatggtgtatgaggacactctcacactctttccattttctggagaaaccgtgttcatgagcatggagaatccaggcctttggatcttgggttgccacaacagtgattttcgcaatcggggaatgactgctctcctcaaagtcagcagctgtgataagaacacaggcgactattacgaagattcttacgaggacataagtgcctacttgttgtccaagaataacgccattgagcccagatcattctcccagaatcctcccgtgcttaaaaggcatcagcgcgaaatcaccagaactactcttcagtctgatcaagaggagattgactatgacgacaccataagcgtggaaatgaagaaggaggatttcgatatctatgacgaagatgagaaccagtctccgcggagctttcagaagaagacgcgacactacttcattgcagcagtcgaaaggctttgggactacggtatgtcatcatcccctcatgtgttgcgcaatagagctcagagtggaagtgttccacagttcaagaaagtcgtctttcaagagtttacagatggcagcttcacacagcctctctatcggggcgagcttaacgaacatttgggactccttggtccctatatccgagccgaagtggaggacaacattatggttacctttaggaatcaagcctctcgcccctacagcttctactcctccctcatcagttatgaggaggatcagagacaaggcgctgaaccacggaagaactttgtgaaaccgaatgagacgaagacctacttctggaaagtacagcaccacatggcccccacaaaagacgaattcgattgcaaagcatgggcgtatttttcagacgttgacttggagaaagatgtacattcaggacttattggtcctttgttggtgtgtcacactaacactctcaatccagcccatggcaggcaggtgacagtccaggaattcgctcttttctttaccatctttgatgagaccaagtcctggtacttcacggaaaacatggagcgcaattgcagagccccctgtaacatacagatggaggaccctacctttaaggaaaattatcggttccacgcaatcaacggatacattatggatacactccctggccttgtgatggctcaggaccaacgaatcaggtggtacctcctcagcatgggttctaatgagaacatacactccattcacttttcaggacatgtgttcactgtccggaagaaagaagagtataagatggccctctacaatttgtatccaggcgtgtttgagaccgttgaaatgcttccctctaaagctggcatctggagagtagagtgcttgatcggagaacatcttcacgcaggtatgagcaccttgttcctcgtgtacagcaacaaatgtcagaccccacttggcatggccagtggacacattcgcgactttcagatcacagcatctggccagtatggacaatgggccccaaagttggctcgcctccattactccggtagcataaatgcgtggtccactaaagaacctttcagctggattaaggtcgatcttcttgcccccatgatcatccacggcattaagacacagggagcgaggcagaaaatgtcctccctctacatctcacagttcattattatgtatagtttggacggcaagaagtggcaaacttatagaggtaacagtactggaacactcatggtgttcttcggcaacgttgatagctctggcatcaaacacaacatctttaatcctcccataatagctcggtacatcagattgcatccgacccactacagcattaggagtacactccgaatggagcttatgggttgcgacttgaattcctgttcaatgccactcggaatggagtctaaagccatctctgatgcacagataaccgccagtagctactttacgaacatgtttgctacgtggtcaccctctaaggcaaggcttcatttgcaaggccggtctaatgcctggagacctcaggtgaacaacccgaaagaatggctccaggtggactttcagaagaccatgaaagtaacaggtgtcactactcagggagttaagtccttggataccagcatgtatgtgaaggagttccttatttcctcatcacaagatggccaccagtggaccctcttctttcagaatggtaaggtcaaagtgtttcagggcaatcaagacagcttcacacccgtggtgaacagtcttgatcctccactcttgacacgataccttcgaatccatccacagtcttgggttcaccagattgcattgcgcatggaagtacttggatgcgaggctcaggacctctac

SEQ ID NO: 470 - protein, 1457 aa, synthetic construct
  REGION 1..1457: note = Variant of human B-domain deleted Factor VIII
MQIELSTCFFLCLLRFCFSATRRYYLGAVELSWDYMQSDLGELPVDARFPPRVPKSFPFNTSVVYKKTLFVEFTDHLFNIAKPRPPWMGLLGPTIQAEVYDTVVITLKNMASHPVSLHAVGVSYWKASEGAEYDDQTSQREKEDDKVFPGGSHTYVWQVLKENGPMASDPLCLTYSYLSHVDLVKDLNSGLIGALLVCREGSLAKEKTQTLHKFILLFAVFDEGKSWHSETKNSLMQDRDAASARAWPKMHTVNGYVNRSLPGLIGCHRKSVYWHVIGMGTTPEVHSIFLEGHTFLVRNHRQASLEISPITFLTAQTLLMDLGQFLLFCHISSHQHDGMEAYVKVDSCPEEPQLRMKNNEEAEDYDDDLTDSEMDVVRFDDDNSPSFIQIRSVAKKHPKTWVHYIAAEEEDWDYAPLVLAPDDRSYKSQYLNNGPQRIGRKYKKVRFMAYTDETFKTREAIQHESGILGPLLYGEVGDTLLIIFKNQASRPYNIYPHGITDVRPLYSRRLPKGVKHLKDFPILPGEIFKYKWTVTVEDGPTKSDPRCLTRYYSSFVNMERDLASGLIGPLLICYKESVDQRGNQIMSDKRNVILFSVFDENRSWYLTENIQRFLPNPAGVQLEDPEFQASNIMHSINGYVFDSLQLSVCLHEVAYWYILSIGAQTDFLSVFFSGYTFKHKMVYEDTLTLFPFSGETVFMSMENPGLWILGCHNSDFRNRGMTALLKVSSCDKNTGDYYEDSYEDISAYLLSKNNAIEPRSFSQNPPVLKRHQREITRTTLQSDQEEIDYDDTISVEMKKEDFDIYDEDENQSPRSFQKKTRHYFIAAVERLWDYGMSSSPHVLRNRAQSGSVPQFKKVVFQEFTDGSFTQPLYRGELNEHLGLLGPYIRAEVEDNIMVTFRNQASRPYSFYSSLISYEEDQRQGAEPRKNFVKPNETKTYFWKVQHHMAPTKDEFDCKAWAYFSDVDLEKDVHSGLIGPLLVCHTNTLNPAHGRQVTVQEFALFFTIFDETKSWYFTENMERNCRAPCNIQMEDPTFKENYRFHAINGYIMDTLPGLVMAQDQRIRWYLLSMGSNENIHSIHFSGHVFTVRKKEEYKMALYNLYPGVFETVEMLPSKAGIWRVECLIGEHLHAGMSTLFLVYSNKCQTPLGMASGHIRDFQITASGQYGQWAPKLARLHYSGSINAWSTKEPFSWIKVDLLAPMIIHGIKTQGARQKMSSLYISQFIIMYSLDGKKWQTYRGNSTGTLMVFFGNVDSSGIKHNIFNPPIIARYIRLHPTHYSIRSTLRMELMGCDLNSCSMPLGMESKAISDAQITASSYFTNMFATWSPSKARLHLQGRSNAWRPQVNNPKEWLQVDFQKTMKVTGVTTQGVKSLDTSMYVKEFLISSSQDGHQWTLFFQNGKVKVFQGNQDSFTPVVNSLDPPLLTRYLRIHPQSWVHQIALRMEVLGCEAQDLY

SEQ ID NO: 471 - DNA, 4371 bp, synthetic construct
  misc_feature 1..4371: note = Variant of human B-domain deleted Factor VIII
  source 1..4371: mol_type = other DNA
atgcagattgaactgtctacctgcttcttcctctgtttgctgaggttctgctttagcgccactagacggtactaccttggcgctgtggagctgtcctgggactatatgcagagtgatttgggagagcttcccgtcgacgcacgatttcctcctcgcgttccaaagtcatttcccttcaacacaagcgtggtgtacaagaagacgctcttcgtcgaattcaccgatcacctgttcaatatcgccaaacccagaccaccatggatgggtcttttggggcctaccatacaagcggaggtgtatgacacagttgttatcactctcaagaacatggcttctcatccggtaagtcttcacgcagtgggcgtgtcctactggaaagcttcagaaggagccgagtatgatgatcagacatcccagagggagaaagaagacgacaaggtatttccaggtgggtctcatacctatgtgtggcaagtgctcaaagagaatggccctatggcaagcgatccgctctgtttgacttacagctacctttcacacgttgacctcgtcaaggacctcaactccgggttgattggagccttgttggtatgcagggaaggatctcttgccaaagagaagacacagaccctccacaagtttatccttctctttgctgtgttcgatgagggcaaaagttggcatagcgaaacgaagaattccctcatgcaggatcgcgacgcagccagcgccagagcttggcccaagatgcacactgtgaacggatatgtcaataggtcacttcctggcttgtgggggtgtcatcggaaaagtgtctactggcacgtgatcggaatggggacaacaccagaggtccactccatatttctcgaaggccataccttccttgttcgaaaccacagacaggcatccttggagatctctcccattacctttctcactgcccaaacgctccttatggacttgggtcagttccttctcttctgccatatcagctcacaccagcatgatggtatggaagcttatgtgaaagtcgacagttgtcctgaggagccacagttgcgcatgaagaataatgaagaagccgaggattacgacgacgatctcaccgattctgagatggacgtggtgaggtttgatgacgacaactctccctccttcattcaaatccggagcgtggcgaagaaacaccccaagacttgggtccactatatagcggcggaagaggaggattgggattacgctcctcttgtattggcaccagatgaccgctcatacaaaagccagtacctcaacaacggaccgcagagaattggccggaagtataagaaagtgcgatttatggcctatacagacgaaacctttaagacaagggaggccatccagcatgagagtgggattttgggacctcttctttacggcgaagttggtgataccctcctcatcatcttcaagaatcaagcttctcgcccctataacatttacccacacgggatcactgacgttaggcctttgtatagcagaagacttcccaaaggcgtgaagcatctcaaagacttccccattttgccaggcgagatctttaagtacaaatggaccgtcacagtggaagatggaccgactaaatcagaccctcgatgccttacgcggtactattcctccttcgtgaatatggagagagatttggcaagcggactcataggaccactcctcatctgttacaaggaatctgtagaccagaggggtaaccagattatgagtgataaacgcaatgtgatcctttttagcgtcttcgacgagaaccggtcctggtacttgaccgagaatatacaaaggttccttcccaaccccgcaggcgttcagttggaagaccctgagtttcaggccagcaatattatgcactcaatcaacggctatgtgtttgatagtctccagctttctgtttgcctccatgaagtagcctattggtacatcttgtcaattggtgctcaaacagacttcctctccgtcttcttctccggctacacctttaagcacaagatggtgtatgaggacactctcacactctttccattttctggagaaaccgtgttcatgagcatggagaatccaggcctttggatcttgggttgccacaacagtgattttcgcaatcggggaatgactgctctcctcaaagtcagcagctgtgataagaacacaggcgactattacgaagattcttacgaggacataagtgcctacttgttgtccaagaataacgccattgagcccagatcattctcccagaatcctcccgtgcttaaaaggcatcagcgcgaaatcaccagaactactcttcagtctgatcaagaggagattgactatgacgacaccataagcgtggaaatgaagaaggaggatttcgatatctatgacgaagatgagaaccagtctccgcggagctttcagaagaagacgcgacactacttcattgcagcagtcgaaaggctttgggactacggtatgtcatcatcccctcatgtgttgcgcaatagagctcagagtggaagtgttccacagttcaagaaagtcgtctttcaagagtttacagatggcagcttcacacagcctctctatcggggcgagcttaacgaacatttgggactccttggtccctatatccgagccgaagtggaggacaacattatggttacctttaggaatcaagcctctcgcccctacagcttctactcctccctcatcagttatgaggaggatcagagacaaggcgctgaaccacggaagaactttgtgaaaccgaatgagacgaagacctacttctggaaagtacagcaccacatggcccccacaaaagacgaattcgattgcaaagcatgggcgtatttttcagacgttgacttggagaaagatgtacattcaggacttattggtcctttgttggtgtgtcacactaacactctcaatccagcccatggcaggcaggtgacagtccaggaattcgctcttttctttaccatctttgatgagaccaagtcctggtacttcacggaaaacatggagcgcaattgcagagccccctgtaacatacagatggaggaccctacctttaaggaaaattatcggttccacgcaatcaacggatacattatggatacactccctggccttgtgatggctcaggaccaacgaatcaggtggtacctcctcagcatgggttctaatgagaacatacactccattcacttttcaggacatgtgttcactgtccggaagaaagaagagtataagatggccctctacaatttgtatccaggcgtgtttgagaccgttgaaatgcttccctctaaagctggcatctggagagtagagtgcttgatcggagaacatcttcacgcaggtatgagcaccttgttcctcgtgtacagcaacaaatgtcagaccccacttggcatggccagtggacacattcgcgactttcagatcacagcatctggccagtatggacaatgggccccaaagttggctcgcctccattactccggtagcataaatgcgtggtccactaaagaacctttcagctggattaaggtcgatcttcttgcccccatgatcatccacggcattaagacacagggagcgaggcagaaattctcctccctctacatctcacagttcattattatgtatagtttggacggcaagaagtggcaaacttatagaggtaacagtactggaacactcatggtgttcttcggcaacgttgatagctctggcatcaaacacaacatctttaatcctcccataatagctcggtacatcagattgcatccgacccactacagcattaggagtacactccgaatggagcttatgggttgcgacttgaattcctgttcaatgccactcggaatggagtctaaagccatctctgatgcacagataaccgccagtagctactttacgaacatgtttgctacgtggtcaccctctaaggcaaggcttcatttgcaaggccggtctaatgcctggagacctcaggtgaacaacccgaaagaatggctccaggtggactttcagaagaccatgaaagtaacaggtgtcactactcagggagttaagtccttggataccagcatgtatgtgaaggagttccttatttcctcatcacaagatggccaccagtggaccctcttctttcagaatggtaaggtcaaagtgtttcagggcaatcaagacagcttcacacccgtggtgaacagtcttgatcctccactcttgacacgataccttcgaatccatccacagtcttgggttcaccagattgcattgcgcatggaagtacttggatgcgaggctcaggacctctac

SEQ ID NO: 472 - protein, 1457 aa, synthetic construct
  REGION 1..1457: note = Variant of human B-domain deleted Factor VIII
MQIELSTCFFLCLLRFCFSATRRYYLGAVELSWDYMQSDLGELPVDARFPPRVPKSFPFNTSVVYKKTLFVEFTDHLFNIAKPRPPWMGLLGPTIQAEVYDTVVITLKNMASHPVSLHAVGVSYWKASEGAEYDDQTSQREKEDDKVFPGGSHTYVWQVLKENGPMASDPLCLTYSYLSHVDLVKDLNSGLIGALLVCREGSLAKEKTQTLHKFILLFAVFDEGKSWHSETKNSLMQDRDAASARAWPKMHTVNGYVNRSLPGLWGCHRKSVYWHVIGMGTTPEVHSIFLEGHTFLVRNHRQASLEISPITFLTAQTLLMDLGQFLLFCHISSHQHDGMEAYVKVDSCPEEPQLRMKNNEEAEDYDDDLTDSEMDVVRFDDDNSPSFIQIRSVAKKHPKTWVHYIAAEEEDWDYAPLVLAPDDRSYKSQYLNNGPQRIGRKYKKVRFMAYTDETFKTREAIQHESGILGPLLYGEVGDTLLIIFKNQASRPYNIYPHGITDVRPLYSRRLPKGVKHLKDFPILPGEIFKYKWTVTVEDGPTKSDPRCLTRYYSSFVNMERDLASGLIGPLLICYKESVDQRGNQIMSDKRNVILFSVFDENRSWYLTENIQRFLPNPAGVQLEDPEFQASNIMHSINGYVFDSLQLSVCLHEVAYWYILSIGAQTDFLSVFFSGYTFKHKMVYEDTLTLFPFSGETVFMSMENPGLWILGCHNSDFRNRGMTALLKVSSCDKNTGDYYEDSYEDISAYLLSKNNAIEPRSFSQNPPVLKRHQREITRTTLQSDQEEIDYDDTISVEMKKEDFDIYDEDENQSPRSFQKKTRHYFIAAVERLWDYGMSSSPHVLRNRAQSGSVPQFKKVVFQEFTDGSFTQPLYRGELNEHLGLLGPYIRAEVEDNIMVTFRNQASRPYSFYSSLISYEEDQRQGAEPRKNFVKPNETKTYFWKVQHHMAPTKDEFDCKAWAYFSDVDLEKDVHSGLIGPLLVCHTNTLNPAHGRQVTVQEFALFFTIFDETKSWYFTENMERNCRAPCNIQMEDPTFKENYRFHAINGYIMDTLPGLVMAQDQRIRWYLLSMGSNENIHSIHFSGHVFTVRKKEEYKMALYNLYPGVFETVEMLPSKAGIWRVECLIGEHLHAGMSTLFLVYSNKCQTPLGMASGHIRDFQITASGQYGQWAPKLARLHYSGSINAWSTKEPFSWIKVDLLAPMIIHGIKTQGARQKFSSLYISQFIIMYSLDGKKWQTYRGNSTGTLMVFFGNVDSSGIKHNIFNPPIIARYIRLHPTHYSIRSTLRMELMGCDLNSCSMPLGMESKAISDAQITASSYFTNMFATWSPSKARLHLQGRSNAWRPQVNNPKEWLQVDFQKTMKVTGVTTQGVKSLDTSMYVKEFLISSSQDGHQWTLFFQNGKVKVFQGNQDSFTPVVNSLDPPLLTRYLRIHPQSWVHQIALRMEVLGCEAQDLY

SEQ ID NO: 473 - DNA, 4371 bp, synthetic construct
  misc_feature 1..4371: note = Variant of human B-domain deleted Factor VIII
  source 1..4371: mol_type = other DNA
atgcagattgaactgtctacctgcttcttcctctgtttgctgaggttctgctttagcgccactagacggtactaccttggcgctgtggagctgtcctgggactatatgcagagtgatttgggagagcttcccgtcgacgcacgatttcctcctcgcgttccaaagtcatttcccttcaacacaagcgtggtgtacaagaagacgctcttcgtcgaattcaccgatcacctgttcaatatcgccaaacccagaccaccatggatgggtcttttggggcctaccatacaagcggaggtgtatgacacagttgttatcactctcaagaacatggcttctcatccggtaagtcttcacgcagtgggcgtgtcctactggaaagcttcagaaggagccgagtatgatgatcagacatcccagagggagaaagaagacgacaaggtatttccaggtgggtctcatacctatgtgtggcaagtgctcaaagagaatggccctatggcaagcgatccgctctgtttgacttacagctacctttcacacgttgacctcgtcaaggacctcaactccgggttgattggagccttgttggtatgcagggaaggatctcttgccaaagagaagacacagaccctccacaagtttatccttctctttgctgtgttcgatgagggcaaaagttggcatagcgaaacgaagaattccctcatgcaggatcgcgacgcagccagcgccagagcttggcccaagatgcacactgtgaacggatatgtcaataggtcacttcctggcttgattgggtgtcatcggaaaagtgtctactggcacgtgatcggaatggggacaacaccagaggtccactccatatttctcgaaggccataccttccttgttcgaaaccacagacaggcatccttggagatctctcccattacctttctcactgcccaaacgctccttatggacttgggtcagttccttctcttctgccatatcagctcacaccagcatgatggtatggaagcttatgtgaaagtcgacagttgtcctgaggagccacagttgcgcatgaagaataatgaagaagccgaggattacgacgacgatctcaccgattctgagatggacgtggtgaggtttgatgacgacaactctccctccttcattcaaatccggagcgtggcgaagaaacaccccaagacttgggtccactatatagcggcggaagaggaggattgggattacgctcctcttgtattggcaccagatgaccgctcatacaaaagccagtacctcaacaacggaccgcagagaattggccggaagtataagaaagtgcgatttatggcctatacagacgaaacctttaagacaagggaggccatccagcatgagagtgggattttgggacctcttctttacggcgaagttggtgataccctcctcatcatcttcaagaatcaagcttctcgcccctataacatttacccacacgggatcactgacgttaggcctttgtatagcagaagacttcccaaaggcgtgaagcatctcaaagacttccccattttgccaggcgagatctttaagtacaaatggaccgtcacagtggaagatggaccgactaaatcagaccctcgatgccttacgcggtactattcctccttcgtgaatatggagagagatttggcaagcggactcataggaccactcctcatctgttacaaggaatctgtagaccagaggggtaaccagattatgagtgataaacgcaatgtgatcctttttagcgtcttcgacgagaaccggtcctggtacttgaccgagaatatacaaaggttccttcccaaccccgcaggcgttcagttggaagaccctgagtttcaggccagcaatattatgcactcaatcaacggctatgtgtttgatagtctccagctttctgtttgcctccatgaagtagcctattggtacatcttgtcaattggtgctcaaacagacttcctctccgtcttcttctccggctacacctttaagcacaagatggtgtatgaggacactctcacactctttccattttctggagaaaccgtgttcatgagcatggagaatccaggcctttggatcttgggttgccacaacagtgattttcgcaatcggggaatgactgctctcctcaaagtcagcagctgtgataagaacacaggcgactattacgaagattcttacgaggacataagtgcctacttgttgtccaagaataacgccattgagcccagatcattctcccagaatcctcccgtgcttaaaaggcatcagcgcgaaatcaccagaactactcttcagtctgatcaagaggagattgactatgacgacaccataagcgtggaaatgaagaaggaggatttcgatatctatgacgaagatgagaaccagtctccgcggagctttcagaagaagacgcgacactacttcattgcagcagtcgaaaggctttgggactacggtatgtcatcatcccctcatgtgttgcgcaatagagctcagagtggaagtgttccacagttcaagaaagtcgtctttcaagagtttacagatggcagcttcacacagcctctctatcggggcgagcttaacgaacatttgggactccttggtccctatatccgagccgaagtggaggacaacattatggttacctttaggaatcaagcctctcgcccctacagcttctactcctccctcatcagttatgaggaggatcagagacaaggcgctgaaccacggaagaactttgtgaaaccgaatgagacgaagacctacttctggaaagtacagcaccacatggcccccacaaaagacgaattcgattgcaaagcatgggcgtatttttcagacgttgacttggagaaagatgtacattcaggacttattggtcctttgttggtgtgtcacactaacactctcaatccagcccatggcaggcaggtgacagtccaggaattcgctcttttctttaccatctttgatgagaccaagtcctggtacttcacggaaaacatggagcgcaattgcagagccccctgtaacatacagatggaggaccctacctttaaggaaaattatcggttccacgcaatcaacggatacattatggatacactccctggccttgtgatggctcaggaccaacgaatcaggtggtacctcctcagcatgggttctaatgagaacatacactccattcacttttcaggacatgtgttcactgtccggaagaaagaagagtataagatggccctctacaatttgtatccaggcgtgtttgagaccgttgaaatgcttccctctaaagctggcatctggagagtagagtgcttgatcggagaacatcttcacgcaggtatgagcaccttgttcctcgtgtacagcaacaaatgtcagaccccacttggcatggccagtggacacattcgcgactttcagatcacagcatctggccagtatggacaatgggccccaaagttggctcgcctccattactccggtagcataaatgcgtggtccactaaagaacctttcagctggattaaggtcgatcttcttgcccccatgatcatccacggcattaagacacagggagcgaggcagaaattctcctccctctacatctcacagttcattattatgtatagtttggacggcaagaagtggcaaacttatagaggtaacagtactggaacactcatggtgttcttcggcaacgttgatagctctggcatcaaacacaacatctttaatcctcccataatagctcggtacatcagattgcatccgacccactacagcattaggagtacactccgaatggagcttatgggttgcgacttgaattcctgttcaatgccactcggaatggagtctaaagccatctctgatgcacagataaccgccagtagctactttacgaacatgtttgctacgtggtcaccctctaaggcaaggcttcatttgcaaggccggtctaatgcctggagacctcaggtgaacaacccgaaagaatggctccaggtggactttcagaagaccatgaaagtaacaggtgtcactactcagggagttaagtccttggataccagcatgtatgtgaaggagttccttatttcctcatcacaagatggccaccagtggaccctcttctttcagaatggtaaggtcaaagtgtttcagggcaatcaagacagcttcacacccgtggtgaacagtcttgatcctccactcttgacacgataccttcgaatccatccacagtcttgggttgagcagattgcattgcgcatggaagtacttggatgcgaggctcaggacctctac

SEQ ID NO: 474 - protein, 1457 aa, synthetic construct
  REGION 1..1457: note = Variant of human B-domain deleted Factor VIII
MQIELSTCFFLCLLRFCFSATRRYYLGAVELSWDYMQSDLGELPVDARFPPRVPKSFPFNTSVVYKKTLFVEFTDHLFNIAKPRPPWMGLLGPTIQAEVYDTVVITLKNMASHPVSLHAVGVSYWKASEGAEYDDQTSQREKEDDKVFPGGSHTYVWQVLKENGPMASDPLCLTYSYLSHVDLVKDLNSGLIGALLVCREGSLAKEKTQTLHKFILLFAVFDEGKSWHSETKNSLMQDRDAASARAWPKMHTVNGYVNRSLPGLIGCHRKSVYWHVIGMGTTPEVHSIFLEGHTFLVRNHRQASLEISPITFLTAQTLLMDLGQFLLFCHISSHQHDGMEAYVKVDSCPEEPQLRMKNNEEAEDYDDDLTDSEMDVVRFDDDNSPSFIQIRSVAKKHPKTWVHYIAAEEEDWDYAPLVLAPDDRSYKSQYLNNGPQRIGRKYKKVRFMAYTDETFKTREAIQHESGILGPLLYGEVGDTLLIIFKNQASRPYNIYPHGITDVRPLYSRRLPKGVKHLKDFPILPGEIFKYKWTVTVEDGPTKSDPRCLTRYYSSFVNMERDLASGLIGPLLICYKESVDQRGNQIMSDKRNVILFSVFDENRSWYLTENIQRFLPNPAGVQLEDPEFQASNIMHSINGYVFDSLQLSVCLHEVAYWYILSIGAQTDFLSVFFSGYTFKHKMVYEDTLTLFPFSGETVFMSMENPGLWILGCHNSDFRNRGMTALLKVSSCDKNTGDYYEDSYEDISAYLLSKNNAIEPRSFSQNPPVLKRHQREITRTTLQSDQEEIDYDDTISVEMKKEDFDIYDEDENQSPRSFQKKTRHYFIAAVERLWDYGMSSSPHVLRNRAQSGSVPQFKKVVFQEFTDGSFTQPLYRGELNEHLGLLGPYIRAEVEDNIMVTFRNQASRPYSFYSSLISYEEDQRQGAEPRKNFVKPNETKTYFWKVQHHMAPTKDEFDCKAWAYFSDVDLEKDVHSGLIGPLLVCHTNTLNPAHGRQVTVQEFALFFTIFDETKSWYFTENMERNCRAPCNIQMEDPTFKENYRFHAINGYIMDTLPGLVMAQDQRIRWYLLSMGSNENIHSIHFSGHVFTVRKKEEYKMALYNLYPGVFETVEMLPSKAGIWRVECLIGEHLHAGMSTLFLVYSNKCQTPLGMASGHIRDFQITASGQYGQWAPKLARLHYSGSINAWSTKEPFSWIKVDLLAPMIIHGIKTQGARQKFSSLYISQFIIMYSLDGKKWQTYRGNSTGTLMVFFGNVDSSGIKHNIFNPPIIARYIRLHPTHYSIRSTLRMELMGCDLNSCSMPLGMESKAISDAQITASSYFTNMFATWSPSKARLHLQGRSNAWRPQVNNPKEWLQVDFQKTMKVTGVTTQGVKSLDTSMYVKEFLISSSQDGHQWTLFFQNGKVKVFQGNQDSFTPVVNSLDPPLLTRYLRIHPQSWVEQIALRMEVLGCEAQDLY

SEQ ID NO: 475 - DNA, 4371 bp, synthetic construct
  misc_feature 1..4371: note = Variant of human B-domain deleted Factor VIII
  source 1..4371: mol_type = other DNA
atgcagattgaactgtctacctgcttcttcctctgtttgctgaggttctgctttagcgccactagacggtactaccttggcgctgtggagctgtcctgggactatatgcagagtgatttgggagagcttcccgtcgacgcacgatttcctcctcgcgttccaaagtcatttcccttcaacacaagcgtggtgtacaagaagacgctcttcgtcgaattcaccgatcacctgttcaatatcgccaaacccagaccaccatggatgggtcttttggggcctaccatacaagcggaggtgtatgacacagttgttatcactctcaagaacatggcttctcatccggtaagtcttcacgcagtgggcgtgtcctactggaaagcttcagaaggagccgagtatgatgatcagacatcccagagggagaaagaagacgacaaggtatttccaggtgggtctcatacctatgtgtggcaagtgctcaaagagaatggccctatggcaagcgatccgctctgtttgacttacagctacctttcacacgttgacctcgtcaaggacctcaactccgggttgattggagccttgttggtatgcagggaaggatctcttgccaaagagaagacacagaccctccacaagtttatccttctctttgctgtgttcgatgagggcaaaagttggcatagcgaaacgaagaattccctcatgcaggatcgcgacgcagccagcgccagagcttggcccaagatgcacactgtgaacggatatgtcaataggtcacttcctggcttgattgggtgtcatcggaaaagtgtctactggcacgtgatcggaatggggacaacaccagaggtccactccatatttctcgaaggccataccttccttgttcgaaaccacagacaggcatccttggagatctctcccattacctttctcactgcccaaacgctccttatggacttgggtcagttccttctcttctgccatatcagctcacaccagcatgatggtatggaagcttatgtgaaagtcgacagttgtcctgaggagccacagttgcgcatgaagaataatgaagaagccgaggattacgacgacgatctcaccgattctgagatggacgtggtgaggtttgatgacgacaactctccctccttcattcaaatccggagcgtggcgaagaaacaccccaagacttgggtccactatatagcggcggaagaggaggattgggattacgctcctcttgtattggcaccagatgaccgctcatacaaaagccagtacctcaacaacggaccgcagagaattggccggaagtataagaaagtgcgatttatggcctatacagacgaaacctttaagacaagggaggccatccagcatgagagtgggattttgggacctcttctttacggcgaagttggtgataccctcctcatcatcttcaagaatcaagcttctcgcccctataacatttacccacacgggatcactgacgttaggcctttgtatagcagaagacttcccaaaggcgtgaagcatctcaaagacttccccattttgccaggcgagatctttaagtacaaatggaccgtcacagtggaagatggaccgactaaatcagaccctcgatgccttacgcggtactattcctccttcgtgaatatggagagagatttggcaagcggactcataggaccactcctcatctgttacaaggaatctgtagaccagaggggtaaccagattatgagtgataaacgcaatgtgatcctttttagcgtcttcgacgagaaccggtcctggtacttgaccgagaatatacaaaggttccttcccaaccccgcaggcgttcagttggaagaccctgagtttcaggccagcaatattatgcactcaatcaacggctatgtgtttgatagtctccagctttctgtttgcctccatgaagtagcctattggtacatcttgtcaattggtgctcaaacagacttcctctccgtcttcttctccggctacacctttaagcacaagatggtgtatgaggacactctcacactctttccattttctggagaaaccgtgttcatgagcatggagaatccaggcctttggatcttgggttgccacaacagtgattttcgcaatcggggaatgactgctctcctcaaagtcagcagctgtgataagaacacaggcgactattacgaagattcttacgaggacataagtgcctacttgttgtccaagaataacgccattgagcccagatcattctcccagaatcctcccgtgcttaaaaggcatcagcgcgaaatcaccagaactactcttcagtctgatcaagaggagattgactatgacgacaccataagcgtggaaatgaagaaggaggatttcgatatctatgacgaagatgagaaccagtctccgcggagctttcagaagaagacgcgacactacttcattgcagcagtcgaaaggctttgggactacggtatgtcatcatcccctcatgtgttgcgcaatagagctcagagtggaagtgttccacagttcaagaaagtcgtctttcaagagtttacagatggcagcttcacacagcctctctatcggggcgagcttaacgaacatttgggactccttggtccctatatccgagccgaagtggaggacaacattatggttacctttaggaatcaagcctctcgcccctacagcttctactcctccctcatcagttatgaggaggatcagagacaaggcgctgaaccacggaagaactttgtgaaaccgaatgagacgaagacctacttctggaaagtacagcaccacatggcccccacaaaagacgaattcgattgcaaagcatgggcgtatttttcagacgttgacttggagaaagatgtacattcaggacttattggtcctttgttggtgtgtcacactaacactctcaatccagcccatggcaggcaggtgacagtccaggaattcgctcttttctttaccatctttgatgagaccaagtcctggtacttcacggaaaacatggagcgcaattgcagagccccctgtaacatacagatggaggaccctacctttaaggaaaattatcggttccacgcaatcaacggatacattatggatacactccctggccttgtgatggctcaggaccaacgaatcaggtggtacctcctcagcatgggttctaatgagaacatacactccattcacttttcaggacatgtgttcactgtccggaagaaagaagagtataagatggccctctacaatttgtatccaggcgtgtttgagaccgttgaaatgcttccctctaaagctggcatctggagagtagagtgcttgatcggagaacatcttcacgcaggtatgagcaccttgttcctcgtgtacagcaacaaatgtcagaccccacttggcatggccagtggacacattcgcgactttcagatcacagcatctggccagtatggacaatgggccccaaagttggctcgcctccattactccggtagcataaatgcgtggtccactaaagaacctttcagctggattaaggtcgatcttcttgcccccatgatcatccacggcattaagacacagggagcgaggcagaaattctcctccctctacatctcacagttcattattatgtatagtttggacggcaagaagtggcaaacttatagaggtaacagtactggaacactcatggtgttcttcggcaacgttgatagctctggcatcaaacacaacatctttaatcctcccataatagctcggtacatcagattgcatccgacccactacagcattaggagtacactccgaatggagcttatgggttgcgacttgaattcctgttcaatgccactcggaatggagtctaaagccatctctgatgcacagataaccgccagtagctactttacgaacatgtttgctacgtggtcaccctctaaggcaaggcttcatttgcaaggccggtctaatgcctggagacctcaggtgaacaacccgaaagaatggctccaggtggactttcagaagaccatgaaagtaacaggtgtcactactcagggagttaagtccttggataccagcatgtatgtgaaggagttccttatttcctcatcacaagatggccaccagtggaccctcttctttcagaatggtaaggtcaaagtgtttcagggcaatcaagacagcttcacacccgtggtgaacagtcttgatcctccactcttgacacgataccttcgaatccatccacagtcttggctgcaccagattgcattgcgcatggaagtacttggatgcgaggctcaggacctctac

SEQ ID NO: 476 - protein, 1457 aa, synthetic construct
  REGION 1..1457: note = Variant of human B-domain deleted Factor VIII
MQIELSTCFFLCLLRFCFSATRRYYLGAVELSWDYMQSDLGELPVDARFPPRVPKSFPFNTSVVYKKTLFVEFTDHLFNIAKPRPPWMGLLGPTIQAEVYDTVVITLKNMASHPVSLHAVGVSYWKASEGAEYDDQTSQREKEDDKVFPGGSHTYVWQVLKENGPMASDPLCLTYSYLSHVDLVKDLNSGLIGALLVCREGSLAKEKTQTLHKFILLFAVFDEGKSWHSETKNSLMQDRDAASARAWPKMHTVNGYVNRSLPGLIGCHRKSVYWHVIGMGTTPEVHSIFLEGHTFLVRNHRQASLEISPITFLTAQTLLMDLGQFLLFCHISSHQHDGMEAYVKVDSCPEEPQLRMKNNEEAEDYDDDLTDSEMDVVRFDDDNSPSFIQIRSVAKKHPKTWVHYIAAEEEDWDYAPLVLAPDDRSYKSQYLNNGPQRIGRKYKKVRFMAYTDETFKTREAIQHESGILGPLLYGEVGDTLLIIFKNQASRPYNIYPHGITDVRPLYSRRLPKGVKHLKDFPILPGEIFKYKWTVTVEDGPTKSDPRCLTRYYSSFVNMERDLASGLIGPLLICYKESVDQRGNQIMSDKRNVILFSVFDENRSWYLTENIQRFLPNPAGVQLEDPEFQASNIMHSINGYVFDSLQLSVCLHEVAYWYILSIGAQTDFLSVFFSGYTFKHKMVYEDTLTLFPFSGETVFMSMENPGLWILGCHNSDFRNRGMTALLKVSSCDKNTGDYYEDSYEDISAYLLSKNNAIEPRSFSQNPPVLKRHQREITRTTLQSDQEEIDYDDTISVEMKKEDFDIYDEDENQSPRSFQKKTRHYFIAAVERLWDYGMSSSPHVLRNRAQSGSVPQFKKVVFQEFTDGSFTQPLYRGELNEHLGLLGPYIRAEVEDNIMVTFRNQASRPYSFYSSLISYEEDQRQGAEPRKNFVKPNETKTYFWKVQHHMAPTKDEFDCKAWAYFSDVDLEKDVHSGLIGPLLVCHTNTLNPAHGRQVTVQEFALFFTIFDETKSWYFTENMERNCRAPCNIQMEDPTFKENYRFHAINGYIMDTLPGLVMAQDQRIRWYLLSMGSNENIHSIHFSGHVFTVRKKEEYKMALYNLYPGVFETVEMLPSKAGIWRVECLIGEHLHAGMSTLFLVYSNKCQTPLGMASGHIRDFQITASGQYGQWAPKLARLHYSGSINAWSTKEPFSWIKVDLLAPMIIHGIKTQGARQKFSSLYISQFIIMYSLDGKKWQTYRGNSTGTLMVFFGNVDSSGIKHNIFNPPIIARYIRLHPTHYSIRSTLRMELMGCDLNSCSMPLGMESKAISDAQITASSYFTNMFATWSPSKARLHLQGRSNAWRPQVNNPKEWLQVDFQKTMKVTGVTTQGVKSLDTSMYVKEFLISSSQDGHQWTLFFQNGKVKVFQGNQDSFTPVVNSLDPPLLTRYLRIHPQSWLHQIALRMEVLGCEAQDLY

SEQ ID NO: 477 - DNA, 4371 bp, synthetic construct
  misc_feature 1..4371: note = Variant of human B-domain deleted Factor VIII
  source 1..4371: mol_type = other DNA
atgcagattgaactgtctacctgcttcttcctctgtttgctgaggttctgctttagcgccactagacggtactaccttggcgctgtggagctgtcctgggactatatgcagagtgatttgggagagcttcccgtcgacgcacgatttcctcctcgcgttccaaagtcatttcccttcaacacaagcgtggtgtacaagaagacgctcttcgtcgaattcaccgatcacctgttcaatatcgccaaacccagaccaccatggatgggtcttttggggcctaccatacaagcggaggtgtatgacacagttgttatcactctcaagaacatggcttctcatccggtaagtcttcacgcagtgggcgtgtcctactggaaagcttcagaaggagccgagtatgatgatcagacatcccagagggagaaagaagacgacaaggtatttccaggtgggtctcatacctatgtgtggcaagtgctcaaagagaatggccctatggcaagcgatccgctctgtttgacttacagctacctttcacacgttgacctcgtcaaggacctcaactccgggttgattggagccttgttggtatgcagggaaggatctcttgccaaagagaagacacagaccctccacaagtttatccttctctttgctgtgttcgatgagggcaaaagttggcatagcgaaacgaagaattccctcatgcaggatcgcgacgcagccagcgccagagcttggcccaagatgcacactgtgaacggatatgtcaataggtcacttcctggcttgattgggtgtcatcggaaaagtgtctactggcacgtgatcggaatggggacaacaccagaggtccactccatatttctcgaaggccataccttccttgttcgaaaccacagacaggcatccttggagatctctcccattacctttctcactgcccaaacgctccttatggacttgggtcagttccttctcttctgccatatcagctcacaccagcatgatggtatggaagcttatgtgaaagtcgacagttgtcctgaggagccacagttgcgcatgaagaataatgaagaagccgaggattacgacgacgatctcaccgattctgagatggacgtggtgaggtttgatgacgacaactctccctccttcattcaaatccggagcgtggcgaagaaacaccccaagacttgggtccactatatagcggcggaagaggaggattgggattacgctcctcttgtattggcaccagatgaccgctcatacaaaagccagtacctcaacaacggaccgcagagaattggccggaagtataagaaagtgcgatttatggcctatacagacgaaacctttaagacaagggaggccatccagcatgagagtgggattttgggacctcttctttacggcgaagttggtgataccctcctcatcatcttcaagaatcaagcttctcgcccctataacatttacccacacgggatcactgacgttaggcctttgtatagcagaagacttcccaaaggcgtgaagcatctcaaagacttccccattttgccaggcgagatctttaagtacaaatggaccgtcacagtggaagatggaccgactaaatcagaccctcgatgccttacgcggtactattcctccttcgtgaatatggagagagatttggcaagcggactcataggaccactcctcatctgttacaaggaatctgtagaccagaggggtaaccagattatgagtgataaacgcaatgtgatcctttttagcgtcttcgacgagaaccggtcctggtacttgaccgagaatatacaaaggttccttcccaaccccgcaggcgttcagttggaagaccctgagtttcaggccagcaatattatgcactcaatcaacggctatgtgtttgatagtctccagctttctgtttgcctccatgaagtagcctattggtacatcttgtcaattggtgctcaaacagacttcctctccgtcttcttctccggctacacctttaagcacaagatggtgtatgaggacactctcacactctttccattttctggagaaaccgtgttcatgagcatggagaatccaggcctttggatcttgggttgccacaacagtgattttcgcaatcggggaatgactgctctcctcaaagtcagcagctgtgataagaacacaggcgactattacgaagattcttacgaggacataagtgcctacttgttgtccaagaataacgccattgagcccagatcattctcccagaatcctcccgtgcttaaaaggcatcagcgcgaaatcaccagaactactcttcagtctgatcaagaggagattgactatgacgacaccataagcgtggaaatgaagaaggaggatttcgatatctatgacgaagatgagaaccagtctccgcggagctttcagaagaagacgcgacactacttcattgcagcagtcgaaaggctttgggactacggtatgtcatcatcccctcatgtgttgcgcaatagagctcagagtggaagtgttccacagttcaagaaagtcgtctttcaagagtttacagatggcagcttcacacagcctctctatcggggcgagcttaacgaacatttgggactccttggtccctatatccgagccgaagtggaggacaacattatggttacctttaggaatcaagcctctcgcccctacagcttctactcctccctcatcagttatgaggaggatcagagacaaggcgctgaaccacggaagaactttgtgaaaccgaatgagacgaagacctacttctggaaagtacagcaccacatggcccccacaaaagacgaattcgattgcaaagcatgggcgtatttttcagacgttgacttggagaaagatgtacattcaggacttattggtcctttgttggtgtgtcacactaacactctcaatccagcccatggcaggcaggtgacagtccaggaattcgctcttttctttaccatctttgatgagaccaagtcctggtacttcacggaaaacatggagcgcaattgcagagccccctgtaacatacagatggaggaccctacctttaaggaaaattatcggttccacgcaatcaacggatacattatggatacactccctggccttgtgatggctcaggaccaacgaatcaggtggtacctcctcagcatgggttctaatgagaacatacactccattcacttttcaggacatgtgttcactgtccggaagaaagaagagtataagatggccctctacaatttgtatccaggcgtgtttgagaccgttgaaatgcttccctctaaagctggcatctggagagtagagtgcttgatcggagaacatcttcacgcaggtatgagcaccttgttcctcgtgtacagcaacaaatgtcagaccccacttggcatggccagtggacacattcgcgactttcagatcacagcatctggccagtatggacaatgggccccaaagttggctcgcctccattactccggtagcataaatgcgtggtccactaaagaacctttcagctggattaaggtcgatcttcttgcccccatgatcatccacggcattaagacacagggagcgaggcagaaattctcctccctctacatctcacagttcattattatgtatagtttggacggcaagaagtggcaaacttatagaggtaacagtactggaacactcatggtgttcttcggcaacgttgatagctctggcatcaaacacaacatctttaatcctcccataatagctcggtacatcagattgcatccgacccactacagcattaggagtacactccgaatggagcttatgggttgcgacttgaattcctgttcaatgccactcggaatggagtctaaagccatctctgatgcacagataaccgccagtagctactttacgaacatgtttgctacgtggtcaccctctaaggcaaggcttcatttgcaaggccggtctaatgcctggagacctcaggtgaacaacccgaaagaatggctccaggtggactttcagaagaccatgaaagtaacaggtgtcactactcagggagttaagtccttggataccagcatgtatgtgaaggagttccttatttcctcatcacaagatggccaccagtggaccctcttctttcagaatggtaaggtcaaagtgtttcagggcaatcaagacagcttcacacccgtggtgaacagtcttgatcctccactcttgacacgataccttcgaatccatccacagtcttgggttactcagattgcattgcgcatggaagtacttggatgcgaggctcaggacctctac

SEQ ID NO: 478 - protein, 1457 aa, synthetic construct
  REGION 1..1457: note = Variant of human B-domain deleted Factor VIII
MQIELSTCFFLCLLRFCFSATRRYYLGAVELSWDYMQSDLGELPVDARFPPRVPKSFPFNTSVVYKKTLFVEFTDHLFNIAKPRPPWMGLLGPTIQAEVYDTVVITLKNMASHPVSLHAVGVSYWKASEGAEYDDQTSQREKEDDKVFPGGSHTYVWQVLKENGPMASDPLCLTYSYLSHVDLVKDLNSGLIGALLVCREGSLAKEKTQTLHKFILLFAVFDEGKSWHSETKNSLMQDRDAASARAWPKMHTVNGYVNRSLPGLIGCHRKSVYWHVIGMGTTPEVHSIFLEGHTFLVRNHRQASLEISPITFLTAQTLLMDLGQFLLFCHISSHQHDGMEAYVKVDSCPEEPQLRMKNNEEAEDYDDDLTDSEMDVVRFDDDNSPSFIQIRSVAKKHPKTWVHYIAAEEEDWDYAPLVLAPDDRSYKSQYLNNGPQRIGRKYKKVRFMAYTDETFKTREAIQHESGILGPLLYGEVGDTLLIIFKNQASRPYNIYPHGITDVRPLYSRRLPKGVKHLKDFPILPGEIFKYKWTVTVEDGPTKSDPRCLTRYYSSFVNMERDLASGLIGPLLICYKESVDQRGNQIMSDKRNVILFSVFDENRSWYLTENIQRFLPNPAGVQLEDPEFQASNIMHSINGYVFDSLQLSVCLHEVAYWYILSIGAQTDFLSVFFSGYTFKHKMVYEDTLTLFPFSGETVFMSMENPGLWILGCHNSDFRNRGMTALLKVSSCDKNTGDYYEDSYEDISAYLLSKNNAIEPRSFSQNPPVLKRHQREITRTTLQSDQEEIDYDDTISVEMKKEDFDIYDEDENQSPRSFQKKTRHYFIAAVERLWDYGMSSSPHVLRNRAQSGSVPQFKKVVFQEFTDGSFTQPLYRGELNEHLGLLGPYIRAEVEDNIMVTFRNQASRPYSFYSSLISYEEDQRQGAEPRKNFVKPNETKTYFWKVQHHMAPTKDEFDCKAWAYFSDVDLEKDVHSGLIGPLLVCHTNTLNPAHGRQVTVQEFALFFTIFDETKSWYFTENMERNCRAPCNIQMEDPTFKENYRFHAINGYIMDTLPGLVMAQDQRIRWYLLSMGSNENIHSIHFSGHVFTVRKKEEYKMALYNLYPGVFETVEMLPSKAGIWRVECLIGEHLHAGMSTLFLVYSNKCQTPLGMASGHIRDFQITASGQYGQWAPKLARLHYSGSINAWSTKEPFSWIKVDLLAPMIIHGIKTQGARQKFSSLYISQFIIMYSLDGKKWQTYRGNSTGTLMVFFGNVDSSGIKHNIFNPPIIARYIRLHPTHYSIRSTLRMELMGCDLNSCSMPLGMESKAISDAQITASSYFTNMFATWSPSKARLHLQGRSNAWRPQVNNPKEWLQVDFQKTMKVTGVTTQGVKSLDTSMYVKEFLISSSQDGHQWTLFFQNGKVKVFQGNQDSFTPVVNSLDPPLLTRYLRIHPQSWVTQIALRMEVLGCEAQDLY

SEQ ID NO: 479 - DNA, 4371 bp, synthetic construct
  misc_feature 1..4371: note = Variant of human B-domain deleted Factor VIII
  source 1..4371: mol_type = other DNA
atgcagattgaactgtctacctgcttcttcctctgtttgctgaggttctgctttagcgccactagacggtactaccttggcgctgtggagctgtcctgggactatatgcagagtgatttgggagagcttcccgtcgacgcacgatttcctcctcgcgttccaaagtcatttcccttcaacacaagcgtggtgtacaagaagacgctcttcgtcgaattcaccgatcacctgttcaatatcgccaaacccagaccaccatggatgggtcttttggggcctaccatacaagcggaggtgtatgacacagttgttatcactctcaagaacatggcttctcatccggtaagtcttcacgcagtgggcgtgtcctactggaaagcttcagaaggagccgagtatgatgatcagacatcccagagggagaaagaagacgacaaggtatttccaggtgggtctcatacctatgtgtggcaagtgctcaaagagaatggccctatggcaagcgatccgctctgtttgacttacagctacctttcacacgttgacctcgtcaaggacctcaactccgggttgattggagccttgttggtatgcagggaaggatctcttgccaaagagaagacacagaccctccacaagtttatccttctctttgctgtgttcgatgagggcaaaagttggcatagcgaaacgaagaattccctcatgcaggatcgcgacgcagccagcgccagagcttggcccaagatgcacactgtgaacggatatgtcaataggtcacttcctggcttgattgggtgtcatcggaaaagtgtctactggcacgtgatcggaatggggacaacaccagaggtccactccatatttctcgaaggccataccttccttgttcgaaaccacagacaggcatccttggagatctctcccattacctttctcactgcccaaacgctccttatggacttgggtcagttccttctcttctgccatatcagctcacaccagcatgatggtatggaagcttatgtgaaagtcgacagttgtcctgaggagccacagttgcgcatgaagaataatgaagaagccgaggattacgacgacgatctcaccgattctgagatggacgtggtgaggtttgatgacgacaactctccctccttcattcaaatccggagcgtggcgaagaaacaccccaagacttgggtccactatatagcggcggaagaggaggattgggattacgctcctcttgtattggcaccagatgaccgctcatacaaaagccagtacctcaacaacggaccgcagagaattggccggaagtataagaaagtgcgatttatggcctatacagacgaaacctttaagacaagggaggccatccagcatgagagtgggattttgggacctcttctttacggcgaagttggtgataccctcctcatcatcttcaagaatcaagcttctcgcccctataacatttacccacacgggatcactgacgttaggcctttgtatagcagaagacttcccaaaggcgtgaagcatctcaaagacttccccattttgccaggcgagatctttaagtacaaatggaccgtcacagtggaagatggaccgactaaatcagaccctcgatgccttacgcggtactattcctccttcgtgaatatggagagagatttggcaagcggactcataggaccactcctcatctgttacaaggaatctgtagaccagaggggtaaccagattatgagtgataaacgcaatgtgatcctttttagcgtcttcgacgagaaccggtcctggtacttgaccgagaatatacaatctttccttcccaaccccgcaggcgttcagttggaagaccctgagtttcaggccagcaatattatgcactcaatcaacggctatgtgtttgatagtctccagctttctgtttgcctccatgaagtagcctattggtacatcttgtcaattggtgctcaaacagacttcctctccgtcttcttctccggctacacctttaagcacaagatggtgtatgaggacactctcacactctttccattttctggagaaaccgtgttcatgagcatggagaatccaggcctttggatcttgggttgccacaacagtgattttcgcaatcggggaatgactgctctcctcaaagtcagcagctgtgataagaacacaggcgactattacgaagattcttacgaggacataagtgcctacttgttgtccaagaataacgccattgagcccagatcattctcccagaatcctcccgtgcttaaaaggcatcagcgcgaaatcaccagaactactcttcagtctgatcaagaggagattgactatgacgacaccataagcgtggaaatgaagaaggaggatttcgatatctatgacgaagatgagaaccagtctccgcggagctttcagaagaagacgcgacactacttcattgcagcagtcgaaaggctttgggactacggtatgtcatcatcccctcatgtgttgcgcaatagagctcagagtggaagtgttccacagttcaagaaagtcgtctttcaagagtttacagatggcagcttcacacagcctctctatcggggcgagcttaacgaacatttgggactccttggtccctatatccgagccgaagtggaggacaacattatggttacctttaggaatcaagcctctcgcccctacagcttctactcctccctcatcagttatgaggaggatcagagacaaggcgctgaaccacggaagaactttgtgaaaccgaatgagacgaagacctacttctggaaagtacagcaccacatggcccccacaaaagacgaattcgattgcaaagcatgggcgtatttttcagacgttgacttggagaaagatgtacattcaggacttattggtcctttgttggtgtgtcacactaacactctcaatccagcccatggcaggcaggtgacagtccaggaattcgctcttttctttaccatctttgatgagaccaagtcctggtacttcacggaaaacatggagcgcaattgcagagccccctgtaacatacagatggaggaccctacctttaaggaaaattatcggttccacgcaatcaacggatacattatggatacactccctggccttgtgatggctcaggaccaacgaatcaggtggtacctcctcagcatgggttctaatgagaacatacactccattcacttttcaggacatgtgttcactgtccggaagaaagaagagtataagatggccctctacaatttgtatccaggcgtgtttgagaccgttgaaatgcttccctctaaagctggcatctggagagtagagtgcttgatcggagaacatcttcacgcaggtatgagcaccttgttcctcgtgtacagcaacaaatgtcagaccccacttggcatggccagtggacacattcgcgactttcagatcacagcatctggccagtatggacaatgggccccaaagttggctcgcctccattactccggtagcataaatgcgtggtccactaaagaacctttcagctggattaaggtcgatcttcttgcccccatgatcatccacggcattaagacacagggagcgaggcagaaattctcctccctctacatctcacagttcattattatgtatagtttggacggcaagaagtggcaaacttatagaggtaacagtactggaacactcatggtgttcttcggcaacgttgatagctctggcatcaaacacaacatctttaatcctcccataatagctcggtacatcagattgcatccgacccactacagcattaggagtacactccgaatggagcttatgggttgcgacttgaattcctgttcaatgccactcggaatggagtctaaagccatctctgatgcacagataaccgccagtagctactttacgaacatgtttgctacgtggtcaccctctaaggcaaggcttcatttgcaaggccggtctaatgcctggagacctcaggtgaacaacccgaaagaatggctccaggtggactttcagaagaccatgaaagtaacaggtgtcactactcagggagttaagtccttggataccagcatgtatgtgaaggagttccttatttcctcatcacaagatggccaccagtggaccctcttctttcagaatggtaaggtcaaagtgtttcagggcaatcaagacagcttcacacccgtggtgaacagtcttgatcctccactcttgacacgataccttcgaatccatccacagtcttgggttcaccagattgcattgcgcatggaagtacttggatgcgaggctcaggacctctac

SEQ ID NO: 480 - protein, 1457 aa, synthetic construct
  REGION 1..1457: note = Variant of human B-domain deleted Factor VIII
MQIELSTCFFLCLLRFCFSATRRYYLGAVELSWDYMQSDLGELPVDARFPPRVPKSFPFNTSVVYKKTLFVEFTDHLFNIAKPRPPWMGLLGPTIQAEVYDTVVITLKNMASHPVSLHAVGVSYWKASEGAEYDDQTSQREKEDDKVFPGGSHTYVWQVLKENGPMASDPLCLTYSYLSHVDLVKDLNSGLIGALLVCREGSLAKEKTQTLHKFILLFAVFDEGKSWHSETKNSLMQDRDAASARAWPKMHTVNGYVNRSLPGLIGCHRKSVYWHVIGMGTTPEVHSIFLEGHTFLVRNHRQASLEISPITFLTAQTLLMDLGQFLLFCHISSHQHDGMEAYVKVDSCPEEPQLRMKNNEEAEDYDDDLTDSEMDVVRFDDDNSPSFIQIRSVAKKHPKTWVHYIAAEEEDWDYAPLVLAPDDRSYKSQYLNNGPQRIGRKYKKVRFMAYTDETFKTREAIQHESGILGPLLYGEVGDTLLIIFKNQASRPYNIYPHGITDVRPLYSRRLPKGVKHLKDFPILPGEIFKYKWTVTVEDGPTKSDPRCLTRYYSSFVNMERDLASGLIGPLLICYKESVDQRGNQIMSDKRNVILFSVFDENRSWYLTENIQSFLPNPAGVQLEDPEFQASNIMHSINGYVFDSLQLSVCLHEVAYWYILSIGAQTDFLSVFFSGYTFKHKMVYEDTLTLFPFSGETVFMSMENPGLWILGCHNSDFRNRGMTALLKVSSCDKNTGDYYEDSYEDISAYLLSKNNAIEPRSFSQNPPVLKRHQREITRTTLQSDQEEIDYDDTISVEMKKEDFDIYDEDENQSPRSFQKKTRHYFIAAVERLWDYGMSSSPHVLRNRAQSGSVPQFKKVVFQEFTDGSFTQPLYRGELNEHLGLLGPYIRAEVEDNIMVTFRNQASRPYSFYSSLISYEEDQRQGAEPRKNFVKPNETKTYFWKVQHHMAPTKDEFDCKAWAYFSDVDLEKDVHSGLIGPLLVCHTNTLNPAHGRQVTVQEFALFFTIFDETKSWYFTENMERNCRAPCNIQMEDPTFKENYRFHAINGYIMDTLPGLVMAQDQRIRWYLLSMGSNENIHSIHFSGHVFTVRKKEEYKMALYNLYPGVFETVEMLPSKAGIWRVECLIGEHLHAGMSTLFLVYSNKCQTPLGMASGHIRDFQITASGQYGQWAPKLARLHYSGSINAWSTKEPFSWIKVDLLAPMIIHGIKTQGARQKFSSLYISQFIIMYSLDGKKWQTYRGNSTGTLMVFFGNVDSSGIKHNIFNPPIIARYIRLHPTHYSIRSTLRMELMGCDLNSCSMPLGMESKAISDAQITASSYFTNMFATWSPSKARLHLQGRSNAWRPQVNNPKEWLQVDFQKTMKVTGVTTQGVKSLDTSMYVKEFLISSSQDGHQWTLFFQNGKVKVFQGNQDSFTPVVNSLDPPLLTRYLRIHPQSWVHQIALRMEVLGCEAQDLY

SEQ ID NO: 481 - DNA, 4371 bp, synthetic construct
  misc_feature 1..4371: note = Variant of human B-domain deleted Factor VIII
  source 1..4371: mol_type = other DNA
atgcagattgaactgtctacctgcttcttcctctgtttgctgaggttctgctttagcgccactagacggtactaccttggcgctgtggagctgtcctgggactatatgcagagtgatttgggagagcttcccgtcgacgcacgatttcctcctcgcgttccaaagtcatttcccttcaacacaagcgtggtgtacaagaagacgctcttcgtcgaattcaccgatcacctgttcaatatcgccaaacccagaccaccatggatgggtcttttggggcctaccatacaagcggaggtgtatgacacagttgttatcactctcaagaacatggcttctcatccggtaagtcttcacgcagtgggcgtgtcctactggaaagcttcagaaggagccgagtatgatgatcagacatcccagagggagaaagaagacgacaaggtatttccaggtgggtctcatacctatgtgtggcaagtgctcaaagagaatggccctatggcaagcgatccgctctgtttgacttacagctacctttcacacgttgacctcgtcaaggacctcaactccgggttgattggagccttgttggtatgcagggaaggatctcttgccaaagagaagacacagaccctccacaagtttatccttctctttgctgtgttcgatgagggcaaaagttggcatagcgaaacgaagaattccctcatgcaggatcgcgacgcagccagcgccagagcttggcccaagatgcacactgtgaacggatatgtcaataggtcacttcctggcttgattgggtgtcatcggaaaagtgtctactggcacgtgatcggaatggggacaacaccagaggtccactccatatttctcgaaggccataccttccttgttcgaaaccacagacaggcatccttggagatctctcccattacctttctcactgcccaaacgctccttatggacttgggtcagttccttctcttctgccatatcagctcacaccagcatgatggtatggaagcttatgtgaaagtcgacagttgtcctgaggagccacagttgcgcatgaagaataatgaagaagccgaggattacgacgacgatctcaccgattctgagatggacgtggtgaggtttgatgacgacaactctccctccttcattcaaatccggagcgtggcgaagaaacaccccaagacttgggtccactatatagcggcggaagaggaggattgggattacgctcctcttgtattggcaccagatgaccgctcatacaaaagccagtacctcaacaacggaccgcagagaattggccggaagtataagaaagtgcgatttatggcctatacagacgaaacctttaagacaagggaggccatccagcatgagagtgggattttgggacctcttctttacggcgaagttggtgataccctcctcatcatcttcaagaatcaagcttctcgcccctataacatttacccacacgggatcactgacgttaggcctttgtatagcagaagacttcccaaaggcgtgaagcatctcaaagacttccccattttgccaggcgagatctttaagtacaaatggaccgtcacagtggaagatggaccgactaaatcagaccctcgatgccttacgcggtactattcctccttcgtgaatatggagagagatttggcaagcggactcataggaccactcctcatctgttacaaggaatctgtagaccagaggggtaaccagattatgagtgataaacgcaatgtgatcctttttagcgtcttcgacgagaaccggtcctggtacttgaccgagaatatacaaaggttccttcccaaccccgcaggcgttcagttggaagaccctgagtttcaggccagcaatattatgcactcaatcaacggctatgtgtttgatagtctccagctttctgtttgcctccatgaagtagcctattggtacatcttgtcaattggtgctcaaacagacttcctctccgtcttcttctccggctacacctttaagcacaagatggtgtatgaggacactctcacactctttccattttctggagaaaccgtgttcatgagcatggagaatccaggcctttggatcttgggttgccacaacagtgattttcgcaatcggggaatgactgctctcctcaaagtcagcagctgtgataagaacacaggcgactattacgaagattcttacgaggacataagtgcctacttgttgtccaagaataacgccattgagcccagatcattctcccagaatcctcccgtgcttaaaaggcatcagcgcgaaatcaccagaactactcttcagtctgatcaagaggagattgactatgacgacaccataagcgtggaaatgaagaaggaggatttcgatatctatgacgaagatgagaaccagtctccgcggagctttcagaagaagacgcgacactacttcattgcagcagtcgaaaggctttgggactacggtatgtcatcatcccctcatgtgttgcgcaatagagctcagagtggaagtgttccacagttcaagaaagtcgtctttcaagagtttacagatggcagcttcacacagcctctctatcggggcgagcttaacgaacatttgggactccttggtccctatatccgagccgaagtggaggacaacattatggttacctttaggaatcaagcctctcgcccctacagcttctactcctccctcatcagttatgaggaggatcagagacaaggcgctgaaccacggaagaactttgtgaaaccgaatgagacgaagacctacttctggaaagtacagcaccacatggcccccacaaaagacgaattcgattgcaaagcatgggcgtatttttcagacgttgacttggagaaagatgtacattcaggacttattggtcctttgttggtgtgtcacactaacactctcaatccagcccatggcaggcaggtgacagtccaggaattcgctcttttctttaccatctttgatgagaccaagtcctggtacttcacggaaaacatggagcgcaattgcagagccccctgtaacatacagatggaggaccctacctttaaggaaaattatcggttccacgcaatcaacggatggattatggatacactccctggccttgtgatggctcaggaccaacgaatcaggtggtacctcctcagcatgggttctaatgagaacatacactccattcacttttcaggacatgtgttcactgtccggaagaaagaagagtataagatggccctctacaatttgtatccaggcgtgtttgagaccgttgaaatgcttccctctaaagctggcatctggagagtagagtgcttgatcggagaacatcttcacgcaggtatgagcaccttgttcctcgtgtacagcaacaaatgtcagaccccacttggcatggccagtggacacattcgcgactttcagatcacagcatctggccagtatggacaatgggccccaaagttggctcgcctccattactccggtagcataaatgcgtggtccactaaagaacctttcagctggattaaggtcgatcttcttgcccccatgatcatccacggcattaagacacagggagcgaggcagaaattctcctccctctacatctcacagttcattattatgtatagtttggacggcaagaagtggcaaacttatagaggtaacagtactggaacactcatggtgttcttcggcaacgttgatagctctggcatcaaacacaacatctttaatcctcccataatagctcggtacatcagattgcatccgacccactacagcattaggagtacactccgaatggagcttatgggttgcgacttgaattcctgttcaatgccactcggaatggagtctaaagccatctctgatgcacagataaccgccagtagctactttacgaacatgtttgctacgtggtcaccctctaaggcaaggcttcatttgcaaggccggtctaatgcctggagacctcaggtgaacaacccgaaagaatggctccaggtggactttcagaagaccatgaaagtaacaggtgtcactactcagggagttaagtccttggataccagcatgtatgtgaaggagttccttatttcctcatcacaagatggccaccagtggaccctcttctttcagaatggtaaggtcaaagtgtttcagggcaatcaagacagcttcacacccgtggtgaacagtcttgatcctccactcttgacacgataccttcgaatccatccacagtcttgggttcaccagattgcattgcgcatggaagtacttggatgcgaggctcaggacctctac

SEQ ID NO: 482 - protein, 1457 aa, synthetic construct
  REGION 1..1457: note = Variant of human B-domain deleted Factor VIII
MQIELSTCFFLCLLRFCFSATRRYYLGAVELSWDYMQSDLGELPVDARFPPRVPKSFPFNTSVVYKKTLFVEFTDHLFNIAKPRPPWMGLLGPTIQAEVYDTVVITLKNMASHPVSLHAVGVSYWKASEGAEYDDQTSQREKEDDKVFPGGSHTYVWQVLKENGPMASDPLCLTYSYLSHVDLVKDLNSGLIGALLVCREGSLAKEKTQTLHKFILLFAVFDEGKSWHSETKNSLMQDRDAASARAWPKMHTVNGYVNRSLPGLIGCHRKSVYWHVIGMGTTPEVHSIFLEGHTFLVRNHRQASLEISPITFLTAQTLLMDLGQFLLFCHISSHQHDGMEAYVKVDSCPEEPQLRMKNNEEAEDYDDDLTDSEMDVVRFDDDNSPSFIQIRSVAKKHPKTWVHYIAAEEEDWDYAPLVLAPDDRSYKSQYLNNGPQRIGRKYKKVRFMAYTDETFKTREAIQHESGILGPLLYGEVGDTLLIIFKNQASRPYNIYPHGITDVRPLYSRRLPKGVKHLKDFPILPGEIFKYKWTVTVEDGPTKSDPRCLTRYYSSFVNMERDLASGLIGPLLICYKESVDQRGNQIMSDKRNVILFSVFDENRSWYLTENIQRFLPNPAGVQLEDPEFQASNIMHSINGYVFDSLQLSVCLHEVAYWYILSIGAQTDFLSVFFSGYTFKHKMVYEDTLTLFPFSGETVFMSMENPGLWILGCHNSDFRNRGMTALLKVSSCDKNTGDYYEDSYEDISAYLLSKNNAIEPRSFSQNPPVLKRHQREITRTTLQSDQEEIDYDDTISVEMKKEDFDIYDEDENQSPRSFQKKTRHYFIAAVERLWDYGMSSSPHVLRNRAQSGSVPQFKKVVFQEFTDGSFTQPLYRGELNEHLGLLGPYIRAEVEDNIMVTFRNQASRPYSFYSSLISYEEDQRQGAEPRKNFVKPNETKTYFWKVQHHMAPTKDEFDCKAWAYFSDVDLEKDVHSGLIGPLLVCHTNTLNPAHGRQVTVQEFALFFTIFDETKSWYFTENMERNCRAPCNIQMEDPTFKENYRFHAINGWIMDTLPGLVMAQDQRIRWYLLSMGSNENIHSIHFSGHVFTVRKKEEYKMALYNLYPGVFETVEMLPSKAGIWRVECLIGEHLHAGMSTLFLVYSNKCQTPLGMASGHIRDFQITASGQYGQWAPKLARLHYSGSINAWSTKEPFSWIKVDLLAPMIIHGIKTQGARQKFSSLYISQFIIMYSLDGKKWQTYRGNSTGTLMVFFGNVDSSGIKHNIFNPPIIARYIRLHPTHYSIRSTLRMELMGCDLNSCSMPLGMESKAISDAQITASSYFTNMFATWSPSKARLHLQGRSNAWRPQVNNPKEWLQVDFQKTMKVTGVTTQGVKSLDTSMYVKEFLISSSQDGHQWTLFFQNGKVKVFQGNQDSFTPVVNSLDPPLLTRYLRIHPQSWVHQIALRMEVLGCEAQDLY

SEQ ID NO: 483 - DNA, 4371 bp, synthetic construct
  misc_feature 1..4371: note = Variant of human B-domain deleted Factor VIII
  source 1..4371: mol_type = other DNA
atgcagattgaactgtctacctgcttcttcctctgtttgctgaggttctgctttagcgccactagacggtactaccttggcgctgtggagctgtcctgggactatatgcagagtgatttgggagagcttcccgtcgacgcacgatttcctcctcgcgttccaaagtcatttcccttcaacacaagcgtggtgtacaagaagacgctcttcgtcgaattcaccgatcacctgttcaatatcgccaaacccagaccaccatggatgggtcttttggggcctaccatacaagcggaggtgtatgacacagttgttatcactctcaagaacatggcttctcatccggtaagtcttcacgcagtgggcgtgtcctactggaaagcttcagaaggagccgagtatgatgatcagacatcccagagggagaaagaagacgacaaggtatttccaggtgggtctcatacctatgtgtggcaagtgctcaaagagaatggccctatggcaagcgatccgctctgtttgacttacagctacctttcacacgttgacctcgtcaaggacctcaactccgggttgattggagccttgttggtatgcagggaaggatctcttgccaaagagaagacacagaccctccacaagtttatccttctctttgctgtgttcgatgagggcaaaagttggcatagcgaaacgaagaattccctcatgcaggatcgcgacgcagccagcgccagagcttggcccaagatgcacactgtgaacggatatgtcaataggtcacttcctggcttgattgggtgtcatcggaaaagtgtctactggcacgtgatcggaatggggacaacaccagaggtccactccatatttctcgaaggccataccttccttgttcgaaaccacagacaggcatccttggagatctctcccattacctttctcactgcccaaacgctccttatggacttgggtcagttccttctcttctgccatatcagctcacaccagcatgatggtatggaagcttatgtgaaagtcgacagttgtcctgaggagccacagttgcgcatgaagaataatgaagaagccgaggattacgacgacgatctcaccgattctgagatggacgtggtgaggtttgatgacgacaactctccctccttcattcaaatccggagcgtggcgaagaaacaccccaagacttgggtccactatatagcggcggaagaggaggattgggattacgctcctcttgtattggcaccagatgaccgctcatacaaaagccagtacctcaacaacggaccgcagagaattggccggaagtataagaaagtgcgatttatggcctatacagacgaaacctttaagacaagggaggccatccagcatgagagtgggattttgggacctcttctttacggcgaagttggtgataccctcctcatcatcttcaagaatcaagcttctcgcccctataacatttacccacacgggatcactgacgttaggcctttgtatagcagaagacttcccaaaggcgtgaagcatctcaaagacttccccattttgccaggcgagatctttaagtacaaatggaccgtcacagtggaagatggaccgactaaatcagaccctcgatgccttacgcggtactattcctccttcgtgaatatggagagagatttggcaagcggactcataggaccactcctcatctgttacaaggaatctgtagaccagaggggtaaccagattatgagtgataaacgcaatgtgatcctttttagcgtcttcgacgagaaccggtcctggtacttgaccgagaatatacaaaggttccttcccaaccccgcaggcgttcagttggaagaccctgagtttcaggccagcaatattatgcactcaatcaacggctatgtgtttgatagtctccagctttctgtttgcctccatgaagtagcctattggtacatcttgtcaattggtgctcaaacagacttcctctccgtcttcttctccggctacacctttaagcacaagatggtgtatgaggacactctcacactctttccattttctggagaaaccgtgttcatgagcatggagaatccaggcctttggatcttgggttgccacaacagtgattttcgcaatcggggaatgactgctctcctcaaagtcagcagctgtgataagaacacaggcgactattacgaagattcttacgaggacataagtgcctacttgttgtccaagaataacgccattgagcccagatcattctcccagaatcctcccgtgcttaaaaggcatcagcgcgaaatcaccagaactactcttcagtctgatcaagaggagattgactatgacgacaccataagcgtggaaatgaagaaggaggatttcgatatctatgacgaagatgagaaccagtctccgcggagctttcagaagaagacgcgacactacttcattgcagcagtcgaaaggctttgggactacggtatgtcatcatcccctcatgtgttgcgcaatagagctcagagtggaagtgttccacagttcaagaaagtcgtctttcaagagtttacagatggcagcttcacacagcctctctatcggggcgagcttaacgaacatttgggactccttggtccctatatccgagccgaagtggaggacaacattatggttacctttaggaatcaagcctctcgcccctacagcttctactcctccctcatcagttatgaggaggatcagagacaaggcgctgaaccacggaagaactttgtgaaaccgaatgagacgaagacctacttctggaaagtacagcaccacatggcccccacaaaagacgaattcgattgcaaagcatgggcgtatttttcagacgttgacttggagaaagatgtacattcaggacttattggtcctttgttggtgtgtcacactaacactctcaatccagcccatggcaggcaggtgacagtccaggaattcgctcttttctttaccatctttgatgagaccaagtcctggtacttcacggaaaacatggagcgcaattgcagagccccctgtaacatacagatggaggaccctacctttaaggaaaattatcggttccacgcaatcaacggatacattatggatacactccctggccttgtgatggctcaggaccaacgaatcaggtggtacctcctcagcatgggttctaatgagaacatacactccattcacttttcaggacatgtgttcactgtccggaagaaagaagagtataagatggccctctacaatttgtatccaggcgtgtttgagaccgttgaaatgcttccctctaaagctggcatctggagagtagagtgcttgatcggagaacatcttcacgcaggtatgagcaccttgttcctcgtgtacagcaacaaatgtcagaccccacttggcatggccagtggacacattcgcgactttcagatcacagcatctggccagtatggacaatgggccccaaagttggctcgcctccattactccggtagcataaatgcgtggtccactaaagaacctttcagctggattaaggtcgatcttcttgcccccatgatcatccacggcattaagacacagggagcgaggcagaaattctcctccagttacatctcacagttcattattatgtatagtttggacggcaagaagtggcaaacttatagaggtaacagtactggaacactcatggtgttcttcggcaacgttgatagctctggcatcaaacacaacatctttaatcctcccataatagctcggtacatcagattgcatccgacccactacagcattaggagtacactccgaatggagcttatgggttgcgacttgaattcctgttcaatgccactcggaatggagtctaaagccatctctgatgcacagataaccgccagtagctactttacgaacatgtttgctacgtggtcaccctctaaggcaaggcttcatttgcaaggccggtctaatgcctggagacctcaggtgaacaacccgaaagaatggctccaggtggactttcagaagaccatgaaagtaacaggtgtcactactcagggagttaagtccttggataccagcatgtatgtgaaggagttccttatttcctcatcacaagatggccaccagtggaccctcttctttcagaatggtaaggtcaaagtgtttcagggcaatcaagacagcttcacacccgtggtgaacagtcttgatcctccactcttgacacgataccttcgaatccatccacagtcttgggttcaccagattgcattgcgcatggaagtacttggatgcgaggctcaggacctctac

SEQ ID NO: 484 - protein, 1457 aa, synthetic construct
  REGION 1..1457: note = Variant of human B-domain deleted Factor VIII
MQIELSTCFFLCLLRFCFSATRRYYLGAVELSWDYMQSDLGELPVDARFPPRVPKSFPFNTSVVYKKTLFVEFTDHLFNIAKPRPPWMGLLGPTIQAEVYDTVVITLKNMASHPVSLHAVGVSYWKASEGAEYDDQTSQREKEDDKVFPGGSHTYVWQVLKENGPMASDPLCLTYSYLSHVDLVKDLNSGLIGALLVCREGSLAKEKTQTLHKFILLFAVFDEGKSWHSETKNSLMQDRDAASARAWPKMHTVNGYVNRSLPGLIGCHRKSVYWHVIGMGTTPEVHSIFLEGHTFLVRNHRQASLEISPITFLTAQTLLMDLGQFLLFCHISSHQHDGMEAYVKVDSCPEEPQLRMKNNEEAEDYDDDLTDSEMDVVRFDDDNSPSFIQIRSVAKKHPKTWVHYIAAEEEDWDYAPLVLAPDDRSYKSQYLNNGPQRIGRKYKKVRFMAYTDETFKTREAIQHESGILGPLLYGEVGDTLLIIFKNQASRPYNIYPHGITDVRPLYSRRLPKGVKHLKDFPILPGEIFKYKWTVTVEDGPTKSDPRCLTRYYSSFVNMERDLASGLIGPLLICYKESVDQRGNQIMSDKRNVILFSVFDENRSWYLTENIQRFLPNPAGVQLEDPEFQASNIMHSINGYVFDSLQLSVCLHEVAYWYILSIGAQTDFLSVFFSGYTFKHKMVYEDTLTLFPFSGETVFMSMENPGLWILGCHNSDFRNRGMTALLKVSSCDKNTGDYYEDSYEDISAYLLSKNNAIEPRSFSQNPPVLKRHQREITRTTLQSDQEEIDYDDTISVEMKKEDFDIYDEDENQSPRSFQKKTRHYFIAAVERLWDYGMSSSPHVLRNRAQSGSVPQFKKVVFQEFTDGSFTQPLYRGELNEHLGLLGPYIRAEVEDNIMVTFRNQASRPYSFYSSLISYEEDQRQGAEPRKNFVKPNETKTYFWKVQHHMAPTKDEFDCKAWAYFSDVDLEKDVHSGLIGPLLVCHTNTLNPAHGRQVTVQEFALFFTIFDETKSWYFTENMERNCRAPCNIQMEDPTFKENYRFHAINGYIMDTLPGLVMAQDQRIRWYLLSMGSNENIHSIHFSGHVFTVRKKEEYKMALYNLYPGVFETVEMLPSKAGIWRVECLIGEHLHAGMSTLFLVYSNKCQTPLGMASGHIRDFQITASGQYGQWAPKLARLHYSGSINAWSTKEPFSWIKVDLLAPMIIHGIKTQGARQKFSSSYISQFIIMYSLDGKKWQTYRGNSTGTLMVFFGNVDSSGIKHNIFNPPIIARYIRLHPTHYSIRSTLRMELMGCDLNSCSMPLGMESKAISDAQITASSYFTNMFATWSPSKARLHLQGRSNAWRPQVNNPKEWLQVDFQKTMKVTGVTTQGVKSLDTSMYVKEFLISSSQDGHQWTLFFQNGKVKVFQGNQDSFTPVVNSLDPPLLTRYLRIHPQSWVHQIALRMEVLGCEAQDLY

SEQ ID NO: 485 - DNA, 4371 bp, synthetic construct
  misc_feature 1..4371: note = Variant of human B-domain deleted Factor VIII
  source 1..4371: mol_type = other DNA
atgcagattgaactgtctacctgcttcttcctctgtttgctgaggttctgctttagcgccactagacggtactaccttggcgctgtggagctgtcctgggactatatgcagagtgatttgggagagcttcccgtcgacgcacgatttcctcctcgcgttccaaagtcatttcccttcaacacaagcgtggtgtacaagaagacgctcttcgtcgaattcaccgatcacctgttcaatatcgccaaacccagaccaccatggatgggtcttttggggcctaccatacaagcggaggtgtatgacacagttgttatcactctcaagaacatggcttctcatccggtaagtcttcacgcagtgggcgtgtcctactggaaagcttcagaaggagccgagtatgatgatcagacatcccagagggagaaagaagacgacaaggtatttccaggtgggtctcatacctatgtgtggcaagtgctcaaagagaatggccctatggcaagcgatccgctctgtttgacttacagctacctttcacacgttgacctcgtcaaggacctcaactccgggttgattggagccttgttggtatgcagggaaggatctcttgccaaagagaagacacagaccctccacaagtttatccttctctttgctgtgttcgatgagggcaaaagttggcatagcgaaacgaagaattccctcatgcaggatcgcgacgcagccagcgccagagcttggcccaagatgcacactgtgaacggatatgtcaataggtcacttcctggcttgattgggtgtcatcggaaaagtgtctactggcacgtgatcggaatggggacaacaccagaggtccactccatatttctcgaaggccataccttccttgttcgaaaccacagacaggcatccttggagatctctcccattacctttctcactgcccaaacgctccttatggacttgggtcagttccttctcttctgccatatcagctcacaccagcatgatggtatggaagcttatgtgaaagtcgacagttgtcctgaggagccacagttgcgcatgaagaataatgaagaagccgaggattacgacgacgatctcaccgattctgagatggacgtggtgaggtttgatgacgacaactctccctccttcattcaaatccggagcgtggcgaagaaacaccccaagacttgggtccactatatagcggcggaagaggaggattgggattacgctcctcttgtattggcaccagatgaccgctcatacaaaagccagtacctcaacaacggaccgcagagaattggccggaagtataagaaagtgcgatttatggcctatacagacgaaacctttaagacaagggaggccatccagcatgagagtgggattttgggacctcttctttacggcgaagttggtgataccctcctcatcatcttcaagaatcaagcttctcgcccctataacatttacccacacgggatcactgacgttaggcctttgtatagcagaagacttcccaaaggcgtgaagcatctcaaagacttccccattttgccaggcgagatctttaagtacaaatggaccgtcacagtggaagatggaccgactaaatcagaccctcgatgccttacgcggtactattcctccttcgtgaatatggagagagatttggcaagcggactcataggaccactcctcatctgttacaaggaatctgtagaccagaggggtaaccagattatgagtgataaacgcaatgtgatcctttttagcgtcttcgacgagaaccggtcctggtacttgaccgagaatatacaaaggttccttcccaaccccgcaggcgttcagttggaagaccctgagtttcaggccagcaatattatgcactcaatcaacggctatgtgtttgatagtctccagctttctgtttgcctccatgaagtagcctattggtacatcttgtcaattggtgctcaaacagacttcctctccgtcttcttctccggctacacctttaagcacaagatggtgtatgaggacactctcacactctttccattttctggagaaaccgtgttcatgagcatggagaatccaggcctttggatcttgggttgccacaacagtgattttcgcaatcggggaatgactgctctcctcaaagtcagcagctgtgataagaacacaggcgactattacgaagattcttacgaggacataagtgcctacttgttgtccaagaataacgccattgagcccagatcattctcccagaatcctcccgtgcttaaaaggcatcagcgcgaaatcaccagaactactcttcagtctgatcaagaggagattgactatgacgacaccataagcgtggaaatgaagaaggaggatttcgatatctatgacgaagatgagaaccagtctccgcggagctttcagaagaagacgcgacactacttcattgcagcagtcgaaaggctttgggactacggtatgtcatcatcccctcatgtgttgcgcaatagagctcagagtggaagtgttccacagttcaagaaagtcgtctttcaagagtttacagatggcagcttcacacagcctctctatcggggcgagcttaacgaacatttgggactccttggtccctatatccgagccgaagtggaggacaacattatggttacctttaggaatcaagcctctcgcccctacagcttctactcctccctcatcagttatgaggaggatcagagacaaggcgctgaaccacggaagaactttgtgaaaccgaatgagacgaagacctacttctggaaagtacagcaccacatggcccccacaaaagacgaattcgattgcaaagcatgggcgtatttttcagacgttgacttggagaaagatgtacattcaggacttattggtcctttgttggtgtgtcacactaacactctcaatccagcccatggcaggcaggtgacagtccaggaattcgctcttttctttaccatctttgatgagaccaagtcctggtacttcacggaaaacatggagcgcaattgcagagccccctgtaacatacagatggaggaccctacctttaaggaaaattatcggttccacgcaatcaacggatacattatggatacactccctggccttgtgatggctcaggaccaacgaatcaggtggtacctcctcagcatgggttctaatgagaacatacactccattcacttttcaggacatgtgttcactgtccggaagaaagaagagtataagatggccctctacaatttgtatccaggcgtgtttgagaccgttgaaatgcttccctctaaagctggcatctggagagtagagtgcttgatcggagaacatcttcacgcaggtatgagcaccttgttcctcgtgtacagcaacaaatgtcagaccccacttggcatggccagtggacacattcgcgactttcagatcacagcatctggccagtatggacaatgggccccaaagttggctcgcctccattactccggtagcataaatgcgtggtccactaaagaacctttcagctggattaaggtcgatcttcttgcccccatgatcatccacggcattaagacacagggagcgaggcagaaattctccgatctctacatctcacagttcattattatgtatagtttggacggcaagaagtggcaaacttatagaggtaacagtactggaacactcatggtgttcttcggcaacgttgatagctctggcatcaaacacaacatctttaatcctcccataatagctcggtacatcagattgcatccgacccactacagcattaggagtacactccgaatggagcttatgggttgcgacttgaattcctgttcaatgccactcggaatggagtctaaagccatctctgatgcacagataaccgccagtagctactttacgaacatgtttgctacgtggtcaccctctaaggcaaggcttcatttgcaaggccggtctaatgcctggagacctcaggtgaacaacccgaaagaatggctccaggtggactttcagaagaccatgaaagtaacaggtgtcactactcagggagttaagtccttggataccagcatgtatgtgaaggagttccttatttcctcatcacaagatggccaccagtggaccctcttctttcagaatggtaaggtcaaagtgtttcagggcaatcaagacagcttcacacccgtggtgaacagtcttgatcctccactcttgacacgataccttcgaatccatccacagtcttgggttcaccagattgcattgcgcatggaagtacttggatgcgaggctcaggacctctac

SEQ ID NO: 486 - protein, 1457 aa, synthetic construct
  REGION 1..1457: note = Variant of human B-domain deleted Factor VIII
MQIELSTCFFLCLLRFCFSATRRYYLGAVELSWDYMQSDLGELPVDARFPPRVPKSFPFNTSVVYKKTLFVEFTDHLFNIAKPRPPWMGLLGPTIQAEVYDTVVITLKNMASHPVSLHAVGVSYWKASEGAEYDDQTSQREKEDDKVFPGGSHTYVWQVLKENGPMASDPLCLTYSYLSHVDLVKDLNSGLIGALLVCREGSLAKEKTQTLHKFILLFAVFDEGKSWHSETKNSLMQDRDAASARAWPKMHTVNGYVNRSLPGLIGCHRKSVYWHVIGMGTTPEVHSIFLEGHTFLVRNHRQASLEISPITFLTAQTLLMDLGQFLLFCHISSHQHDGMEAYVKVDSCPEEPQLRMKNNEEAEDYDDDLTDSEMDVVRFDDDNSPSFIQIRSVAKKHPKTWVHYIAAEEEDWDYAPLVLAPDDRSYKSQYLNNGPQRIGRKYKKVRFMAYTDETFKTREAIQHESGILGPLLYGEVGDTLLIIFKNQASRPYNIYPHGITDVRPLYSRRLPKGVKHLKDFPILPGEIFKYKWTVTVEDGPTKSDPRCLTRYYSSFVNMERDLASGLIGPLLICYKESVDQRGNQIMSDKRNVILFSVFDENRSWYLTENIQRFLPNPAGVQLEDPEFQASNIMHSINGYVFDSLQLSVCLHEVAYWYILSIGAQTDFLSVFFSGYTFKHKMVYEDTLTLFPFSGETVFMSMENPGLWILGCHNSDFRNRGMTALLKVSSCDKNTGDYYEDSYEDISAYLLSKNNAIEPRSFSQNPPVLKRHQREITRTTLQSDQEEIDYDDTISVEMKKEDFDIYDEDENQSPRSFQKKTRHYFIAAVERLWDYGMSSSPHVLRNRAQSGSVPQFKKVVFQEFTDGSFTQPLYRGELNEHLGLLGPYIRAEVEDNIMVTFRNQASRPYSFYSSLISYEEDQRQGAEPRKNFVKPNETKTYFWKVQHHMAPTKDEFDCKAWAYFSDVDLEKDVHSGLIGPLLVCHTNTLNPAHGRQVTVQEFALFFTIFDETKSWYFTENMERNCRAPCNIQMEDPTFKENYRFHAINGYIMDTLPGLVMAQDQRIRWYLLSMGSNENIHSIHFSGHVFTVRKKEEYKMALYNLYPGVFETVEMLPSKAGIWRVECLIGEHLHAGMSTLFLVYSNKCQTPLGMASGHIRDFQITASGQYGQWAPKLARLHYSGSINAWSTKEPFSWIKVDLLAPMIIHGIKTQGARQKFSDLYISQFIIMYSLDGKKWQTYRGNSTGTLMVFFGNVDSSGIKHNIFNPPIIARYIRLHPTHYSIRSTLRMELMGCDLNSCSMPLGMESKAISDAQITASSYFTNMFATWSPSKARLHLQGRSNAWRPQVNNPKEWLQVDFQKTMKVTGVTTQGVKSLDTSMYVKEFLISSSQDGHQWTLFFQNGKVKVFQGNQDSFTPVVNSLDPPLLTRYLRIHPQSWVHQIALRMEVLGCEAQDLY

SEQ ID NO: 487 - DNA, 4371 bp, synthetic construct
  misc_feature 1..4371: note = Variant of human B-domain deleted Factor VIII
  source 1..4371: mol_type = other DNA
atgcagattgaactgtctacctgcttcttcctctgtttgctgaggttctgctttagcgccactagacggtactaccttggcgctgtggagctgtcctgggactatatgcagagtgatttgggagagcttcccgtcgacgcacgatttcctcctcgcgttccaaagtcatttcccttcaacacaagcgtggtgtacaagaagacgctcttcgtcgaattcaccgatcacctgttcaatatcgccaaacccagaccaccatggatgggtcttttggggcctaccatacaagcggaggtgtatgacacagttgttatcactctcaagaacatggcttctcatccggtaagtcttcacgcagtgggcgtgtcctactggaaagcttcagaaggagccgagtatgatgatcagacatcccagagggagaaagaagacgacaaggtatttccaggtgggtctcatacctatgtgtggcaagtgctcaaagagaatggccctatggcaagcgatccgctctgtttgacttacagctacctttcacacgttgacctcgtcaaggacctcaactccgggttgattggagccttgttggtatgcagggaaggatctcttgccaaagagaagacacagaccctccacaagtttatccttctctttgctgtgttcgatgagggcaaaagttggcatagcgaaacgaagaattccctcatgcaggatcgcgacgcagccagcgccagagcttggcccaagatgcacactgtgaacggatatgtcaataggtcacttcctggcttgattgggtgtcatcggaaaagtgtctactggcacgtgatcggaatggggacaacaccagaggtccactccatatttctcgaaggccataccttccttgttcgaaaccacagacaggcatccttggagatctctcccattacctttctcactgcccaaacgctccttatggacttgggtcagttccttctcttctgccatatcagctcacaccagcatgatggtatggaagcttatgtgaaagtcgacagttgtcctgaggagccacagttgcgcatgaagaataatgaagaagccgaggattacgacgacgatctcaccgattctgagatggacgtggtgaggtttgatgacgacaactctccctccttcattcaaatccggagcgtggcgaagaaacaccccaagacttgggtccactatatagcggcggaagaggaggattgggattacgctcctcttgtattggcaccagatgaccgctcatacaaaagccagtacctcaacaacggaccgcagagaattggccggaagtataagaaagtgcgatttatggcctatacagacgaaacctttaagacaagggaggccatccagcatgagagtgggattttgggacctcttctttacggcgaagttggtgataccctcctcatcatcttcaagaatcaagcttctcgcccctataacatttacccacacgggatcactgacgttaggcctttgtatagcagaagacttcccaaaggcgtgaagcatctcaaagacttccccattttgccaggcgagatctttaagtacaaatggaccgtcacagtggaagatggaccgactaaatcagaccctcgatgccttacgcggtactattcctccttcgtgaatatggagagagatttggcaagcggactcataggaccactcctcatctgttacaaggaatctgtagaccagaggggtaaccagattatgagtgataaacgcaatgtgatcctttttagcgtcttcgacgagaaccggtcctggtacttgaccgagaatatacaaaggttccttcccaaccccgcaggcgttcagttggaagaccctgagtttcaggccagcaatattatgcactcaatcaacggctatgtgtttgatagtctccagctttctgtttgcctccatgaagtagcctattggtacatcttgtcaattggtgctcaaacagacttcctctccgtcttcttctccggctacacctttaagcacaagatggtgtatgaggacactctcacactctttccattttctggagaaaccgtgttcatgagcatggagaatccaggcctttggatcttgggttgccacaacagtgattttcgcaatcggggaatgactgctctcctcaaagtcagcagctgtgataagaacacaggcgactattacgaagattcttacgaggacataagtgcctacgggttgtccaagaataacgccattgagcccagatcattctcccagaatcctcccgtgcttaaaaggcatcagcgcgaaatcaccagaactactcttcagtctgatcaagaggagattgactatgacgacaccataagcgtggaaatgaagaaggaggatttcgatatctatgacgaagatgagaaccagtctccgcggagctttcagaagaagacgcgacactacttcattgcagcagtcgaaaggctttgggactacggtatgtcatcatcccctcatgtgttgcgcaatagagctcagagtggaagtgttccacagttcaagaaagtcgtctttcaagagtttacagatggcagcttcacacagcctctctatcggggcgagcttaacgaacatttgggactccttggtccctatatccgagccgaagtggaggacaacattatggttacctttaggaatcaagcctctcgcccctacagcttctactcctccctcatcagttatgaggaggatcagagacaaggcgctgaaccacggaagaactttgtgaaaccgaatgagacgaagacctacttctggaaagtacagcaccacatggcccccacaaaagacgaattcgattgcaaagcatgggcgtatttttcagacgttgacttggagaaagatgtacattcaggacttattggtcctttgttggtgtgtcacactaacactctcaatccagcccatggcaggcaggtgacagtccaggaattcgctcttttctttaccatctttgatgagaccaagtcctggtacttcacggaaaacatggagcgcaattgcagagccccctgtaacatacagatggaggaccctacctttaaggaaaattatcggttccacgcaatcaacggatacattatggatacactccctggccttgtgatggctcaggaccaacgaatcaggtggtacctcctcagcatgggttctaatgagaacatacactccattcacttttcaggacatgtgttcactgtccggaagaaagaagagtataagatggccctctacaatttgtatccaggcgtgtttgagaccgttgaaatgcttccctctaaagctggcatctggagagtagagtgcttgatcggagaacatcttcacgcaggtatgagcaccttgttcctcgtgtacagcaacaaatgtcagaccccacttggcatggccagtggacacattcgcgactttcagatcacagcatctggccagtatggacaatgggccccaaagttggctcgcctccattactccggtagcataaatgcgtggtccactaaagaacctttcagctggattaaggtcgatcttcttgcccccatgatcatccacggcattaagacacagggagcgaggcagaaattctcctccctctacatctcacagttcattattatgtatagtttggacggcaagaagtggcaaacttatagaggtaacagtactggaacactcatggtgttcttcggcaacgttgatagctctggcatcaaacacaacatctttaatcctcccataatagctcggtacatcagattgcatccgacccactacagcattaggagtacactccgaatggagcttatgggttgcgacttgaattcctgttcaatgccactcggaatggagtctaaagccatctctgatgcacagataaccgccagtagctactttacgaacatgtttgctacgtggtcaccctctaaggcaaggcttcatttgcaaggccggtctaatgcctggagacctcaggtgaacaacccgaaagaatggctccaggtggactttcagaagaccatgaaagtaacaggtgtcactactcagggagttaagtccttggataccagcatgtatgtgaaggagttccttatttcctcatcacaagatggccaccagtggaccctcttctttcagaatggtaaggtcaaagtgtttcagggcaatcaagacagcttcacacccgtggtgaacagtcttgatcctccactcttgacacgataccttcgaatccatccacagtcttgggttcaccagattgcattgcgcatggaagtacttggatgcgaggctcaggacctctac

SEQ ID NO: 488 - protein, 1457 aa, synthetic construct
  REGION 1..1457: note = Variant of human B-domain deleted Factor VIII
MQIELSTCFFLCLLRFCFSATRRYYLGAVELSWDYMQSDLGELPVDARFPPRVPKSFPFNTSVVYKKTLFVEFTDHLFNIAKPRPPWMGLLGPTIQAEVYDTVVITLKNMASHPVSLHAVGVSYWKASEGAEYDDQTSQREKEDDKVFPGGSHTYVWQVLKENGPMASDPLCLTYSYLSHVDLVKDLNSGLIGALLVCREGSLAKEKTQTLHKFILLFAVFDEGKSWHSETKNSLMQDRDAASARAWPKMHTVNGYVNRSLPGLIGCHRKSVYWHVIGMGTTPEVHSIFLEGHTFLVRNHRQASLEISPITFLTAQTLLMDLGQFLLFCHISSHQHDGMEAYVKVDSCPEEPQLRMKNNEEAEDYDDDLTDSEMDVVRFDDDNSPSFIQIRSVAKKHPKTWVHYIAAEEEDWDYAPLVLAPDDRSYKSQYLNNGPQRIGRKYKKVRFMAYTDETFKTREAIQHESGILGPLLYGEVGDTLLIIFKNQASRPYNIYPHGITDVRPLYSRRLPKGVKHLKDFPILPGEIFKYKWTVTVEDGPTKSDPRCLTRYYSSFVNMERDLASGLIGPLLICYKESVDQRGNQIMSDKRNVILFSVFDENRSWYLTENIQRFLPNPAGVQLEDPEFQASNIMHSINGYVFDSLQLSVCLHEVAYWYILSIGAQTDFLSVFFSGYTFKHKMVYEDTLTLFPFSGETVFMSMENPGLWILGCHNSDFRNRGMTALLKVSSCDKNTGDYYEDSYEDISAYGLSKNNAIEPRSFSQNPPVLKRHQREITRTTLQSDQEEIDYDDTISVEMKKEDFDIYDEDENQSPRSFQKKTRHYFIAAVERLWDYGMSSSPHVLRNRAQSGSVPQFKKVVFQEFTDGSFTQPLYRGELNEHLGLLGPYIRAEVEDNIMVTFRNQASRPYSFYSSLISYEEDQRQGAEPRKNFVKPNETKTYFWKVQHHMAPTKDEFDCKAWAYFSDVDLEKDVHSGLIGPLLVCHTNTLNPAHGRQVTVQEFALFFTIFDETKSWYFTENMERNCRAPCNIQMEDPTFKENYRFHAINGYIMDTLPGLVMAQDQRIRWYLLSMGSNENIHSIHFSGHVFTVRKKEEYKMALYNLYPGVFETVEMLPSKAGIWRVECLIGEHLHAGMSTLFLVYSNKCQTPLGMASGHIRDFQITASGQYGQWAPKLARLHYSGSINAWSTKEPFSWIKVDLLAPMIIHGIKTQGARQKFSSLYISQFIIMYSLDGKKWQTYRGNSTGTLMVFFGNVDSSGIKHNIFNPPIIARYIRLHPTHYSIRSTLRMELMGCDLNSCSMPLGMESKAISDAQITASSYFTNMFATWSPSKARLHLQGRSNAWRPQVNNPKEWLQVDFQKTMKVTGVTTQGVKSLDTSMYVKEFLISSSQDGHQWTLFFQNGKVKVFQGNQDSFTPVVNSLDPPLLTRYLRIHPQSWVHQIALRMEVLGCEAQDLY

SEQ ID NO: 489 - DNA, 4371 bp, synthetic construct
  misc_feature 1..4371: note = Variant of human B-domain deleted Factor VIII
  source 1..4371: mol_type = other DNA
atgcagattgaactgtctacctgcttcttcctctgtttgctgaggttctgctttagcgccactagacggtactaccttggcgctgtggagctgtcctgggactatatgcagagtgatttgggagagcttcccgtcgacgcacgatttcctcctcgcgttccaaagtcatttcccttcaacacaagcgtggtgtacaagaagacgctcttcgtcgaattcaccgatcacctgttcaatatcgccaaacccagaccaccatggatgggtcttttggggcctaccatacaagcggaggtgtatgacacagttgttatcactctcaagaacatggcttctcatccggtaagtcttcacgcagtgggcgtgtcctactggaaagcttcagaaggagccgagtatgatgatcagacatcccagagggagaaagaagacgacaaggtatttccaggtgggtctcatacctatgtgtggcaagtgctcaaagagaatggccctatggcaagcgatccgctctgtttgacttacagctacctttcacacgttgacctcgtcaaggacctcaactccgggttgattggagccttgttggtatgcagggaaggatctcttgccaaagagaagacacagaccctccacaagtttatccttctctttgctgtgttcgatgagggcaaaagttggcatagcgaaacgaagaattccctcatgcaggatcgcgacgcagccagcgccagagcttggcccaagatgcacactgtgaacggatatgtcaataggtcacttcctggcttgattgggtgtcatcggaaaagtgtctactggcacgtgatcggaatggggacaacaccagaggtccactccatatttctcgaaggccataccttccttgttcgaaaccacagacaggcatccttggagatctctcccattacctttctcactgcccaaacgctccttatggacttgggtcagttccttctcttctgccatatcagctcacaccagcatgatggtatggaagcttatgtgaaagtcgacagttgtcctgaggagccacagttgcgcatgaagaataatgaagaagccgaggattacgacgacgatctcaccgattctgagatggacgtggtgaggtttgatgacgacaactctccctccttcattcaaatccggagcgtggcgaagaaacaccccaagacttgggtccactatatagcggcggaagaggaggattgggattacgctcctcttgtattggcaccagatgaccgctcatacaaaagccagtacctcaacaacggaccgcagagaattggccggaagtataagaaagtgcgatttatggcctatacagacgaaacctttaagacaagggaggccatccagcatgagagtgggattttgggacctcttctttacggcgaagttggtgataccctcctcatcatcttcaagaatcaagcttctcgcccctataacatttacccacacgggatcactgacgttaggcctttgtatagcagaagacttcccaaaggcgtgaagcatctcaaagacttccccattttgccaggcgagatctttaagtacaaatggaccgtcacagtggaagatggaccgactaaatcagaccctcgatgccttacgcggtactattcctccttcgtgaatatggagagagatttggcaagcggactcataggaccactcctcatctgttacaaggaatctgtagaccagaggggtaaccagattatgagtgataaacgcaatgtgatcctttttagcgtcttcgacgagaaccggtcctggtacttgaccgagaatatacaaaggttccttcccaaccccgcaggcgttcagttggaagaccctgagtttcaggccagcaatattatgcactcaatcaacggctatgtgtttgatagtctccagctttctgtttgcctccatgaagtagcctattggtacatcttgtcaattggtgctcaaacagacttcctctccgtcttcttctccggctacacctttaagcacaagatggtgtatgaggacactctcacactctttccattttctggagaaaccgtgttcatgagcatggagaatccaggcctttggatcttgggttgccacaacagtgattttcgcaatcggggaatgactgctctcctcaaagtcagcagctgtgataagaacacaggcgactattacgaagattcttacgaggacataagtgcctacagtttgtccaagaataacgccattgagcccagatcattctcccagaatcctcccgtgcttaaaaggcatcagcgcgaaatcaccagaactactcttcagtctgatcaagaggagattgactatgacgacaccataagcgtggaaatgaagaaggaggatttcgatatctatgacgaagatgagaaccagtctccgcggagctttcagaagaagacgcgacactacttcattgcagcagtcgaaaggctttgggactacggtatgtcatcatcccctcatgtgttgcgcaatagagctcagagtggaagtgttccacagttcaagaaagtcgtctttcaagagtttacagatggcagcttcacacagcctctctatcggggcgagcttaacgaacatttgggactccttggtccctatatccgagccgaagtggaggacaacattatggttacctttaggaatcaagcctctcgcccctacagcttctactcctccctcatcagttatgaggaggatcagagacaaggcgctgaaccacggaagaactttgtgaaaccgaatgagacgaagacctacttctggaaagtacagcaccacatggcccccacaaaagacgaattcgattgcaaagcatgggcgtatttttcagacgttgacttggagaaagatgtacattcaggacttattggtcctttgttggtgtgtcacactaacactctcaatccagcccatggcaggcaggtgacagtccaggaattcgctcttttctttaccatctttgatgagaccaagtcctggtacttcacggaaaacatggagcgcaattgcagagccccctgtaacatacagatggaggaccctacctttaaggaaaattatcggttccacgcaatcaacggatacattatggatacactccctggccttgtgatggctcaggaccaacgaatcaggtggtacctcctcagcatgggttctaatgagaacatacactccattcacttttcaggacatgtgttcactgtccggaagaaagaagagtataagatggccctctacaatttgtatccaggcgtgtttgagaccgttgaaatgcttccctctaaagctggcatctggagagtagagtgcttgatcggagaacatcttcacgcaggtatgagcaccttgttcctcgtgtacagcaacaaatgtcagaccccacttggcatggccagtggacacattcgcgactttcagatcacagcatctggccagtatggacaatgggccccaaagttggctcgcctccattactccggtagcataaatgcgtggtccactaaagaacctttcagctggattaaggtcgatcttcttgcccccatgatcatccacggcattaagacacagggagcgaggcagaaattctcctccctctacatctcacagttcattattatgtatagtttggacggcaagaagtggcaaacttatagaggtaacagtactggaacactcatggtgttcttcggcaacgttgatagctctggcatcaaacacaacatctttaatcctcccataatagctcggtacatcagattgcatccgacccactacagcattaggagtacactccgaatggagcttatgggttgcgacttgaattcctgttcaatgccactcggaatggagtctaaagccatctctgatgcacagataaccgccagtagctactttacgaacatgtttgctacgtggtcaccctctaaggcaaggcttcatttgcaaggccggtctaatgcctggagacctcaggtgaacaacccgaaagaatggctccaggtggactttcagaagaccatgaaagtaacaggtgtcactactcagggagttaagtccttggataccagcatgtatgtgaaggagttccttatttcctcatcacaagatggccaccagtggaccctcttctttcagaatggtaaggtcaaagtgtttcagggcaatcaagacagcttcacacccgtggtgaacagtcttgatcctccactcttgacacgataccttcgaatccatccacagtcttgggttcaccagattgcattgcgcatggaagtacttggatgcgaggctcaggacctctac

SEQ ID NO: 490 - protein, 1457 aa, synthetic construct
  REGION 1..1457: note = Variant of human B-domain deleted Factor VIII
MQIELSTCFFLCLLRFCFSATRRYYLGAVELSWDYMQSDLGELPVDARFPPRVPKSFPFNTSVVYKKTLFVEFTDHLFNIAKPRPPWMGLLGPTIQAEVYDTVVITLKNMASHPVSLHAVGVSYWKASEGAEYDDQTSQREKEDDKVFPGGSHTYVWQVLKENGPMASDPLCLTYSYLSHVDLVKDLNSGLIGALLVCREGSLAKEKTQTLHKFILLFAVFDEGKSWHSETKNSLMQDRDAASARAWPKMHTVNGYVNRSLPGLIGCHRKSVYWHVIGMGTTPEVHSIFLEGHTFLVRNHRQASLEISPITFLTAQTLLMDLGQFLLFCHISSHQHDGMEAYVKVDSCPEEPQLRMKNNEEAEDYDDDLTDSEMDVVRFDDDNSPSFIQIRSVAKKHPKTWVHYIAAEEEDWDYAPLVLAPDDRSYKSQYLNNGPQRIGRKYKKVRFMAYTDETFKTREAIQHESGILGPLLYGEVGDTLLIIFKNQASRPYNIYPHGITDVRPLYSRRLPKGVKHLKDFPILPGEIFKYKWTVTVEDGPTKSDPRCLTRYYSSFVNMERDLASGLIGPLLICYKESVDQRGNQIMSDKRNVILFSVFDENRSWYLTENIQRFLPNPAGVQLEDPEFQASNIMHSINGYVFDSLQLSVCLHEVAYWYILSIGAQTDFLSVFFSGYTFKHKMVYEDTLTLFPFSGETVFMSMENPGLWILGCHNSDFRNRGMTALLKVSSCDKNTGDYYEDSYEDISAYSLSKNNAIEPRSFSQNPPVLKRHQREITRTTLQSDQEEIDYDDTISVEMKKEDFDIYDEDENQSPRSFQKKTRHYFIAAVERLWDYGMSSSPHVLRNRAQSGSVPQFKKVVFQEFTDGSFTQPLYRGELNEHLGLLGPYIRAEVEDNIMVTFRNQASRPYSFYSSLISYEEDQRQGAEPRKNFVKPNETKTYFWKVQHHMAPTKDEFDCKAWAYFSDVDLEKDVHSGLIGPLLVCHTNTLNPAHGRQVTVQEFALFFTIFDETKSWYFTENMERNCRAPCNIQMEDPTFKENYRFHAINGYIMDTLPGLVMAQDQRIRWYLLSMGSNENIHSIHFSGHVFTVRKKEEYKMALYNLYPGVFETVEMLPSKAGIWRVECLIGEHLHAGMSTLFLVYSNKCQTPLGMASGHIRDFQITASGQYGQWAPKLARLHYSGSINAWSTKEPFSWIKVDLLAPMIIHGIKTQGARQKFSSLYISQFIIMYSLDGKKWQTYRGNSTGTLMVFFGNVDSSGIKHNIFNPPIIARYIRLHPTHYSIRSTLRMELMGCDLNSCSMPLGMESKAISDAQITASSYFTNMFATWSPSKARLHLQGRSNAWRPQVNNPKEWLQVDFQKTMKVTGVTTQGVKSLDTSMYVKEFLISSSQDGHQWTLFFQNGKVKVFQGNQDSFTPVVNSLDPPLLTRYLRIHPQSWVHQIALRMEVLGCEAQDLY

SEQ ID NO: 491 - DNA, 4371 bp, synthetic construct
  misc_feature 1..4371: note = Variant of human B-domain deleted Factor VIII
  source 1..4371: mol_type = other DNA
atgcagattgaactgtctacctgcttcttcctctgtttgctgaggttctgctttagcgccactagacggtactaccttggcgctgtggagctgtcctgggactatatgcagagtgatttgggagagcttcccgtcgacgcacgatttcctcctcgcgttccaaagtcatttcccttcaacacaagcgtggtgtacaagaagacgctcttcgtcgaattcaccgatcacctgttcaatatcgccaaacccagaccaccatggatgggtcttttggggcctaccatacaagcggaggtgtatgacacagttgttatcactctcaagaacatggcttctcatccggtaagtcttcacgcagtgggcgtgtcctactggaaagcttcagaaggagccgagtatgatgatcagacatcccagagggagaaagaagacgacaaggtatttccaggtgggtctcatacctatgtgtggcaagtgctcaaagagaatggccctatggcaagcgatccgctctgtttgacttacagctacctttcacacgttgacctcgtcaaggacctcaactccgggttgattggagccttgttggtatgcagggaaggatctcttgccaaagagaagacacagaccctccacaagtttatccttctctttgctgtgttcgatgagggcaaaagttggcatagcgaaacgaagaattccctcatgcaggatcgcgacgcagccagcgccagagcttggcccaagatgcacactgtgaacggatatgtcaataggtcacttcctggcttgattgggtgtcatcggaaaagtgtctactggcacgtgatcggaatggggacaacaccagaggtccactccatatttctcgaaggccataccttccttgttcgaaaccacagacaggcatccttggagatctctcccattacctttctcactgcccaaacgctccttatggacttgggtcagttccttctcttctgccatatcagctcacaccagcatgatggtatggaagcttatgtgaaagtcgacagttgtcctgaggagccacagttgcgcatgaagaataatgaagaagccgaggattacgacgacgatctcaccgattctgagatggacgtggtgaggtttgatgacgacaactctccctccttcattcaaatccggagcgtggcgaagaaacaccccaagacttgggtccactatatagcggcggaagaggaggattgggattacgctcctcttgtattggcaccagatgaccgctcatacaaaagccagtacctcaacaacggaccgcagagaattggccggaagtataagaaagtgcgatttatggcctatacagacgaaacctttaagacaagggaggccatccagcatgagagtgggattttgggacctcttctttacggcgaagttggtgataccctcctcatcatcttcaagaatcaagcttctcgcccctataacatttacccacacgggatcactgacgttaggcctttgtatagcagaagacttcccaaaggcgtgaagcatctcaaagacttccccattttgccaggcgagatctttaagtacaaatggaccgtcacagtggaagatggaccgactaaatcagaccctcgatgccttacgcggtactattcctccttcgtgaatatggagagagatttggcaagcggactcataggaccactcctcatctgttacaaggaatctgtagaccagaggggtaaccagattatgagtgataaacgcaatgtgatcctttttagcgtcttcgacgagaaccggtcctggtacttgaccgagaatatacaaaggttccttcccaaccccgcaggcgttcagttggaagaccctgagtttcaggccagcaatattatgcactcaatcaacggctatgtgtttgatagtctccagctttctgtttgcctccatgaagtagcctattggtacatcttgtcaattggtgctcaaacagacttcctctccgtcttcttctccggctacacctttaagcacaagatggtgtatgaggacactctcacactctttccattttctggagaaaccgtgttcatgagcatggagaatccaggcctttggatcttgggttgccacaacagtgattttcgcaatcggggaatgactgctctcctcaaagtcagcagctgtgataagaacacaggcgactattacgaagattcttacgaggacataagtgcctacttgttgtccaagaataacgccattgagcccagatcattctcccagaatcctcccgtgcttaaaaggcatcagcgcgaaatcaccagaactactcttcagtctgatcaagaggagattgactatgacgacaccataagcgtggaaatgaagaaggaggatttcgatatctatgacgaagatgagaaccagtctccgcggagctttcagaagaagacgcgacactacttcattgcagcagtcgaaaggctttgggactacggtatgtcatcatcccctcatgtgttgcgcaatagagctcagagtggaagtgttccacagttcaagaaagtcgtctttcaagagtttacagatggcagcttcacacagcctctctatcggggcgagcttaacgaacatttgggactccttggtccctatatccgagccgaagtggaggacaacattatggttacctttaggaatcaagcctctcgcccctacagcttctactcctccctcatcagttatgaggaggatcagagacaaggcgctgaaccacggaagaactttgtgaaaccgaatgagacgaagacctacttctggaaagtacagcaccacatggcccccacaaaagacgaattcgattgcaaagcatgggcgtatttttcagacgttgacttggagaaagatgtacattcaggacttattggtcctttgttggtgtgtcacactaacactctcaatccagcccatggcaggcaggtgacagtccaggaattcgctcttttctttaccatctttgatgagaccaagtcctggtacttcacggaaaacatggagcgcaattgcagagccccctgtaacatacagatggaggaccctacctttaaggaaaattatcggttccacgcaatcaacggatacattatggatacactccctggccttgtgatggctcaggaccaacgaatcaggtggtacctcctcagcatgggttctaatgagaacatacactccattcacttttcaggacatgtgttcactgtccggaagaaagaagagtataagatggccctctacaatttgtatccaggcgtgtttgagaccgttgaaatgcttccctctaaagctggcatctggagagtagagtgcttgatcggagaacatcttcacgcaggtatgagcaccttgttcctcgtgtacagcaacaaatgtcagaccccacttggcatggccagtggacacattcgcgactttcagatcacagcatctggccagtatggacaatgggccccaaagttggctcgcctccattactccggtagcataaatgcgtggtccactaaagaacctttcagctggattaaggtcgatcttcttgcccccatgatcatccacggcattaagacacagggagcgaggcagaaagggtcctccctctacatctcacagttcattattatgtatagtttggacggcaagaagtggcaaacttatagaggtaacagtactggaacactcatggtgttcttcggcaacgttgatagctctggcatcaaacacaacatctttaatcctcccataatagctcggtacatcagattgcatccgacccactacagcattaggagtacactccgaatggagcttatgggttgcgacttgaattcctgttcaatgccactcggaatggagtctaaagccatctctgatgcacagataaccgccagtagctactttacgaacatgtttgctacgtggtcaccctctaaggcaaggcttcatttgcaaggccggtctaatgcctggagacctcaggtgaacaacccgaaagaatggctccaggtggactttcagaagaccatgaaagtaacaggtgtcactactcagggagttaagtccttggataccagcatgtatgtgaaggagttccttatttcctcatcacaagatggccaccagtggaccctcttctttcagaatggtaaggtcaaagtgtttcagggcaatcaagacagcttcacacccgtggtgaacagtcttgatcctccactcttgacacgataccttcgaatccatccacagtcttgggttcaccagattgcattgcgcatggaagtacttggatgcgaggctcaggacctctac

SEQ ID NO: 492 - protein, 1457 aa, synthetic construct
  REGION 1..1457: note = Variant of human B-domain deleted Factor VIII
MQIELSTCFFLCLLRFCFSATRRYYLGAVELSWDYMQSDLGELPVDARFPPRVPKSFPFNTSVVYKKTLFVEFTDHLFNIAKPRPPWMGLLGPTIQAEVYDTVVITLKNMASHPVSLHAVGVSYWKASEGAEYDDQTSQREKEDDKVFPGGSHTYVWQVLKENGPMASDPLCLTYSYLSHVDLVKDLNSGLIGALLVCREGSLAKEKTQTLHKFILLFAVFDEGKSWHSETKNSLMQDRDAASARAWPKMHTVNGYVNRSLPGLIGCHRKSVYWHVIGMGTTPEVHSIFLEGHTFLVRNHRQASLEISPITFLTAQTLLMDLGQFLLFCHISSHQHDGMEAYVKVDSCPEEPQLRMKNNEEAEDYDDDLTDSEMDVVRFDDDNSPSFIQIRSVAKKHPKTWVHYIAAEEEDWDYAPLVLAPDDRSYKSQYLNNGPQRIGRKYKKVRFMAYTDETFKTREAIQHESGILGPLLYGEVGDTLLIIFKNQASRPYNIYPHGITDVRPLYSRRLPKGVKHLKDFPILPGEIFKYKWTVTVEDGPTKSDPRCLTRYYSSFVNMERDLASGLIGPLLICYKESVDQRGNQIMSDKRNVILFSVFDENRSWYLTENIQRFLPNPAGVQLEDPEFQASNIMHSINGYVFDSLQLSVCLHEVAYWYILSIGAQTDFLSVFFSGYTFKHKMVYEDTLTLFPFSGETVFMSMENPGLWILGCHNSDFRNRGMTALLKVSSCDKNTGDYYEDSYEDISAYLLSKNNAIEPRSFSQNPPVLKRHQREITRTTLQSDQEEIDYDDTISVEMKKEDFDIYDEDENQSPRSFQKKTRHYFIAAVERLWDYGMSSSPHVLRNRAQSGSVPQFKKVVFQEFTDGSFTQPLYRGELNEHLGLLGPYIRAEVEDNIMVTFRNQASRPYSFYSSLISYEEDQRQGAEPRKNFVKPNETKTYFWKVQHHMAPTKDEFDCKAWAYFSDVDLEKDVHSGLIGPLLVCHTNTLNPAHGRQVTVQEFALFFTIFDETKSWYFTENMERNCRAPCNIQMEDPTFKENYRFHAINGYIMDTLPGLVMAQDQRIRWYLLSMGSNENIHSIHFSGHVFTVRKKEEYKMALYNLYPGVFETVEMLPSKAGIWRVECLIGEHLHAGMSTLFLVYSNKCQTPLGMASGHIRDFQITASGQYGQWAPKLARLHYSGSINAWSTKEPFSWIKVDLLAPMIIHGIKTQGARQKGSSLYISQFIIMYSLDGKKWQTYRGNSTGTLMVFFGNVDSSGIKHNIFNPPIIARYIRLHPTHYSIRSTLRMELMGCDLNSCSMPLGMESKAISDAQITASSYFTNMFATWSPSKARLHLQGRSNAWRPQVNNPKEWLQVDFQKTMKVTGVTTQGVKSLDTSMYVKEFLISSSQDGHQWTLFFQNGKVKVFQGNQDSFTPVVNSLDPPLLTRYLRIHPQSWVHQIALRMEVLGCEAQDLY

SEQ ID NO: 493 - DNA, 4371 bp, synthetic construct
  misc_feature 1..4371: note = Variant of human B-domain deleted Factor VIII
  source 1..4371: mol_type = other DNA
atgcagattgaactgtctacctgcttcttcctctgtttgctgaggttctgctttagcgccactagacggtactaccttggcgctgtggagctgtcctgggactatatgcagagtgatttgggagagcttcccgtcgacgcacgatttcctcctcgcgttccaaagtcatttcccttcaacacaagcgtggtgtacaagaagacgctcttcgtcgaattcaccgatcacctgttcaatatcgccaaacccagaccaccatggatgggtcttttggggcctaccatacaagcggaggtgtatgacacagttgttatcactctcaagaacatggcttctcatccggtaagtcttcacgcagtgggcgtgtcctactggaaagcttcagaaggagccgagtatgatgatcagacatcccagagggagaaagaagacgacaaggtatttccaggtgggtctcatacctatgtgtggcaagtgctcaaagagaatggccctatggcaagcgatccgctctgtttgacttacagctacctttcacacgttgacctcgtcaaggacctcaactccgggttgattggagccttgttggtatgcagggaaggatctcttgccaaagagaagacacagaccctccacaagtttatccttctctttgctgtgttcgatgagggcaaaagttggcatagcgaaacgaagaattccctcatgcaggatcgcgacgcagccagcgccagagcttggcccaagatgcacactgtgaacggatatgtcaataggtcacttcctggcttgattgggtgtcatcggaaaagtgtctactggcacgtgatcggaatggggacaacaccagaggtccactccatatttctcgaaggccataccttccttgttcgaaaccacagacaggcatccttggagatctctcccattacctttctcactgcccaaacgctccttatggacttgggtcagttccttctcttctgccatatcagctcacaccagcatgatggtatggaagcttatgtgaaagtcgacagttgtcctgaggagccacagttgcgcatgaagaataatgaagaagccgaggattacgacgacgatctcaccgattctgagatggacgtggtgaggtttgatgacgacaactctccctccttcattcaaatccggagcgtggcgaagaaacaccccaagacttgggtccactatatagcggcggaagaggaggattgggattacgctcctcttgtattggcaccagatgaccgctcatacaaaagccagtacctcaacaacggaccgcagagaattggccggaagtataagaaagtgcgatttatggcctatacagacgaaacctttaagacaagggaggccatccagcatgagagtgggattttgggacctcttctttacggcgaagttggtgataccctcctcatcatcttcaagaatcaagcttctcgcccctataacatttacccacacgggatcactgacgttaggcctttgtatagcagaagacttcccaaaggcgtgaagcatctcaaagacttccccattttgccaggcgagatctttaagtacaaatggaccgtcacagtggaagatggaccgactaaatcagaccctcgatgccttacgcggtactattcctccttcgtgaatatggagagagatttggcaagcggactcataggaccactcctcatctgttacaaggaatctgtagaccagaggggtaaccagattatgagtgataaacgcaatgtgatcctttttagcgtcttcgacgagaaccggtcctggtacttgaccgagaatatacaaaggttccttcccaaccccgcaggcgttcagttggaagaccctgagtttcaggccagcaatattatgcactcaatcaacggctatgtgtttgatagtctccagctttctgtttgcctccatgaagtagcctattggtacatcttgtcaattggtgctcaaacagacttcctctccgtcttcttctccggctacacctttaagcacaagatggtgtatgaggacactctcacactctttccattttctggagaaaccgtgttcatgagcatggagaatccaggcctttggatcttgggttgccacaacagtgattttcgcaatcggggaatgactgctctcctcaaagtcagcagctgtgataagaacacaggcgactattacgaagattcttacgaggacataagtgcctacttgttgtccaagaataacgccattgagcccagatcattctcccagaatcctcccgtgcttaaaaggcatcagcgcgaaatcaccagaactactcttcagtctgatcaagaggagattgactatgacgacaccataagcgtggaaatgaagaaggaggatttcgatatctatgacgaagatgagaaccagtctccgcggagctttcagaagaagacgcgacactacttcattgcagcagtcgaaaggctttgggactacggtatgtcatcatcccctcatgtgttgcgcaatagagctcagagtggaagtgttccacagttcaagaaagtcgtctttcaagagtttacagatggcagcttcacacagcctctctatcggggcgagcttaacgaacatttgggactccttggtccctatatccgagccgaagtggaggacaacattatggttacctttaggaatcaagcctctcgcccctacagcttctactcctccctcatcagttatgaggaggatcagagacaaggcgctgaaccacggaagaactttgtgaaaccgaatgagacgaagacctacttctggaaagtacagcaccacatggcccccacaaaagacgaattcgattgcaaagcatgggcgtatttttcagacgttgacttggagaaagatgtacattcaggacttattggtcctttgttggtgtgtcacactaacactctcaatccagcccatggcaggcaggtgacagtccaggaattcgctcttttctttaccatctttgatgagaccaagtcctggtacttcacggaaaacatggagcgcaattgcagagccccctgtaacatacagatggaggaccctacctttaaggaaaattatcggttccacgcaatcaacggatacattatggatacactccctggccttgtgatggctcaggaccaacgaatcaggtggtacctcctcagcatgggttctaatgagaacatacactccattcacttttcaggacatgtgttcactgtccggaagaaagaagagtataagatggccctctacaatttgtatccaggcgtgtttgagaccgttgaaatgcttccctctaaagctggcatctggagagtagagtgcttgatcggagaacatcttcacgcaggtatgagcaccttgttcctcgtgtacagcaacaaatgtcagaccccacttggcatggccagtggacacattcgcgactttcagatcacagcatctggccagtatggacaatgggccccaaagttggctcgcctccattactccggtagcataaatgcgtggtccactaaagaacctttcagctggattaaggtcgatcttcttgcccccatgctgatccacggcattaagacacagggagcgaggcagaaattctcctccctctacatctcacagttcattattatgtatagtttggacggcaagaagtggcaaacttatagaggtaacagtactggaacactcatggtgttcttcggcaacgttgatagctctggcatcaaacacaacatctttaatcctcccataatagctcggtacatcagattgcatccgacccactacagcattaggagtacactccgaatggagcttatgggttgcgacttgaattcctgttcaatgccactcggaatggagtctaaagccatctctgatgcacagataaccgccagtagctactttacgaacatgtttgctacgtggtcaccctctaaggcaaggcttcatttgcaaggccggtctaatgcctggagacctcaggtgaacaacccgaaagaatggctccaggtggactttcagaagaccatgaaagtaacaggtgtcactactcagggagttaagtccttggataccagcatgtatgtgaaggagttccttatttcctcatcacaagatggccaccagtggaccctcttctttcagaatggtaaggtcaaagtgtttcagggcaatcaagacagcttcacacccgtggtgaacagtcttgatcctccactcttgacacgataccttcgaatccatccacagtcttgggttcaccagattgcattgcgcatggaagtacttggatgcgaggctcaggacctctac

SEQ ID NO: 494 - protein, 1457 aa, synthetic construct
  REGION 1..1457: note = Variant of human B-domain deleted Factor VIII
MQIELSTCFFLCLLRFCFSATRRYYLGAVELSWDYMQSDLGELPVDARFPPRVPKSFPFNTSVVYKKTLFVEFTDHLFNIAKPRPPWMGLLGPTIQAEVYDTVVITLKNMASHPVSLHAVGVSYWKASEGAEYDDQTSQREKEDDKVFPGGSHTYVWQVLKENGPMASDPLCLTYSYLSHVDLVKDLNSGLIGALLVCREGSLAKEKTQTLHKFILLFAVFDEGKSWHSETKNSLMQDRDAASARAWPKMHTVNGYVNRSLPGLIGCHRKSVYWHVIGMGTTPEVHSIFLEGHTFLVRNHRQASLEISPITFLTAQTLLMDLGQFLLFCHISSHQHDGMEAYVKVDSCPEEPQLRMKNNEEAEDYDDDLTDSEMDVVRFDDDNSPSFIQIRSVAKKHPKTWVHYIAAEEEDWDYAPLVLAPDDRSYKSQYLNNGPQRIGRKYKKVRFMAYTDETFKTREAIQHESGILGPLLYGEVGDTLLIIFKNQASRPYNIYPHGITDVRPLYSRRLPKGVKHLKDFPILPGEIFKYKWTVTVEDGPTKSDPRCLTRYYSSFVNMERDLASGLIGPLLICYKESVDQRGNQIMSDKRNVILFSVFDENRSWYLTENIQRFLPNPAGVQLEDPEFQASNIMHSINGYVFDSLQLSVCLHEVAYWYILSIGAQTDFLSVFFSGYTFKHKMVYEDTLTLFPFSGETVFMSMENPGLWILGCHNSDFRNRGMTALLKVSSCDKNTGDYYEDSYEDISAYLLSKNNAIEPRSFSQNPPVLKRHQREITRTTLQSDQEEIDYDDTISVEMKKEDFDIYDEDENQSPRSFQKKTRHYFIAAVERLWDYGMSSSPHVLRNRAQSGSVPQFKKVVFQEFTDGSFTQPLYRGELNEHLGLLGPYIRAEVEDNIMVTFRNQASRPYSFYSSLISYEEDQRQGAEPRKNFVKPNETKTYFWKVQHHMAPTKDEFDCKAWAYFSDVDLEKDVHSGLIGPLLVCHTNTLNPAHGRQVTVQEFALFFTIFDETKSWYFTENMERNCRAPCNIQMEDPTFKENYRFHAINGYIMDTLPGLVMAQDQRIRWYLLSMGSNENIHSIHFSGHVFTVRKKEEYKMALYNLYPGVFETVEMLPSKAGIWRVECLIGEHLHAGMSTLFLVYSNKCQTPLGMASGHIRDFQITASGQYGQWAPKLARLHYSGSINAWSTKEPFSWIKVDLLAPMLIHGIKTQGARQKFSSLYISQFIIMYSLDGKKWQTYRGNSTGTLMVFFGNVDSSGIKHNIFNPPIIARYIRLHPTHYSIRSTLRMELMGCDLNSCSMPLGMESKAISDAQITASSYFTNMFATWSPSKARLHLQGRSNAWRPQVNNPKEWLQVDFQKTMKVTGVTTQGVKSLDTSMYVKEFLISSSQDGHQWTLFFQNGKVKVFQGNQDSFTPVVNSLDPPLLTRYLRIHPQSWVHQIALRMEVLGCEAQDLY

SEQ ID NO: 495 - DNA, 4371 bp, synthetic construct
  misc_feature 1..4371: note = Variant of human B-domain deleted Factor VIII
  source 1..4371: mol_type = other DNA
atgcagattgaactgtctacctgcttcttcctctgtttgctgaggttctgctttagcgccactagacggtactaccttggcgctgtggagctgtcctgggactatatgcagagtgatttgggagagcttcccgtcgacgcacgatttcctcctcgcgttccaaagtcatttcccttcaacacaagcgtggtgtacaagaagacgctcttcgtcgaattcaccgatcacctgttcaatatcgccaaacccagaccaccatggatgggtcttttggggcctaccatacaagcggaggtgtatgacacagttgttatcactctcaagaacatggcttctcatccggtaagtcttcacgcagtgggcgtgtcctactggaaagcttcagaaggagccgagtatgatgatcagacatcccagagggagaaagaagacgacaaggtatttccaggtgggtctcatacctatgtgtggcaagtgctcaaagagaatggccctatggcaagcgatccgctctgtttgacttacagctacctttcacacgttgacctcgtcaaggacctcaactccgggttgattggagccttgttggtatgcagggaaggatctcttgccaaagagaagacacagaccctccacaagtttatccttctctttgctgtgttcgatgagggcaaaagttggcatagcgaaacgaagaattccctcatgcaggatcgcgacgcagccagcgccagagcttggcccaagatgcacactgtgaacggatatgtcaataggtcacttcctggcttgattgggtgtcatcggaaaagtgtctactggcacgtgatcggaatggggacaacaccagaggtccactccatatttctcgaaggccataccttccttgttcgaaaccacagacaggcatccttggagatctctcccattacctttctcactgcccaaacgctccttatggacttgggtcagttccttctcttctgccatatcagctcacaccagcatgatggtatggaagcttatgtgaaagtcgacagttgtcctgaggagccacagttgcgcatgaagaataatgaagaagccgaggattacgacgacgatctcaccgattctgagatggacgtggtgaggtttgatgacgacaactctccctccttcattcaaatccggagcgtggcgaagaaacaccccaagacttgggtccactatatagcggcggaagaggaggattgggattacgctcctcttgtattggcaccagatgaccgctcatacaaaagccagtacctcaacaacggaccgcagagaattggccggaagtataagaaagtgcgatttatggcctatacagacgaaacctttaagacaagggaggccatccagcatgagagtgggattttgggacctcttctttacggcgaagttggtgataccctcctcatcatcttcaagaatcaagcttctcgcccctataacatttacccacacgggatcactgacgttaggcctttgtatagcagaagacttcccaaaggcgtgaagcatctcaaagacttccccattttgccaggcgagatctttaagtacaaatggaccgtcacagtggaagatggaccgactaaatcagaccctcgatgccttacgcggtactattcctccttcgtgaatatggagagagatttggcaagcggactcataggaccactcctcatctgttacaaggaatctgtagaccagaggggtaaccagattatgagtgataaacgcaatgtgatcctttttagcgtcttcgacgagaaccggtcctggtacttgaccgagaatatacaaaggttccttcccaaccccgcaggcgttcagttggaagaccctgagtttcaggccagcaatattatgcactcaatcaacggctatgtgtttgatagtctccagctttctgtttgcctccatgaagtagcctattggtacatcttgtcaattggtgctcaaacagacttcctctccgtcttcttctccggctacacctttaagcacaagatggtgtatgaggacactctcacactctttccattttctggagaaaccgtgttcatgagcatggagaatccaggcctttggatcttgggttgccacaacagtgattttcgcaatcggggaatgactgctctcctcaaagtcagcagctgtgataagaacacaggcgactattacgaagattcttacgaggacataagtgcctacttgttgtccaagaataacgccattgagcccagatcattctcccagaatcctcccgtgcttaaaaggcatcagcgcgaaatcaccagaactactcttcagtctgatcaagaggagattgactatgacgacaccataagcgtggaaatgaagaaggaggatttcgatatctatgacgaagatgagaaccagtctccgcggagctttcagaagaagacgcgacactacttcattgcagcagtcgaaaggctttgggactacggtatgtcatcatcccctcatgtgttgcgcaatagagctcagagtggaagtgttccacagttcaagaaagtcgtctttcaagagtttacagatggcagcttcacacagcctctctatcggggcgagcttaacgaacatttgggactccttggtccctatatccgagccgaagtggaggacaacattatggttacctttaggaatcaagcctctcgcccctacagcttctactcctccctcatcagttatgaggaggatcagagacaaggcgctgaaccacggaagaactttgtgaaaccgaatgagacgaagacctacttctggaaagtacagcaccacatggcccccacaaaagacgaattcgattgcaaagcatgggcgtatttttcagacgttgacttggagaaagatgtacattcaggacttattggtcctttgttggtgtgtcacactaacactctcaatccagcccatggcaggcaggtgacagtccaggaattcgctcttttctttaccatctttgatgagaccaagtcctggtacttcacggaaaacatggagcgcaattgcagagccccctgtaacatacagatggaggaccctacctttaaggaaaattatcggttccacgcaatcaacggatacattatggatacactccctggccttgtgatggctcaggaccaacgaatcaggtggtacctcctcagcatgggttctaatgagaacatacactccattcacttttcaggacatgtgttcactgtccggaagaaagaagagtataagatggccctctacaatttgtatccaggcgtgtttgagaccgttgaaatgcttccctctaaagctggcatctggagagtagagtgcttgatcggagaacatcttcacgcaggtatgagcaccttgttcctcgtgtacagcaacaaatgtcagaccccacttggcatggccagtggacacattcgcgactttcagatcacagcatctggccagtatggacaatgggccccaaagttggctcgcctccattactccggtagcataaatgcgtggtccactaaagaacctttcagctggattaaggtcgatcttcttgcccccatgatcatccacggcattaagacacagggagcgaggcagaaattctcctccctctttatctcacagttcattattatgtatagtttggacggcaagaagtggcaaacttatagaggtaacagtactggaacactcatggtgttcttcggcaacgttgatagctctggcatcaaacacaacatctttaatcctcccataatagctcggtacatcagattgcatccgacccactacagcattaggagtacactccgaatggagcttatgggttgcgacttgaattcctgttcaatgccactcggaatggagtctaaagccatctctgatgcacagataaccgccagtagctactttacgaacatgtttgctacgtggtcaccctctaaggcaaggcttcatttgcaaggccggtctaatgcctggagacctcaggtgaacaacccgaaagaatggctccaggtggactttcagaagaccatgaaagtaacaggtgtcactactcagggagttaagtccttggataccagcatgtatgtgaaggagttccttatttcctcatcacaagatggccaccagtggaccctcttctttcagaatggtaaggtcaaagtgtttcagggcaatcaagacagcttcacacccgtggtgaacagtcttgatcctccactcttgacacgataccttcgaatccatccacagtcttgggttcaccagattgcattgcgcatggaagtacttggatgcgaggctcaggacctctac

SEQ ID NO: 496 - protein, 1457 aa, synthetic construct
  REGION 1..1457: note = Variant of human B-domain deleted Factor VIII
MQIELSTCFFLCLLRFCFSATRRYYLGAVELSWDYMQSDLGELPVDARFPPRVPKSFPFNTSVVYKKTLFVEFTDHLFNIAKPRPPWMGLLGPTIQAEVYDTVVITLKNMASHPVSLHAVGVSYWKASEGAEYDDQTSQREKEDDKVFPGGSHTYVWQVLKENGPMASDPLCLTYSYLSHVDLVKDLNSGLIGALLVCREGSLAKEKTQTLHKFILLFAVFDEGKSWHSETKNSLMQDRDAASARAWPKMHTVNGYVNRSLPGLIGCHRKSVYWHVIGMGTTPEVHSIFLEGHTFLVRNHRQASLEISPITFLTAQTLLMDLGQFLLFCHISSHQHDGMEAYVKVDSCPEEPQLRMKNNEEAEDYDDDLTDSEMDVVRFDDDNSPSFIQIRSVAKKHPKTWVHYIAAEEEDWDYAPLVLAPDDRSYKSQYLNNGPQRIGRKYKKVRFMAYTDETFKTREAIQHESGILGPLLYGEVGDTLLIIFKNQASRPYNIYPHGITDVRPLYSRRLPKGVKHLKDFPILPGEIFKYKWTVTVEDGPTKSDPRCLTRYYSSFVNMERDLASGLIGPLLICYKESVDQRGNQIMSDKRNVILFSVFDENRSWYLTENIQRFLPNPAGVQLEDPEFQASNIMHSINGYVFDSLQLSVCLHEVAYWYILSIGAQTDFLSVFFSGYTFKHKMVYEDTLTLFPFSGETVFMSMENPGLWILGCHNSDFRNRGMTALLKVSSCDKNTGDYYEDSYEDISAYLLSKNNAIEPRSFSQNPPVLKRHQREITRTTLQSDQEEIDYDDTISVEMKKEDFDIYDEDENQSPRSFQKKTRHYFIAAVERLWDYGMSSSPHVLRNRAQSGSVPQFKKVVFQEFTDGSFTQPLYRGELNEHLGLLGPYIRAEVEDNIMVTFRNQASRPYSFYSSLISYEEDQRQGAEPRKNFVKPNETKTYFWKVQHHMAPTKDEFDCKAWAYFSDVDLEKDVHSGLIGPLLVCHTNTLNPAHGRQVTVQEFALFFTIFDETKSWYFTENMERNCRAPCNIQMEDPTFKENYRFHAINGYIMDTLPGLVMAQDQRIRWYLLSMGSNENIHSIHFSGHVFTVRKKEEYKMALYNLYPGVFETVEMLPSKAGIWRVECLIGEHLHAGMSTLFLVYSNKCQTPLGMASGHIRDFQITASGQYGQWAPKLARLHYSGSINAWSTKEPFSWIKVDLLAPMIIHGIKTQGARQKFSSLFISQFIIMYSLDGKKWQTYRGNSTGTLMVFFGNVDSSGIKHNIFNPPIIARYIRLHPTHYSIRSTLRMELMGCDLNSCSMPLGMESKAISDAQITASSYFTNMFATWSPSKARLHLQGRSNAWRPQVNNPKEWLQVDFQKTMKVTGVTTQGVKSLDTSMYVKEFLISSSQDGHQWTLFFQNGKVKVFQGNQDSFTPVVNSLDPPLLTRYLRIHPQSWVHQIALRMEVLGCEAQDLY

SEQ ID NO: 497 - DNA, 4371 bp, synthetic construct
  misc_feature 1..4371: note = Variant of human B-domain deleted Factor VIII
  source 1..4371: mol_type = other DNA
atgcagattgaactgtctacctgcttcttcctctgtttgctgaggttctgctttagcgccactagacggtactaccttggcgctgtggagctgtcctgggactatatgcagagtgatttgggagagcttcccgtcgacgcacgatttcctcctcgcgttccaaagtcatttcccttcaacacaagcgtggtgtacaagaagacgctcttcgtcgaattcaccgatcacctgttcaatatcgccaaacccagaccaccatggatgggtcttttggggcctaccatacaagcggaggtgtatgacacagttgttatcactctcaagaacatggcttctcatccggtaagtcttcacgcagtgggcgtgtcctactggaaagcttcagaaggagccgagtatgatgatcagacatcccagagggagaaagaagacgacaaggtatttccaggtgggtctcatacctatgtgtggcaagtgctcaaagagaatggccctatggcaagcgatccgctctgtttgacttacagctacctttcacacgttgacctcgtcaaggacctcaactccgggttgattggagccttgttggtatgcagggaaggatctcttgccaaagagaagacacagaccctccacaagtttatccttctctttgctgtgttcgatgagggcaaaagttggcatagcgaaacgaagaattccctcatgcaggatcgcgacgcagccagcgccagagcttggcccaagatgcacactgtgaacggatatgtcaataggtcacttcctggcttgattgggtgtcatcggaaaagtgtctactggcacgtgatcggaatggggacaacaccagaggtccactccatatttctcgaaggccataccttccttgttcgaaaccacagacaggcatccttggagatctctcccattacctttctcactgcccaaacgctccttatggacttgggtcagttccttctcttctgccatatcagctcacaccagcatgatggtatggaagcttatgtgaaagtcgacagttgtcctgaggagccacagttgcgcatgaagaataatgaagaagccgaggattacgacgacgatctcaccgattctgagatggacgtggtgaggtttgatgacgacaactctccctccttcattcaaatccggagcgtggcgaagaaacaccccaagacttgggtccactatatagcggcggaagaggaggattgggattacgctcctcttgtattggcaccagatgaccgctcatacaaaagccagtacctcaacaacggaccgcagagaattggccggaagtataagaaagtgcgatttatggcctatacagacgaaacctttaagacaagggaggccatccagcatgagagtgggattttgggacctcttctttacggcgaagttggtgataccctcctcatcatcttcaagaatcaagcttctcgcccctataacatttacccacacgggatcactgacgttaggcctttgtatagcagaagacttcccaaaggcgtgaagcatctcaaagacttccccattttgccaggcgagatctttaagtacaaatggaccgtcacagtggaagatggaccgactaaatcagaccctcgatgccttacgcggtactattcctccttcgtgaatatggagagagatttggcaagcggactcataggaccactcctcatctgttacaaggaatctgtagaccagaggggtaaccagattatgagtgataaacgcaatgtgatcctttttagcgtcttcgacgagaaccggtcctggtacttgaccgagaatatacaaaggttccttcccaaccccgcaggcgttcagttggaagaccctgagtttcaggccagcaatattatgcactcaatcaacggctatgtgtttgatagtctccagctttctgtttgcctccatgaagtagcctattggtacatcttgtcaattggtgctcaaacagacttcctctccgtcttcttctccggctacacctttaagcacaagatggtgtatgaggacactctcacactctttccattttctggagaaaccgtgttcatgagcatggagaatccaggcctttggatcttgggttgccacaacagtgattttcgcaatcggggaatgactgctctcctcaaagtcagcagctgtgataagaacacaggcgactattacgaagattcttacgaggacataagtgcctacttgttgtccaagaataacgccattgagcccagatcattctcccagaatcctcccgtgcttaaaaggcatcagcgcgaaatcaccagaactactcttcagtctgatcaagaggagattgactatgacgacaccataagcgtggaaatgaagaaggaggatttcgatatctatgacgaagatgagaaccagtctccgcggagctttcagaagaagacgcgacactacttcattgcagcagtcgaaaggctttgggactacggtatgtcatcatcccctcatgtgttgcgcaatagagctcagagtggaagtgttccacagttcaagaaagtcgtctttcaagagtttacagatggcagcttcacacagcctctctatcggggcgagcttaacgaacatttgggactccttggtccctatatccgagccgaagtggaggacaacattatggttacctttaggaatcaagcctctcgcccctacagcttctactcctccctcatcagttatgaggaggatcagagacaaggcgctgaaccacggaagaactttgtgaaaccgaatgagacgaagacctacttctggaaagtacagcaccacatggcccccacaaaagacgaattcgattgcaaagcatgggcgtatttttcagacgttgacttggagaaagatgtacattcaggacttattggtcctttgttggtgtgtcacactaacactctcaatccagcccatggcaggcaggtgacagtccaggaattcgctcttttctttaccatctttgatgagaccaagtcctggtacttcacggaaaacatggagcgcaattgcagagccccctgtaacatacagatggaggaccctacctttaaggaaaattatcggttccacgcaatcaacggatacattatggatacactccctggccttgtgatggctcaggaccaacgaatcaggtggtacctcctcagcatgggttctaatgagaacatacactccattcacttttcaggacatgtgttcactgtccggaagaaagaagagtataagatggccctctacaatttgtatccaggcgtgtttgagaccgttgaaatgcttccctctaaagctggcatctggagagtagagtgcttgatcggagaacatcttcacgcaggtatgagcaccttgttcctcgtgtacagcaacaaatgtcagaccccacttggcatggccagtggacacattcgcgactttcagatcacagcatctggccagtatggacaatgggccccaaagttggctcgcctccattactccggtagcataaatgcgtggtccactaaagaacctgagagctggattaaggtcgatcttcttgcccccatgatcatccacggcattaagacacagggagcgaggcagaaattctcctccctctacatctcacagttcattattatgtatagtttggacggcaagaagtggcaaacttatagaggtaacagtactggaacactcatggtgttcttcggcaacgttgatagctctggcatcaaacacaacatctttaatcctcccataatagctcggtacatcagattgcatccgacccactacagcattaggagtacactccgaatggagcttatgggttgcgacttgaattcctgttcaatgccactcggaatggagtctaaagccatctctgatgcacagataaccgccagtagctactttacgaacatgtttgctacgtggtcaccctctaaggcaaggcttcatttgcaaggccggtctaatgcctggagacctcaggtgaacaacccgaaagaatggctccaggtggactttcagaagaccatgaaagtaacaggtgtcactactcagggagttaagtccttggataccagcatgtatgtgaaggagttccttatttcctcatcacaagatggccaccagtggaccctcttctttcagaatggtaaggtcaaagtgtttcagggcaatcaagacagcttcacacccgtggtgaacagtcttgatcctccactcttgacacgataccttcgaatccatccacagtcttgggttcaccagattgcattgcgcatggaagtacttggatgcgaggctcaggacctctac

SEQ ID NO: 498 - protein, 1457 aa, synthetic construct
  REGION 1..1457: note = Variant of human B-domain deleted Factor VIII
MQIELSTCFFLCLLRFCFSATRRYYLGAVELSWDYMQSDLGELPVDARFPPRVPKSFPFNTSVVYKKTLFVEFTDHLFNIAKPRPPWMGLLGPTIQAEVYDTVVITLKNMASHPVSLHAVGVSYWKASEGAEYDDQTSQREKEDDKVFPGGSHTYVWQVLKENGPMASDPLCLTYSYLSHVDLVKDLNSGLIGALLVCREGSLAKEKTQTLHKFILLFAVFDEGKSWHSETKNSLMQDRDAASARAWPKMHTVNGYVNRSLPGLIGCHRKSVYWHVIGMGTTPEVHSIFLEGHTFLVRNHRQASLEISPITFLTAQTLLMDLGQFLLFCHISSHQHDGMEAYVKVDSCPEEPQLRMKNNEEAEDYDDDLTDSEMDVVRFDDDNSPSFIQIRSVAKKHPKTWVHYIAAEEEDWDYAPLVLAPDDRSYKSQYLNNGPQRIGRKYKKVRFMAYTDETFKTREAIQHESGILGPLLYGEVGDTLLIIFKNQASRPYNIYPHGITDVRPLYSRRLPKGVKHLKDFPILPGEIFKYKWTVTVEDGPTKSDPRCLTRYYSSFVNMERDLASGLIGPLLICYKESVDQRGNQIMSDKRNVILFSVFDENRSWYLTENIQRFLPNPAGVQLEDPEFQASNIMHSINGYVFDSLQLSVCLHEVAYWYILSIGAQTDFLSVFFSGYTFKHKMVYEDTLTLFPFSGETVFMSMENPGLWILGCHNSDFRNRGMTALLKVSSCDKNTGDYYEDSYEDISAYLLSKNNAIEPRSFSQNPPVLKRHQREITRTTLQSDQEEIDYDDTISVEMKKEDFDIYDEDENQSPRSFQKKTRHYFIAAVERLWDYGMSSSPHVLRNRAQSGSVPQFKKVVFQEFTDGSFTQPLYRGELNEHLGLLGPYIRAEVEDNIMVTFRNQASRPYSFYSSLISYEEDQRQGAEPRKNFVKPNETKTYFWKVQHHMAPTKDEFDCKAWAYFSDVDLEKDVHSGLIGPLLVCHTNTLNPAHGRQVTVQEFALFFTIFDETKSWYFTENMERNCRAPCNIQMEDPTFKENYRFHAINGYIMDTLPGLVMAQDQRIRWYLLSMGSNENIHSIHFSGHVFTVRKKEEYKMALYNLYPGVFETVEMLPSKAGIWRVECLIGEHLHAGMSTLFLVYSNKCQTPLGMASGHIRDFQITASGQYGQWAPKLARLHYSGSINAWSTKEPESWIKVDLLAPMIIHGIKTQGARQKFSSLYISQFIIMYSLDGKKWQTYRGNSTGTLMVFFGNVDSSGIKHNIFNPPIIARYIRLHPTHYSIRSTLRMELMGCDLNSCSMPLGMESKAISDAQITASSYFTNMFATWSPSKARLHLQGRSNAWRPQVNNPKEWLQVDFQKTMKVTGVTTQGVKSLDTSMYVKEFLISSSQDGHQWTLFFQNGKVKVFQGNQDSFTPVVNSLDPPLLTRYLRIHPQSWVHQIALRMEVLGCEAQDLY

SEQ ID NO: 499 - DNA, 4371 bp, synthetic construct
  misc_feature 1..4371: note = Variant of human B-domain deleted Factor VIII
  source 1..4371: mol_type = other DNA
atgcagattgaactgtctacctgcttcttcctctgtttgctgaggttctgctttagcgccactagacggtactaccttggcgctgtggagctgtcctgggactatatgcagagtgatttgggagagcttcccgtcgacgcacgatttcctcctcgcgttccaaagtcatttcccttcaacacaagcgtggtgtacaagaagacgctcttcgtcgaattcaccgatcacctgttcaatatcgccaaacccagaccaccatggatgggtcttttggggcctaccatacaagcggaggtgtatgacacagttgttatcactctcaagaacatggcttctcatccggtaagtcttcacgcagtgggcgtgtcctactggaaagcttcagaaggagccgagtatgatgatcagacatcccagagggagaaagaagacgacaaggtatttccaggtgggtctcatacctatgtgtggcaagtgctcaaagagaatggccctatggcaagcgatccgctctgtttgacttacagctacctttcacacgttgacctcgtcaaggacctcaactccgggttgattggagccttgttggtatgcagggaaggatctcttgccaaagagaagacacagaccctccacaagtttatccttctctttgctgtgttcgatgagggcaaaagttggcatagcgaaacgaagaattccctcatgcaggatcgcgacgcagccagcgccagagcttggcccaagatgcacactgtgaacggatatgtcaataggtcacttcctggcttgattgggtgtcatcggaaaagtgtctactggcacgtgatcggaatggggacaacaccagaggtccactccatatttctcgaaggccataccttccttgttcgaaaccacagacaggcatccttggagatctctcccattacctttctcactgcccaaacgctccttatggacttgggtcagttccttctcttctgccatatcagctcacaccagcatgatggtatggaagcttatgtgaaagtcgacagttgtcctgaggagccacagttgcgcatgaagaataatgaagaagccgaggattacgacgacgatctcaccgattctgagatggacgtggtgaggtttgatgacgacaactctccctccttcattcaaatccggagcgtggcgaagaaacaccccaagacttgggtccactatatagcggcggaagaggaggattgggattacgctcctcttgtattggcaccagatgaccgctcatacaaaagccagtacctcaacaacggaccgcagagaattggccggaagtataagaaagtgcgatttatggcctatacagacgaaacctttaagacaagggaggccatccagcatgagagtgggattttgggacctcttctttacggcgaagttggtgataccctcctcatcatcttcaagaatcaagcttctcgcccctataacatttacccacacgggatcactgacgttaggcctttgtatagcagaagacttcccaaaggcgtgaagcatctcaaagacttccccattttgccaggcgagatctttaagtacaaatggaccgtcacagtggaagatggaccgactaaatcagaccctcgatgccttacgcggtactattcctccttcgtgaatatggagagagatttggcaagcggactcataggaccactcctcatctgttacaaggaatctgtagaccagaggggtaaccagattatgagtgataaacgcaatgtgatcctttttagcgtcttcgacgagaaccggtcctggtacttgaccgagaatatacaaaggttccttcccaaccccgcaggcgttcagttggaagaccctgagtttcaggccagcaatattatgcactcaatcaacggctatgtgtttgatagtctccagctttctgtttgcctccatgaagtagcctattggtacatcttgtcaattggtgctcaaacagacttcctctccgtcttcttctccggctacacctttaagcacaagatggtgtatgaggacactctcacactctttccattttctggagaaaccgtgttcatgagcatggagaatccaggcctttggatcttgggttgccacaacagtgattttcgcaatcggggaatgactgctctcctcaaagtcagcagctgtgataagaacacaggcgactattacgaagattcttacgaggacataagtgcctacttgttgtccaagaataacgccattgagcccagatcattctcccagaatcctcccgtgcttaaaaggcatcagcgcgaaatcaccagaactactcttcagtctgatcaagaggagattgactatgacgacaccataagcgtggaaatgaagaaggaggatttcgatatctatgacgaagatgagaaccagtctccgcggagctttcagaagaagacgcgacactacttcattgcagcagtcgaaaggctttgggactacggtatgtcatcatcccctcatgtgttgcgcaatagagctcagagtggaagtgttccacagttcaagaaagtcgtctttcaagagtttacagatggcagcttcacacagcctctctatcggggcgagcttaacgaacatttgggactccttggtccctatatccgagccgaagtggaggacaacattatggttacctttaggaatcaagcctctcgcccctacagcttctactcctccctcatcagttatgaggaggatcagagacaaggcgctgaaccacggaagaactttgtgaaaccgaatgagacgaagacctacttctggaaagtacagcaccacatggcccccacaaaagacgaattcgattgcaaagcatgggcgtatttttcagacgttgacttggagaaagatgtacattcaggacttattggtcctttgttggtgtgtcacactaacactctcaatccagcccatggcaggcaggtgacagtccaggaattcgctcttttctttaccatctttgatgagaccaagtcctggtacttcacggaaaacatggagcgcaattgcagagccccctgtaacatacagatggaggaccctacctttaaggaaaattatcggttccacgcaatcaacggatactcgatggatacactccctggccttgtgatggctcaggaccaacgaatcaggtggtacctcctcagcatgggttctaatgagaacatacactccattcacttttcaggacatgtgttcactgtccggaagaaagaagagtataagatggccctctacaatttgtatccaggcgtgtttgagaccgttgaaatgcttccctctaaagctggcatctggagagtagagtgcttgatcggagaacatcttcacgcaggtatgagcaccttgttcctcgtgtacagcaacaaatgtcagaccccacttggcatggccagtggacacattcgcgactttcagatcacagcatctggccagtatggacaatgggccccaaagttggctcgcctccattactccggtagcataaatgcgtggtccactaaagaacctttcagctggattaaggtcgatcttcttgcccccatgatcatccacggcattaagacacagggagcgaggcagaaattctcctccctctacatctcacagttcattattatgtatagtttggacggcaagaagtggcaaacttatagaggtaacagtactggaacactcatggtgttcttcggcaacgttgatagctctggcatcaaacacaacatctttaatcctcccataatagctcggtacatcagattgcatccgacccactacagcattaggagtacactccgaatggagcttatgggttgcgacttgaattcctgttcaatgccactcggaatggagtctaaagccatctctgatgcacagataaccgccagtagctactttacgaacatgtttgctacgtggtcaccctctaaggcaaggcttcatttgcaaggccggtctaatgcctggagacctcaggtgaacaacccgaaagaatggctccaggtggactttcagaagaccatgaaagtaacaggtgtcactactcagggagttaagtccttggataccagcatgtatgtgaaggagttccttatttcctcatcacaagatggccaccagtggaccctcttctttcagaatggtaaggtcaaagtgtttcagggcaatcaagacagcttcacacccgtggtgaacagtcttgatcctccactcttgacacgataccttcgaatccatccacagtcttgggttcaccagattgcattgcgcatggaagtacttggatgcgaggctcaggacctctac

SEQ ID NO: 500 - protein, 1457 aa, synthetic construct
  REGION 1..1457: note = Variant of human B-domain deleted Factor VIII
MQIELSTCFFLCLLRFCFSATRRYYLGAVELSWDYMQSDLGELPVDARFPPRVPKSFPFNTSVVYKKTLFVEFTDHLFNIAKPRPPWMGLLGPTIQAEVYDTVVITLKNMASHPVSLHAVGVSYWKASEGAEYDDQTSQREKEDDKVFPGGSHTYVWQVLKENGPMASDPLCLTYSYLSHVDLVKDLNSGLIGALLVCREGSLAKEKTQTLHKFILLFAVFDEGKSWHSETKNSLMQDRDAASARAWPKMHTVNGYVNRSLPGLIGCHRKSVYWHVIGMGTTPEVHSIFLEGHTFLVRNHRQASLEISPITFLTAQTLLMDLGQFLLFCHISSHQHDGMEAYVKVDSCPEEPQLRMKNNEEAEDYDDDLTDSEMDVVRFDDDNSPSFIQIRSVAKKHPKTWVHYIAAEEEDWDYAPLVLAPDDRSYKSQYLNNGPQRIGRKYKKVRFMAYTDETFKTREAIQHESGILGPLLYGEVGDTLLIIFKNQASRPYNIYPHGITDVRPLYSRRLPKGVKHLKDFPILPGEIFKYKWTVTVEDGPTKSDPRCLTRYYSSFVNMERDLASGLIGPLLICYKESVDQRGNQIMSDKRNVILFSVFDENRSWYLTENIQRFLPNPAGVQLEDPEFQASNIMHSINGYVFDSLQLSVCLHEVAYWYILSIGAQTDFLSVFFSGYTFKHKMVYEDTLTLFPFSGETVFMSMENPGLWILGCHNSDFRNRGMTALLKVSSCDKNTGDYYEDSYEDISAYLLSKNNAIEPRSFSQNPPVLKRHQREITRTTLQSDQEEIDYDDTISVEMKKEDFDIYDEDENQSPRSFQKKTRHYFIAAVERLWDYGMSSSPHVLRNRAQSGSVPQFKKVVFQEFTDGSFTQPLYRGELNEHLGLLGPYIRAEVEDNIMVTFRNQASRPYSFYSSLISYEEDQRQGAEPRKNFVKPNETKTYFWKVQHHMAPTKDEFDCKAWAYFSDVDLEKDVHSGLIGPLLVCHTNTLNPAHGRQVTVQEFALFFTIFDETKSWYFTENMERNCRAPCNIQMEDPTFKENYRFHAINGYSMDTLPGLVMAQDQRIRWYLLSMGSNENIHSIHFSGHVFTVRKKEEYKMALYNLYPGVFETVEMLPSKAGIWRVECLIGEHLHAGMSTLFLVYSNKCQTPLGMASGHIRDFQITASGQYGQWAPKLARLHYSGSINAWSTKEPFSWIKVDLLAPMIIHGIKTQGARQKFSSLYISQFIIMYSLDGKKWQTYRGNSTGTLMVFFGNVDSSGIKHNIFNPPIIARYIRLHPTHYSIRSTLRMELMGCDLNSCSMPLGMESKAISDAQITASSYFTNMFATWSPSKARLHLQGRSNAWRPQVNNPKEWLQVDFQKTMKVTGVTTQGVKSLDTSMYVKEFLISSSQDGHQWTLFFQNGKVKVFQGNQDSFTPVVNSLDPPLLTRYLRIHPQSWVHQIALRMEVLGCEAQDLY

SEQ ID NO: 501 - DNA, 4371 bp, synthetic construct
  misc_feature 1..4371: note = Variant of human B-domain deleted Factor VIII
  source 1..4371: mol_type = other DNA
atgcagattgaactgtctacctgcttcttcctctgtttgctgaggttctgctttagcgccactagacggtactaccttggcgctgtggagctgtcctgggactatatgcagagtgatttgggagagcttcccgtcgacgcacgatttcctcctcgcgttccaaagtcatttcccttcaacacaagcgtggtgtacaagaagacgctcttcgtcgaattcaccgatcacctgttcaatatcgccaaacccagaccaccatggatgggtcttttggggcctaccatacaagcggaggtgtatgacacagttgttatcactctcaagaacatggcttctcatccggtaagtcttcacgcagtgggcgtgtcctactggaaagcttcagaaggagccgagtatgatgatcagacatcccagagggagaaagaagacgacaaggtatttccaggtgggtctcatacctatgtgtggcaagtgctcaaagagaatggccctatggcaagcgatccgctctgtttgacttacagctacctttcacacgttgacctcgtcaaggacctcaactccgggttgattggagccttgttggtatgcagggaaggatctcttgccaaagagaagacacagaccctccacaagtttatccttctctttgctgtgttcgatgagggcaaaagttggcatagcgaaacgaagaattccctcatgcaggatcgcgacgcagccagcgccagagcttggcccaagatgcacactgtgaacggatatgtcaataggtcacttcctggcttgattgggtgtcatcggaaaagtgtctactggcacgtgatcggaatggggacaacaccagaggtccactccatatttctcgaaggccataccttccttgttcgaaaccacagacaggcatccttggagatctctcccattacctttctcactgcccaaacgctccttatggacttgggtcagttccttctcttctgccatatcagctcacaccagcatgatggtatggaagcttatgtgaaagtcgacagttgtcctgaggagccacagttgcgcatgaagaataatgaagaagccgaggattacgacgacgatctcaccgattctgagatggacgtggtgaggtttgatgacgacaactctccctccttcattcaaatccggagcgtggcgaagaaacaccccaagacttgggtccactatatagcggcggaagaggaggattgggattacgctcctcttgtattggcaccagatgaccgctcatacaaaagccagtacctcaacaacggaccgcagagaattggccggaagtataagaaagtgcgatttatggcctatacagacgaaacctttaagacaagggaggccatccagcatgagagtgggattttgggacctcttctttacggcgaagttggtgataccctcctcatcatcttcaagaatcaagcttctcgcccctataacatttacccacacgggatcactgacgttaggcctttgtatagcagaagacttcccaaaggcgtgaagcatctcaaagacttccccattttgccaggcgagatctttaagtacaaatggaccgtcacagtggaagatggaccgactaaatcagaccctcgatgccttacgcggtactattcctccttcgtgaatatggagagagatttggcaagcggactcataggaccactcctcatctgttacaaggaatctgtagaccagaggggtaaccagattatgagtgataaacgcaatgtgatcctttttagcgtcttcgacgagaaccggtcctggtacttgaccgagaatatacaaaggttccttcccaaccccgcaggcgttcagttggaagaccctgagtttcaggccagcaatattatgcactcaatcaacggctatgtgtttgatagtctccagctttctgtttgcctccatgaagtagcctattggtacatcttgtcaattggtgctcaaacagacttcctctccgtcttcttctccggctacacctttaagcacaagatggtgtatgaggacactctcacactctttccattttctggagaaaccgtgttcatgagcatggagaatccaggcctttggatcttgggttgccacaacagtgattttcgcaatcggggaatgactgctctcctcaaagtcagcagctgtgataagaacacaggcgactattacgaagattcttacgaggacataagtgcctacttgttgtccaagaataacgccattgagcccagatcattctcccagaatcctcccgtgcttaaaaggcatcagcgcgaaatcaccagaactactcttcagtctgatcaagaggagattgactatgacgacaccataagcgtggaaatgaagaaggaggatttcgatatctatgacgaagatgagaaccagtctccgcggagctttcagaagaagacgcgacactacttcattgcagcagtcgaaaggctttgggactacggtatgtcatcatcccctcatgtgttgcgcaatagagctcagagtggaagtgttccacagttcaagaaagtcgtctttcaagagtttacagatggcagcttcacacagcctctctatcggggcgagcttaacgaacatttgggactccttggtccctatatccgagccgaagtggaggacaacattatggttacctttaggaatcaagcctctcgcccctacagcttctactcctccctcatcagttatgaggaggatcagagacaaggcgctgaaccacggaagaactttgtgaaaccgaatgagacgaagacctacttctggaaagtacagcaccacatggcccccacaaaagacgaattcgattgcaaagcatgggcgtatttttcagacgttgacttggagaaagatgtacattcaggacttattggtcctttgttggtgtgtcacactaacactctcaatccagcccatggcaggcaggtgacagtccaggaattcgctcttttctttaccatctttgatgagaccaagtcctggtacttcacggaaaacatggagcgcaattgcagagccccctgtaacatacagatggaggaccctacctttaaggaaaattatcggttccacgcaatcaacggatacattatggatacactccctggccttgtgatggctcaggaccaacgaatcaggtggtacctcctcagcatgggttctaatgagaacatacactccattcacttttcaggacatgtgttcactgtccggaagaaagaagagtataagatggccctctacaatttgtatccaggcgtgtttgagaccgttgaaatgcttccctctaaagctggcatctggagagtagagtgcttgatcggagaacatcttcacgcaggtatgagcaccttgttcctcgtgtacagcaacaaatgtcagaccccacttggcatggccagtggacacattcgcgactttcagatcacagcatctggccagtatggacaatgggccccaaagttggctcgcctccattactccggtagcataaatgcgtggtccactaaagaacctttcagctggattaaggtcgatcttcttgcccccatgatcatccacggcattaagacacagggagcgaggcagaaattctcctccctctacatctcacagttcattattatgtatagtttggacggcaagaagtggcaaacttatagaggtaacagtactggaacactcatggtgttcttcggcaacgttgatagctctggcatcaaacacaacatctttaatcctcccataatagctcggtacatcagattgcatccgacccactacagcattaggagtacactccgaatggagcttatgggttgcgacttgaattcctgttcaatgccactcggaatggagtctaaagccatctctgatgcacagataaccgccagtagctactttacgaacatgtttgctacgtggtcaccctctaaggcaaggcttcatttgcaaggccggtctaatgcctggagacctcaggtgaacaacccgaaagaatggctccaggtggactttcagaagaccatgaaagtaacaggtgtcactactcagggagttaagtccttggataccagcatgtatgtgaaggagttccttatttcctggtcacaagatggccaccagtggaccctcttctttcagaatggtaaggtcaaagtgtttcagggcaatcaagacagcttcacacccgtggtgaacagtcttgatcctccactcttgacacgataccttcgaatccatccacagtcttgggttcaccagattgcattgcgcatggaagtacttggatgcgaggctcaggacctctac

SEQ ID NO: 502 - protein, 1457 aa, synthetic construct
  REGION 1..1457: note = Variant of human B-domain deleted Factor VIII
MQIELSTCFFLCLLRFCFSATRRYYLGAVELSWDYMQSDLGELPVDARFPPRVPKSFPFNTSVVYKKTLFVEFTDHLFNIAKPRPPWMGLLGPTIQAEVYDTVVITLKNMASHPVSLHAVGVSYWKASEGAEYDDQTSQREKEDDKVFPGGSHTYVWQVLKENGPMASDPLCLTYSYLSHVDLVKDLNSGLIGALLVCREGSLAKEKTQTLHKFILLFAVFDEGKSWHSETKNSLMQDRDAASARAWPKMHTVNGYVNRSLPGLIGCHRKSVYWHVIGMGTTPEVHSIFLEGHTFLVRNHRQASLEISPITFLTAQTLLMDLGQFLLFCHISSHQHDGMEAYVKVDSCPEEPQLRMKNNEEAEDYDDDLTDSEMDVVRFDDDNSPSFIQIRSVAKKHPKTWVHYIAAEEEDWDYAPLVLAPDDRSYKSQYLNNGPQRIGRKYKKVRFMAYTDETFKTREAIQHESGILGPLLYGEVGDTLLIIFKNQASRPYNIYPHGITDVRPLYSRRLPKGVKHLKDFPILPGEIFKYKWTVTVEDGPTKSDPRCLTRYYSSFVNMERDLASGLIGPLLICYKESVDQRGNQIMSDKRNVILFSVFDENRSWYLTENIQRFLPNPAGVQLEDPEFQASNIMHSINGYVFDSLQLSVCLHEVAYWYILSIGAQTDFLSVFFSGYTFKHKMVYEDTLTLFPFSGETVFMSMENPGLWILGCHNSDFRNRGMTALLKVSSCDKNTGDYYEDSYEDISAYLLSKNNAIEPRSFSQNPPVLKRHQREITRTTLQSDQEEIDYDDTISVEMKKEDFDIYDEDENQSPRSFQKKTRHYFIAAVERLWDYGMSSSPHVLRNRAQSGSVPQFKKVVFQEFTDGSFTQPLYRGELNEHLGLLGPYIRAEVEDNIMVTFRNQASRPYSFYSSLISYEEDQRQGAEPRKNFVKPNETKTYFWKVQHHMAPTKDEFDCKAWAYFSDVDLEKDVHSGLIGPLLVCHTNTLNPAHGRQVTVQEFALFFTIFDETKSWYFTENMERNCRAPCNIQMEDPTFKENYRFHAINGYIMDTLPGLVMAQDQRIRWYLLSMGSNENIHSIHFSGHVFTVRKKEEYKMALYNLYPGVFETVEMLPSKAGIWRVECLIGEHLHAGMSTLFLVYSNKCQTPLGMASGHIRDFQITASGQYGQWAPKLARLHYSGSINAWSTKEPFSWIKVDLLAPMIIHGIKTQGARQKFSSLYISQFIIMYSLDGKKWQTYRGNSTGTLMVFFGNVDSSGIKHNIFNPPIIARYIRLHPTHYSIRSTLRMELMGCDLNSCSMPLGMESKAISDAQITASSYFTNMFATWSPSKARLHLQGRSNAWRPQVNNPKEWLQVDFQKTMKVTGVTTQGVKSLDTSMYVKEFLISWSQDGHQWTLFFQNGKVKVFQGNQDSFTPVVNSLDPPLLTRYLRIHPQSWVHQIALRMEVLGCEAQDLY

SEQ ID NO: 503 - DNA, 4371 bp, synthetic construct
  misc_feature 1..4371: note = Variant of human B-domain deleted Factor VIII
  source 1..4371: mol_type = other DNA
atgcagattgaactgtctacctgcttcttcctctgtttgctgaggttctgctttagcgccactagacggtactaccttggcgctgtggagctgtcctgggactatatgcagagtgatttgggagagcttcccgtcgacgcacgatttcctcctcgcgttccaaagtcatttcccttcaacacaagcgtggtgtacaagaagacgctcttcgtcgaattcaccgatcacctgttcaatatcgccaaacccagaccaccatggatgggtcttttggggcctaccatacaagcggaggtgtatgacacagttgttatcactctcaagaacatggcttctcatccggtaagtcttcacgcagtgggcgtgtcctactggaaagcttcagaaggagccgagtatgatgatcagacatcccagagggagaaagaagacgacaaggtatttccaggtgggtctcatacctatgtgtggcaagtgctcaaagagaatggccctatggcaagcgatccgctctgtttgacttacagctacctttcacacgttgacctcgtcaaggacctcaactccgggttgattggagccttgttggtatgcagggaaggatctcttgccaaagagaagacacagaccctccacaagtttatccttctctttgctgtgttcgatgagggcaaaagttggcatagcgaaacgaagaattccctcatgcaggatcgcgacgcagccagcgccagagcttggcccaagatgcacactgtgaacggatatgtcaataggtcacttcctggcttgattgggtgtcatcggaaaagtgtctactggcacgtgatcggaatggggacaacaccagaggtccactccatatttctcgaaggccataccttccttgttcgaaaccacagacaggcatccttggagatctctcccattacctttctcactgcccaaacgctccttatggacttgggtcagttccttctcttctgccatatcagctcacaccagcatgatggtatggaagcttatgtgaaagtcgacagttgtcctgaggagccacagttgcgcatgaagaataatgaagaagccgaggattacgacgacgatctcaccgattctgagatggacgtggtgaggtttgatgacgacaactctccctccttcattcaaatccggagcgtggcgaagaaacaccccaagacttgggtccactatatagcggcggaagaggaggattgggattacgctcctcttgtattggcaccagatgaccgctcatacaaaagccagtacctcaacaacggaccgcagagaattggccggaagtataagaaagtgcgatttatggcctatacagacgaaacctttaagacaagggaggccatccagcatgagagtgggattttgggacctcttctttacggcgaagttggtgataccctcctcatcatcttcaagaatcaagcttctcgcccctataacatttacccacacgggatcactgacgttaggcctttgtatagcagaagacttcccaaaggcgtgaagcatctcaaagacttccccattttgccaggcgagatctttaagtacaaatggaccgtcacagtggaagatggaccgactaaatcagaccctcgatgccttacgcggtactattcctccttcgtgaatatggagagagatttggcaagcggactcataggaccactcctcatctgttacaaggaatctgtagaccagaggggtaaccagattatgagtgataaacgcaatgtgatcctttttagcgtcttcgacgagaaccggtcctggtacttgaccgagaatatacaaaggttccttcccaaccccgcaggcgttcagttggaagaccctgagtttcaggccagcaatattatgcactcaatcaacggctatgtgtttgatagtctccagctttctgtttgcctccatgaagtagcctattggtacatcttgtcaattggtgctcaaacagacttcctctccgtcttcttctccggctacacctttaagcacaagatggtgtatgaggacactctcacactctttccattttctggagaaaccgtgttcatgagcatggagaatccaggcctttggatcttgggttgccacaacagtgattttcgcaatcggggaatgactgctctcctcaaagtcagcagctgtgataagaacacaggcgactattacgaagattcttacgaggacataagtgcctacttgttgtccaagaataacgccattgagcccagatcattctcccagaatcctcccgtgcttaaaaggcatcagcgcgaaatcaccagaactactcttcagtctgatcaagaggagattgactatgacgacaccataagcgtggaaatgaagaaggaggatttcgatatctatgacgaagatgagaaccagtctccgcggagctttcagaagaagacgcgacactacttcattgcagcagtcgaaaggctttgggactacggtatgtcatcatcccctcatgtgttgcgcaatagagctcagagtggaagtgttccacagttcaagaaagtcgtctttcaagagtttacagatggcagcttcacacagcctctctatcggggcgagcttaacgaacatttgggactccttggtccctatatccgagccgaagtggaggacaacattatggttacctttaggaatcaagcctctcgcccctacagcttctactcctccctcatcagttatgaggaggatcagagacaaggcgctgaaccacggaagaactttgtgaaaccgaatgagacgaagacctacttctggaaagtacagcaccacatggcccccacaaaagacgaattcgattgcaaagcatgggcgtatttttcagacgttgacttggagaaagatgtacattcaggacttattggtcctttgttggtgtgtcacactaacactctcaatccagcccatggcaggcaggtgacagtccaggaattcgctcttttctttaccatctttgatgagaccaagtcctggtacttcacggaaaacatggagcgcaattgcagagccccctgtaacatacagatggaggaccctacctttaaggaaaattatcggttccacgcaatcaacggatacattatggatacactccctggccttgtgatggctcaggaccaacgaatcaggtggtacctcctcagcatgggttctaatgagaacatacactccattcacttttcaggacatgtgttcactgtccggaagaaagaagagtataagatggccctctacaatttgtatccaggcgtgtttgagaccgttgaaatgcttccctctaaagctggcatctggagagtagagtgcttgatcggagaacatcttcacgcaggtatgagcaccttgttcctcgtgtacagcaacaaatgtcagaccccacttggcatggccagtggacacattcgcgactttcagatcacagcatctggccagtatggacaatgggccccaaagttggctcgcctccattactccggtagcataaatgcgtggtccactaaagaacctttcagctggattaaggtcgatcttcttgcccccatgatcatccacggcattaagacacagggagcgaggcagaaattctcctccctctacatctcacagttcattattatgtatagtttggacggcaagaagtggcaaacttatagaggtaacagtactggaacactcatggtgttcttcggcaacgttgatagctctggcatcaaacacaacatctttaatcctcccataatagctcggtacatcagattgcatccgacccactacagcattaggagtacactccgaatggagcttatgggttgcgacttgaattcctgttcaatgccactcggaatggagtctaaagccatctctgatgcacagataaccgccagtagctactttacgaacatgtttgctacgtggtcaccctctaaggcaaggcttcatttgcaaggccggtctaatgcctggagacctcaggtgaacaacccgaaagaatggctccaggtggactttcagaagaccatgaaagtaacaggtgtcactactcagggagttaagtccttggataccagcatgtatgtgaaggagttccttatttcctcatcacaagatggccaccagtggaccctcttctttcagaatggtaaggtcaaagtgtttcagggcaatcaagacagcttcacacccgtggtgaacagtcttgatcctccactcttgacacgataccttcgaatccatccacagtcttgggagcaccagattgcattgcgcatggaagtacttggatgcgaggctcaggacctctac

SEQ ID NO: 504 - protein, 1457 aa, synthetic construct
  REGION 1..1457: note = Variant of human B-domain deleted Factor VIII
MQIELSTCFFLCLLRFCFSATRRYYLGAVELSWDYMQSDLGELPVDARFPPRVPKSFPFNTSVVYKKTLFVEFTDHLFNIAKPRPPWMGLLGPTIQAEVYDTVVITLKNMASHPVSLHAVGVSYWKASEGAEYDDQTSQREKEDDKVFPGGSHTYVWQVLKENGPMASDPLCLTYSYLSHVDLVKDLNSGLIGALLVCREGSLAKEKTQTLHKFILLFAVFDEGKSWHSETKNSLMQDRDAASARAWPKMHTVNGYVNRSLPGLIGCHRKSVYWHVIGMGTTPEVHSIFLEGHTFLVRNHRQASLEISPITFLTAQTLLMDLGQFLLFCHISSHQHDGMEAYVKVDSCPEEPQLRMKNNEEAEDYDDDLTDSEMDVVRFDDDNSPSFIQIRSVAKKHPKTWVHYIAAEEEDWDYAPLVLAPDDRSYKSQYLNNGPQRIGRKYKKVRFMAYTDETFKTREAIQHESGILGPLLYGEVGDTLLIIFKNQASRPYNIYPHGITDVRPLYSRRLPKGVKHLKDFPILPGEIFKYKWTVTVEDGPTKSDPRCLTRYYSSFVNMERDLASGLIGPLLICYKESVDQRGNQIMSDKRNVILFSVFDENRSWYLTENIQRFLPNPAGVQLEDPEFQASNIMHSINGYVFDSLQLSVCLHEVAYWYILSIGAQTDFLSVFFSGYTFKHKMVYEDTLTLFPFSGETVFMSMENPGLWILGCHNSDFRNRGMTALLKVSSCDKNTGDYYEDSYEDISAYLLSKNNAIEPRSFSQNPPVLKRHQREITRTTLQSDQEEIDYDDTISVEMKKEDFDIYDEDENQSPRSFQKKTRHYFIAAVERLWDYGMSSSPHVLRNRAQSGSVPQFKKVVFQEFTDGSFTQPLYRGELNEHLGLLGPYIRAEVEDNIMVTFRNQASRPYSFYSSLISYEEDQRQGAEPRKNFVKPNETKTYFWKVQHHMAPTKDEFDCKAWAYFSDVDLEKDVHSGLIGPLLVCHTNTLNPAHGRQVTVQEFALFFTIFDETKSWYFTENMERNCRAPCNIQMEDPTFKENYRFHAINGYIMDTLPGLVMAQDQRIRWYLLSMGSNENIHSIHFSGHVFTVRKKEEYKMALYNLYPGVFETVEMLPSKAGIWRVECLIGEHLHAGMSTLFLVYSNKCQTPLGMASGHIRDFQITASGQYGQWAPKLARLHYSGSINAWSTKEPFSWIKVDLLAPMIIHGIKTQGARQKFSSLYISQFIIMYSLDGKKWQTYRGNSTGTLMVFFGNVDSSGIKHNIFNPPIIARYIRLHPTHYSIRSTLRMELMGCDLNSCSMPLGMESKAISDAQITASSYFTNMFATWSPSKARLHLQGRSNAWRPQVNNPKEWLQVDFQKTMKVTGVTTQGVKSLDTSMYVKEFLISSSQDGHQWTLFFQNGKVKVFQGNQDSFTPVVNSLDPPLLTRYLRIHPQSWEHQIALRMEVLGCEAQDLY

SEQ ID NO: 505 - DNA, 4371 bp, synthetic construct
  misc_feature 1..4371: note = Variant of human B-domain deleted Factor VIII
  source 1..4371: mol_type = other DNA
atgcagattgaactgtctacctgcttcttcctctgtttgctgaggttctgctttagcgccactagacggtactaccttggcgctgtggagctgtcctgggactatatgcagagtgatttgggagagcttcccgtcgacgcacgatttcctcctcgcgttccaaagtcatttcccttcaacacaagcgtggtgtacaagaagacgctcttcgtcgaattcaccgatcacctgttcaatatcgccaaacccagaccaccatggatgggtcttttggggcctaccatacaagcggaggtgtatgacacagttgttatcactctcaagaacatggcttctcatccggtaagtcttcacgcagtgggcgtgtcctactggaaagcttcagaaggagccgagtatgatgatcagacatcccagagggagaaagaagacgacaaggtatttccaggtgggtctcatacctatgtgtggcaagtgctcaaagagaatggccctatggcaagcgatccgctctgtttgacttacagctacctttcacacgttgacctcgtcaaggacctcaactccgggttgattggagccttgttggtatgcagggaaggatctcttgccaaagagaagacacagaccctccacaagtttatccttctctttgctgtgttcgatgagggcaaaagttggcatagcgaaacgaagaattccctcatgcaggatcgcgacgcagccagcgccagagcttggcccaagatgcacactgtgaacggatatgtcaataggacgcttcctggcttgattgggtgtcatcggaaaagtgtctactggcacgtgatcggaatggggacaacaccagaggtccactccatatttctcgaaggccataccttccttgttcgaaaccacagacaggcatccttggagatctctcccattacctttctcactgcccaaacgctccttatggacttgggtcagttccttctcttctgccatatcagctcacaccagcatgatggtatggaagcttatgtgaaagtcgacagttgtcctgaggagccacagttgcgcatgaagaataatgaagaagccgaggattacgacgacgatctcaccgattctgagatggacgtggtgaggtttgatgacgacaactctccctccttcattcaaatccggagcgtggcgaagaaacaccccaagacttgggtccactatatagcggcggaagaggaggattgggattacgctcctcttgtattggcaccagatgaccgctcatacaaaagccagtacctcaacaacggaccgcagagaattggccggaagtataagaaagtgcgatttatggcctatacagacgaaacctttaagacaagggaggccatccagcatgagagtgggattttgggacctcttctttacggcgaagttggtgataccctcctcatcatcttcaagaatcaagcttctcgcccctataacatttacccacacgggatcactgacgttaggcctttgtatagcagaagacttcccaaaggcgtgaagcatctcaaagacttccccattttgccaggcgagatctttaagtacaaatggaccgtcacagtggaagatggaccgactaaatcagaccctcgatgccttacgcggtactattcctccttcgtgaatatggagagagatttggcaagcggactcataggaccactcctcatctgttacaaggaatctgtagaccagaggggtaaccagattatgagtgataaacgcaatgtgatcctttttagcgtcttcgacgagaaccggtcctggtacttgaccgagaatatacaaaggttccttcccaaccccgcaggcgttcagttggaagaccctgagtttcaggccagcaatattatgcactcaatcaacggctatgtgtttgatagtctccagctttctgtttgcctccatgaagtagcctattggtacatcttgtcaattggtgctcaaacagacttcctctccgtcttcttctccggctacacctttaagcacaagatggtgtatgaggacactctcacactctttccattttctggagaaaccgtgttcatgagcatggagaatccaggcctttggatcttgggttgccacaacagtgattttcgcaatcggggaatgactgctctcctcaaagtcagcagctgtgataagaacacaggcgactattacgaagattcttacgaggacataagtgcctacttgttgtccaagaataacgccattgagcccagatcattctcccagaatcctcccgtgcttaaaaggcatcagcgcgaaatcaccagaactactcttcagtctgatcaagaggagattgactatgacgacaccataagcgtggaaatgaagaaggaggatttcgatatctatgacgaagatgagaaccagtctccgcggagctttcagaagaagacgcgacactacttcattgcagcagtcgaaaggctttgggactacggtatgtcatcatcccctcatgtgttgcgcaatagagctcagagtggaagtgttccacagttcaagaaagtcgtctttcaagagtttacagatggcagcttcacacagcctctctatcggggcgagcttaacgaacatttgggactccttggtccctatatccgagccgaagtggaggacaacattatggttacctttaggaatcaagcctctcgcccctacagcttctactcctccctcatcagttatgaggaggatcagagacaaggcgctgaaccacggaagaactttgtgaaaccgaatgagacgaagacctacttctggaaagtacagcaccacatggcccccacaaaagacgaattcgattgcaaagcatgggcgtatttttcagacgttgacttggagaaagatgtacattcaggacttattggtcctttgttggtgtgtcacactaacactctcaatccagcccatggcaggcaggtgacagtccaggaattcgctcttttctttaccatctttgatgagaccaagtcctggtacttcacggaaaacatggagcgcaattgcagagccccctgtaacatacagatggaggaccctacctttaaggaaaattatcggttccacgcaatcaacggatacattatggatacactccctggccttgtgatggctcaggaccaacgaatcaggtggtacctcctcagcatgggttctaatgagaacatacactccattcacttttcaggacatgtgttcactgtccggaagaaagaagagtataagatggccctctacaatttgtatccaggcgtgtttgagaccgttgaaatgcttccctctaaagctggcatctggagagtagagtgcttgatcggagaacatcttcacgcaggtatgagcaccttgttcctcgtgtacagcaacaaatgtcagaccccacttggcatggccagtggacacattcgcgactttcagatcacagcatctggccagtatggacaatgggccccaaagttggctcgcctccattactccggtagcataaatgcgtggtccactaaagaacctttcagctggattaaggtcgatcttcttgcccccatgatcatccacggcattaagacacagggagcgaggcagaaattctcctccctctacatctcacagttcattattatgtatagtttggacggcaagaagtggcaaacttatagaggtaacagtactggaacactcatggtgttcttcggcaacgttgatagctctggcatcaaacacaacatctttaatcctcccataatagctcggtacatcagattgcatccgacccactacagcattaggagtacactccgaatggagcttatgggttgcgacttgaattcctgttcaatgccactcggaatggagtctaaagccatctctgatgcacagataaccgccagtagctactttacgaacatgtttgctacgtggtcaccctctaaggcaaggcttcatttgcaaggccggtctaatgcctggagacctcaggtgaacaacccgaaagaatggctccaggtggactttcagaagaccatgaaagtaacaggtgtcactactcagggagttaagtccttggataccagcatgtatgtgaaggagttccttatttcctcatcacaagatggccaccagtggaccctcttctttcagaatggtaaggtcaaagtgtttcagggcaatcaagacagcttcacacccgtggtgaacagtcttgatcctccactcttgacacgataccttcgaatccatccacagtcttgggttcaccagattgcattgcgcatggaagtacttggatgcgaggctcaggacctctac

SEQ ID NO: 506 - protein, 1457 aa, synthetic construct
  REGION 1..1457: note = Variant of human B-domain deleted Factor VIII
MQIELSTCFFLCLLRFCFSATRRYYLGAVELSWDYMQSDLGELPVDARFPPRVPKSFPFNTSVVYKKTLFVEFTDHLFNIAKPRPPWMGLLGPTIQAEVYDTVVITLKNMASHPVSLHAVGVSYWKASEGAEYDDQTSQREKEDDKVFPGGSHTYVWQVLKENGPMASDPLCLTYSYLSHVDLVKDLNSGLIGALLVCREGSLAKEKTQTLHKFILLFAVFDEGKSWHSETKNSLMQDRDAASARAWPKMHTVNGYVNRTLPGLIGCHRKSVYWHVIGMGTTPEVHSIFLEGHTFLVRNHRQASLEISPITFLTAQTLLMDLGQFLLFCHISSHQHDGMEAYVKVDSCPEEPQLRMKNNEEAEDYDDDLTDSEMDVVRFDDDNSPSFIQIRSVAKKHPKTWVHYIAAEEEDWDYAPLVLAPDDRSYKSQYLNNGPQRIGRKYKKVRFMAYTDETFKTREAIQHESGILGPLLYGEVGDTLLIIFKNQASRPYNIYPHGITDVRPLYSRRLPKGVKHLKDFPILPGEIFKYKWTVTVEDGPTKSDPRCLTRYYSSFVNMERDLASGLIGPLLICYKESVDQRGNQIMSDKRNVILFSVFDENRSWYLTENIQRFLPNPAGVQLEDPEFQASNIMHSINGYVFDSLQLSVCLHEVAYWYILSIGAQTDFLSVFFSGYTFKHKMVYEDTLTLFPFSGETVFMSMENPGLWILGCHNSDFRNRGMTALLKVSSCDKNTGDYYEDSYEDISAYLLSKNNAIEPRSFSQNPPVLKRHQREITRTTLQSDQEEIDYDDTISVEMKKEDFDIYDEDENQSPRSFQKKTRHYFIAAVERLWDYGMSSSPHVLRNRAQSGSVPQFKKVVFQEFTDGSFTQPLYRGELNEHLGLLGPYIRAEVEDNIMVTFRNQASRPYSFYSSLISYEEDQRQGAEPRKNFVKPNETKTYFWKVQHHMAPTKDEFDCKAWAYFSDVDLEKDVHSGLIGPLLVCHTNTLNPAHGRQVTVQEFALFFTIFDETKSWYFTENMERNCRAPCNIQMEDPTFKENYRFHAINGYIMDTLPGLVMAQDQRIRWYLLSMGSNENIHSIHFSGHVFTVRKKEEYKMALYNLYPGVFETVEMLPSKAGIWRVECLIGEHLHAGMSTLFLVYSNKCQTPLGMASGHIRDFQITASGQYGQWAPKLARLHYSGSINAWSTKEPFSWIKVDLLAPMIIHGIKTQGARQKFSSLYISQFIIMYSLDGKKWQTYRGNSTGTLMVFFGNVDSSGIKHNIFNPPIIARYIRLHPTHYSIRSTLRMELMGCDLNSCSMPLGMESKAISDAQITASSYFTNMFATWSPSKARLHLQGRSNAWRPQVNNPKEWLQVDFQKTMKVTGVTTQGVKSLDTSMYVKEFLISSSQDGHQWTLFFQNGKVKVFQGNQDSFTPVVNSLDPPLLTRYLRIHPQSWVHQIALRMEVLGCEAQDLY

SEQ ID NO: 507 - DNA, 4371 bp, synthetic construct
  misc_feature 1..4371: note = Variant of human B-domain deleted Factor VIII
  source 1..4371: mol_type = other DNA
atgcagattgaactgtctacctgcttcttcctctgtttgctgaggttctgctttagcgccactagacggtactaccttggcgctgtggagctgtcctgggactatatgcagagtgatttgggagagcttcccgtcgacgcacgatttcctcctcgcgttccaaagtcatttcccttcaacacaagcgtggtgtacaagaagacgctcttcgtcgaattcaccgatcacctgttcaatatcgccaaacccagaccaccatggatgggtcttttggggcctaccatacaagcggaggtgtatgacacagttgttatcactctcaagaacatggcttctcatccggtaagtcttcacgcagtgggcgtgtcctactggaaagcttcagaaggagccgagtatgatgatcagacatcccagagggagaaagaagacgacaaggtatttccaggtgggtctcatacctatgtgtggcaagtgctcaaagagaatggccctatggcaagcgatccgctctgtttgacttacagctacctttcacacgttgacctcgtcaaggacctcaactccgggttgattggagccttgttggtatgcagggaaggatctcttgccaaagagaagacacagaccctccacaagtttatccttctctttgctgtgttcgatgagggcaaaagttggcatagcgaaacgaagaattccctcatgcaggatcgcgacgcagccagcgccagagcttggcccaagatgcacactgtgaacggatatgtcaataggtcacttcctggcttgattgggtgtcatcggaaaagtgtctactggcacgtgatcggaatggggacaacaccagaggtccactccatatttctcgaaggccataccttccttgttcgaaaccacagacaggcatccttggagatctctcccattacctttctcactgcccaaacgctccttatggacttgggtcagttccttctcttctgccatatcagctcacaccagcatgatggtatggaagcttatgtgaaagtcgacagttgtcctgaggagccacagttgcgcatgaagaataatgaagaagccgaggattacgacgacgatctcaccgattctgagatggacgtggtgaggtttgatgacgacaactctccctccttcattcaaatccggagcgtggcgaagaaacaccccaagacttgggtccactatatagcggcggaagaggaggattgggattacgctcctcttgtattggcaccagatgaccgctcatacaaaagccagtacctcaacaacggaccgcagagaattggccggaagtataagaaagtgcgatttatggcctatacagacgaaacctttaagacaagggaggccatccagcatgagagtgggattttgggacctcttctttacggcgaagttggtgataccctcctcatcatcttcaagaatcaagcttctcgcccctataacatttacccacacgggatcactgacgttaggcctttgtatagcagaagacttcccaaaggcgtgaagcatctcaaagacttccccattttgccaggcgagatctttaagtacaaatggaccgtcacagtggaagatggaccgactaaatcagaccctcgatgccttacgcggtactattcctccttcgtgaatatggagagagatttggcaagcggactcataggaccactcctcatctgttacaaggaatctgtagaccagaggggtaaccagattatgagtgataaacgcaatgtgatcctttttagcgtcttcgacgagaaccggtcctggtacttgaccgagaatatacaaaggttccttcccaaccccgcaggcgttcagttggaagaccctgagtttcaggccagcaatattatgcactcaatcaacggctatgtgtttgatagtctccagctttctgtttgcctccatgaagtagcctattggtacatcttgtcaattggtgctcaaacagacttcctctccgtcttcttctccggctacacctttaagcacaagatggtgtatgaggacactctcacactctttccattttctggagaaaccgtgttcatgagcatggagaatccaggcctttggatcttgggttgccacaacagtgattttcgcaatcggggaatgactgctctcctcaaagtcagcagctgtgataagaacacaggcgactattacgaagattcttacgaggacataagtgcctacttgttgtccaagaataacgccattgagcccagatcattctcccagaatcctcccgtgcttaaaaggcatcagcgcgaaatcaccagaactactcttcagtctgatcaagaggagattgactatgacgacaccataagcgtggaaatgaagaaggaggatttcgatatctatgacgaagatgagaaccagtctccgcggagctttcagaagaagacgcgacactacttcattgcagcagtcgaaaggctttgggactacggtatgtcatcatcccctcatgtgttgcgcaatagagctcagagtggaagtgttccacagttcaagaaagtcgtctttcaagagtttacagatggcagcttcacacagcctctctatcggggcgagcttaacgaacatttgggactccttggtccctatatccgagccgaagtggaggacaacattatggttacctttaggaatcaagcctctcgcccctacagcttctactcctccctcatcagttatgaggaggatcagagacaaggcgctgaaccacggaagaactttgtgaaaccgaatgagacgaagacctacttctggaaagtacagcaccacatggcccccacaaaagacgaattcgattgcaaagcatgggcgtatttttcagacgttgacttggagaaagatgtacattcaggacttattggtcctttgttggtgtgtcacactaacactctcaatccagcccatggcaggcaggtgacagtccaggaattcgctcttttctttaccatctttgatgagaccaagtcctggtacttcacggaaaacatggagcgcaattgcagagccccctgtaacatacagatggaggaccctaccccgaaggaaaattatcggttccacgcaatcaacggatacattatggatacactccctggccttgtgatggctcaggaccaacgaatcaggtggtacctcctcagcatgggttctaatgagaacatacactccattcacttttcaggacatgtgttcactgtccggaagaaagaagagtataagatggccctctacaatttgtatccaggcgtgtttgagaccgttgaaatgcttccctctaaagctggcatctggagagtagagtgcttgatcggagaacatcttcacgcaggtatgagcaccttgttcctcgtgtacagcaacaaatgtcagaccccacttggcatggccagtggacacattcgcgactttcagatcacagcatctggccagtatggacaatgggccccaaagttggctcgcctccattactccggtagcataaatgcgtggtccactaaagaacctttcagctggattaaggtcgatcttcttgcccccatgatcatccacggcattaagacacagggagcgaggcagaaattctcctccctctacatctcacagttcattattatgtatagtttggacggcaagaagtggcaaacttatagaggtaacagtactggaacactcatggtgttcttcggcaacgttgatagctctggcatcaaacacaacatctttaatcctcccataatagctcggtacatcagattgcatccgacccactacagcattaggagtacactccgaatggagcttatgggttgcgacttgaattcctgttcaatgccactcggaatggagtctaaagccatctctgatgcacagataaccgccagtagctactttacgaacatgtttgctacgtggtcaccctctaaggcaaggcttcatttgcaaggccggtctaatgcctggagacctcaggtgaacaacccgaaagaatggctccaggtggactttcagaagaccatgaaagtaacaggtgtcactactcagggagttaagtccttggataccagcatgtatgtgaaggagttccttatttcctcatcacaagatggccaccagtggaccctcttctttcagaatggtaaggtcaaagtgtttcagggcaatcaagacagcttcacacccgtggtgaacagtcttgatcctccactcttgacacgataccttcgaatccatccacagtcttgggttcaccagattgcattgcgcatggaagtacttggatgcgaggctcaggacctctac

SEQ ID NO: 508 - protein, 1457 aa, synthetic construct
  REGION 1..1457: note = Variant of human B-domain deleted Factor VIII
MQIELSTCFFLCLLRFCFSATRRYYLGAVELSWDYMQSDLGELPVDARFPPRVPKSFPFNTSVVYKKTLFVEFTDHLFNIAKPRPPWMGLLGPTIQAEVYDTVVITLKNMASHPVSLHAVGVSYWKASEGAEYDDQTSQREKEDDKVFPGGSHTYVWQVLKENGPMASDPLCLTYSYLSHVDLVKDLNSGLIGALLVCREGSLAKEKTQTLHKFILLFAVFDEGKSWHSETKNSLMQDRDAASARAWPKMHTVNGYVNRSLPGLIGCHRKSVYWHVIGMGTTPEVHSIFLEGHTFLVRNHRQASLEISPITFLTAQTLLMDLGQFLLFCHISSHQHDGMEAYVKVDSCPEEPQLRMKNNEEAEDYDDDLTDSEMDVVRFDDDNSPSFIQIRSVAKKHPKTWVHYIAAEEEDWDYAPLVLAPDDRSYKSQYLNNGPQRIGRKYKKVRFMAYTDETFKTREAIQHESGILGPLLYGEVGDTLLIIFKNQASRPYNIYPHGITDVRPLYSRRLPKGVKHLKDFPILPGEIFKYKWTVTVEDGPTKSDPRCLTRYYSSFVNMERDLASGLIGPLLICYKESVDQRGNQIMSDKRNVILFSVFDENRSWYLTENIQRFLPNPAGVQLEDPEFQASNIMHSINGYVFDSLQLSVCLHEVAYWYILSIGAQTDFLSVFFSGYTFKHKMVYEDTLTLFPFSGETVFMSMENPGLWILGCHNSDFRNRGMTALLKVSSCDKNTGDYYEDSYEDISAYLLSKNNAIEPRSFSQNPPVLKRHQREITRTTLQSDQEEIDYDDTISVEMKKEDFDIYDEDENQSPRSFQKKTRHYFIAAVERLWDYGMSSSPHVLRNRAQSGSVPQFKKVVFQEFTDGSFTQPLYRGELNEHLGLLGPYIRAEVEDNIMVTFRNQASRPYSFYSSLISYEEDQRQGAEPRKNFVKPNETKTYFWKVQHHMAPTKDEFDCKAWAYFSDVDLEKDVHSGLIGPLLVCHTNTLNPAHGRQVTVQEFALFFTIFDETKSWYFTENMERNCRAPCNIQMEDPTPKENYRFHAINGYIMDTLPGLVMAQDQRIRWYLLSMGSNENIHSIHFSGHVFTVRKKEEYKMALYNLYPGVFETVEMLPSKAGIWRVECLIGEHLHAGMSTLFLVYSNKCQTPLGMASGHIRDFQITASGQYGQWAPKLARLHYSGSINAWSTKEPFSWIKVDLLAPMIIHGIKTQGARQKFSSLYISQFIIMYSLDGKKWQTYRGNSTGTLMVFFGNVDSSGIKHNIFNPPIIARYIRLHPTHYSIRSTLRMELMGCDLNSCSMPLGMESKAISDAQITASSYFTNMFATWSPSKARLHLQGRSNAWRPQVNNPKEWLQVDFQKTMKVTGVTTQGVKSLDTSMYVKEFLISSSQDGHQWTLFFQNGKVKVFQGNQDSFTPVVNSLDPPLLTRYLRIHPQSWVHQIALRMEVLGCEAQDLY

SEQ ID NO: 509 - DNA, 4371 bp, synthetic construct
  misc_feature 1..4371: note = Variant of human B-domain deleted Factor VIII
  source 1..4371: mol_type = other DNA
atgcagattgaactgtctacctgcttcttcctctgtttgctgaggttctgctttagcgccactagacggtactaccttggcgctgtggagctgtcctgggactatatgcagagtgatttgggagagcttcccgtcgacgcacgatttcctcctcgcgttccaaagtcatttcccttcaacacaagcgtggtgtacaagaagacgctcttcgtcgaattcaccgatcacctgttcaatatcgccaaacccagaccaccatggatgggtcttttggggcctaccatacaagcggaggtgtatgacacagttgttatcactctcaagaacatggcttctcatccggtaagtcttcacgcagtgggcgtgtcctactggaaagcttcagaaggagccgagtatgatgatcagacatcccagagggagaaagaagacgacaaggtatttccaggtgggtctcatacctatgtgtggcaagtgctcaaagagaatggccctatggcaagcgatccgctctgtttgacttacagctacctttcacacgttgacctcgtcaaggacctcaactccgggttgattggagccttgttggtatgcagggaaggatctcttgccaaagagaagacacagaccctccacaagtttatccttctctttgctgtgttcgatgagggcaaaagttggcatagcgaaacgaagaattccctcatgcaggatcgcgacgcagccagcgccagagcttggcccaagatgcacactgtgaacggatatgtcaataggtcacttcctggcttgattgggtgtcatcggaaaagtgtctactggcacgtgatcggaatggggacaacaccagaggtccactccatatttctcgaaggccataccttccttgttcgaaaccacagacaggcatccttggagatctctcccattacctttctcactgcccaaacgctccttatggacttgggtcagttccttctcttctgccatatcagctcacaccagcatgatggtatggaagcttatgtgaaagtcgacagttgtcctgaggagccacagttgcgcatgaagaataatgaagaagccgaggattacgacgacgatctcaccgattctgagatggacgtggtgaggtttgatgacgacaactctccctccttcattcaaatccggagcgtggcgaagaaacaccccaagacttgggtccactatatagcggcggaagaggaggattgggattacgctcctcttgtattggcaccagatgaccgctcatacaaaagccagtacctcaacaacggaccgcagagaattggccggaagtataagaaagtgcgatttatggcctatacagacgaaacctttaagacaagggaggccatccagcatgagagtgggattttgggacctcttctttacggcgaagttggtgataccctcctcatcatcttcaagaatcaagcttctcgcccctataacatttacccacacgggatcactgacgttaggcctttgtatagcagaagacttcccaaaggcgtgaagcatctcaaagacttccccattttgccaggcgagatctttaagtacaaatggaccgtcacagtggaagatggaccgactaaatcagaccctcgatgccttacgcggtactattcctccttcgtgaatatggagagagatttggcaagcggactcataggaccactcctcatctgttacaaggaatctgtagaccagaggggtaaccagattatgagtgataaacgcaatgtgatcctttttagcgtcttcgacgagaaccggtcctggtacttgaccgagaatatacaaaggttccttcccaaccccgcaggcgttcagttggaagaccctgagtttcaggccagcaatattatgcactcaatcaacggctatgtgtttgatagtctccagctttctgtttgcctccatgaagtagcctattggtacatcttgtcaattggtgctcaaacagacttcctctccgtcttcttctccggctacacctttaagcacaagatggtgtatgaggacactctcacactctttccattttctggagaaaccgtgttcatgagcatggagaatccaggcctttggatcttgggttgccacaacagtgattttcgcaatcggggaatgactgctctcctcaaagtcagcagctgtgataagaacacaggcgactattacgaagattcttacgaggacataagtgcctacttgttgtccaagaataacgccattgagcccagatcattctcccagaatcctcccgtgcttaaaaggcatcagcgcgaaatcaccagaactactcttcagtctgatcaagaggagattgactatgacgacaccataagcgtggaaatgaagaaggaggatttcgatatctatgacgaagatgagaaccagtctccgcggagctttcagaagaagacgcgacactacttcattgcagcagtcgaaaggctttgggactacggtatgtcatcatcccctcatgtgttgcgcaatagagctcagagtggaagtgttccacagttcaagaaagtcgtctttcaagagtttacagatggcagcttcacacagcctctctatcggggcgagcttaacgaacatttgggactccttggtccctatatccgagccgaagtggaggacaacattatggttacctttaggaatcaagcctctcgcccctacagcttctactcctccctcatcagttatgaggaggatcagagacaaggcgctgaaccacggaagaactttgtgaaaccgaatgagacgaagacctacttctggaaagtacagcaccacatggcccccacaaaagacgaattcgattgcaaagcatgggcgtatttttcagacgttgacttggagaaagatgtacattcaggacttattggtcctttgttggtgtgtcacactaacactctcaatccagcccatggcaggcaggtgacagtccaggaattcgctcttttctttaccatctttgatgagaccaagtcctggtacttcacggaaaacatggagcgcaattgcagagccccctgtaacatacagatggaggaccctacctttaaggaaaattatcggttccacgcaatcaacggatacattaaggatacactccctggccttgtgatggctcaggaccaacgaatcaggtggtacctcctcagcatgggttctaatgagaacatacactccattcacttttcaggacatgtgttcactgtccggaagaaagaagagtataagatggccctctacaatttgtatccaggcgtgtttgagaccgttgaaatgcttccctctaaagctggcatctggagagtagagtgcttgatcggagaacatcttcacgcaggtatgagcaccttgttcctcgtgtacagcaacaaatgtcagaccccacttggcatggccagtggacacattcgcgactttcagatcacagcatctggccagtatggacaatgggccccaaagttggctcgcctccattactccggtagcataaatgcgtggtccactaaagaacctttcagctggattaaggtcgatcttcttgcccccatgatcatccacggcattaagacacagggagcgaggcagaaattctcctccctctacatctcacagttcattattatgtatagtttggacggcaagaagtggcaaacttatagaggtaacagtactggaacactcatggtgttcttcggcaacgttgatagctctggcatcaaacacaacatctttaatcctcccataatagctcggtacatcagattgcatccgacccactacagcattaggagtacactccgaatggagcttatgggttgcgacttgaattcctgttcaatgccactcggaatggagtctaaagccatctctgatgcacagataaccgccagtagctactttacgaacatgtttgctacgtggtcaccctctaaggcaaggcttcatttgcaaggccggtctaatgcctggagacctcaggtgaacaacccgaaagaatggctccaggtggactttcagaagaccatgaaagtaacaggtgtcactactcagggagttaagtccttggataccagcatgtatgtgaaggagttccttatttcctcatcacaagatggccaccagtggaccctcttctttcagaatggtaaggtcaaagtgtttcagggcaatcaagacagcttcacacccgtggtgaacagtcttgatcctccactcttgacacgataccttcgaatccatccacagtcttgggttcaccagattgcattgcgcatggaagtacttggatgcgaggctcaggacctctac

SEQ ID NO: 510 - protein, 1457 aa, synthetic construct
  REGION 1..1457: note = Variant of human B-domain deleted Factor VIII
MQIELSTCFFLCLLRFCFSATRRYYLGAVELSWDYMQSDLGELPVDARFPPRVPKSFPFNTSVVYKKTLFVEFTDHLFNIAKPRPPWMGLLGPTIQAEVYDTVVITLKNMASHPVSLHAVGVSYWKASEGAEYDDQTSQREKEDDKVFPGGSHTYVWQVLKENGPMASDPLCLTYSYLSHVDLVKDLNSGLIGALLVCREGSLAKEKTQTLHKFILLFAVFDEGKSWHSETKNSLMQDRDAASARAWPKMHTVNGYVNRSLPGLIGCHRKSVYWHVIGMGTTPEVHSIFLEGHTFLVRNHRQASLEISPITFLTAQTLLMDLGQFLLFCHISSHQHDGMEAYVKVDSCPEEPQLRMKNNEEAEDYDDDLTDSEMDVVRFDDDNSPSFIQIRSVAKKHPKTWVHYIAAEEEDWDYAPLVLAPDDRSYKSQYLNNGPQRIGRKYKKVRFMAYTDETFKTREAIQHESGILGPLLYGEVGDTLLIIFKNQASRPYNIYPHGITDVRPLYSRRLPKGVKHLKDFPILPGEIFKYKWTVTVEDGPTKSDPRCLTRYYSSFVNMERDLASGLIGPLLICYKESVDQRGNQIMSDKRNVILFSVFDENRSWYLTENIQRFLPNPAGVQLEDPEFQASNIMHSINGYVFDSLQLSVCLHEVAYWYILSIGAQTDFLSVFFSGYTFKHKMVYEDTLTLFPFSGETVFMSMENPGLWILGCHNSDFRNRGMTALLKVSSCDKNTGDYYEDSYEDISAYLLSKNNAIEPRSFSQNPPVLKRHQREITRTTLQSDQEEIDYDDTISVEMKKEDFDIYDEDENQSPRSFQKKTRHYFIAAVERLWDYGMSSSPHVLRNRAQSGSVPQFKKVVFQEFTDGSFTQPLYRGELNEHLGLLGPYIRAEVEDNIMVTFRNQASRPYSFYSSLISYEEDQRQGAEPRKNFVKPNETKTYFWKVQHHMAPTKDEFDCKAWAYFSDVDLEKDVHSGLIGPLLVCHTNTLNPAHGRQVTVQEFALFFTIFDETKSWYFTENMERNCRAPCNIQMEDPTFKENYRFHAINGYIKDTLPGLVMAQDQRIRWYLLSMGSNENIHSIHFSGHVFTVRKKEEYKMALYNLYPGVFETVEMLPSKAGIWRVECLIGEHLHAGMSTLFLVYSNKCQTPLGMASGHIRDFQITASGQYGQWAPKLARLHYSGSINAWSTKEPFSWIKVDLLAPMIIHGIKTQGARQKFSSLYISQFIIMYSLDGKKWQTYRGNSTGTLMVFFGNVDSSGIKHNIFNPPIIARYIRLHPTHYSIRSTLRMELMGCDLNSCSMPLGMESKAISDAQITASSYFTNMFATWSPSKARLHLQGRSNAWRPQVNNPKEWLQVDFQKTMKVTGVTTQGVKSLDTSMYVKEFLISSSQDGHQWTLFFQNGKVKVFQGNQDSFTPVVNSLDPPLLTRYLRIHPQSWVHQIALRMEVLGCEAQDLY

SEQ ID NO: 511 - DNA, 4371 bp, synthetic construct
  misc_feature 1..4371: note = Variant of human B-domain deleted Factor VIII
  source 1..4371: mol_type = other DNA
atgcagattgaactgtctacctgcttcttcctctgtttgctgaggttctgctttagcgccactagacggtactaccttggcgctgtggagctgtcctgggactatatgcagagtgatttgggagagcttcccgtcgacgcacgatttcctcctcgcgttccaaagtcatttcccttcaacacaagcgtggtgtacaagaagacgctcttcgtcgaattcaccgatcacctgttcaatatcgccaaacccagaccaccatggatgggtcttttggggcctaccatacaagcggaggtgtatgacacagttgttatcactctcaagaacatggcttctcatccggtaagtcttcacgcagtgggcgtgtcctactggaaagcttcagaaggagccgagtatgatgatcagacatcccagagggagaaagaagacgacaaggtatttccaggtgggtctcatacctatgtgtggcaagtgctcaaagagaatggccctatggcaagcgatccgctctgtttgacttacagctacctttcacacgttgacctcgtcaaggacctcaactccgggttgattggagccttgttggtatgcagggaaggatctcttgccaaagagaagacacagaccctccacaagtttatccttctctttgctgtgttcgatgagggcaaaagttggcatagcgaaacgaagaattccctcatgcaggatcgcgacgcagccagcgccagagcttggcccaagatgcacactgtgaacggatatgtcaataggtcacttcctggcttgattgggtgtcatcggaaaagtgtctactggcacgtgatcggaatggggacaacaccagaggtccactccatatttctcgaaggccataccttccttgttcgaaaccacagacaggcatccttggagatctctcccattacctttctcactgcccaaacgctccttatggacttgggtcagttccttctcttctgccatatcagctcacaccagcatgatggtatggaagcttatgtgaaagtcgacagttgtcctgaggagccacagttgcgcatgaagaataatgaagaagccgaggattacgacgacgatctcaccgattctgagatggacgtggtgaggtttgatgacgacaactctccctccttcattcaaatccggagcgtggcgaagaaacaccccaagacttgggtccactatatagcggcggaagaggaggattgggattacgctcctcttgtattggcaccagatgaccgctcatacaaaagccagtacctcaacaacggaccgcagagaattggccggaagtataagaaagtgcgatttatggcctatacagacgaaacctttaagacaagggaggccatccagcatgagagtgggattttgggacctcttctttacggcgaagttggtgataccctcctcatcatcttcaagaatcaagcttctcgcccctataacatttacccacacgggatcactgacgttaggcctttgtatagcagaagacttcccaaaggcgtgaagcatctcaaagacttccccattttgccaggcgagatctttaagtacaaatggaccgtcacagtggaagatggaccgactaaatcagaccctcgatgccttacgcggtactattcctccttcgtgaatatggagagagatttggcaagcggactcataggaccactcctcatctgttacaaggaatctgtagaccagaggggtaaccagattatgagtgataaacgcaatgtgatcctttttagcgtcttcgacgagaaccggtcctggtacttgaccgagaatatacaaaggttccttcccaaccccgcaggcgttcagttggaagaccctgagtttcaggccagcaatattatgcactcaatcaacggctatgtgtttgatagtctccagctttctgtttgcctccatgaagtagcctattggtacatcttgtcaattggtgctcaaacagacttcctctccgtcttcttctccggctacacctttaagcacaagatggtgtatgaggacactctcacactctttccattttctggagaaaccgtgttcatgagcatggagaatccaggcctttggatcttgggttgccacaacagtgattttcgcaatcggggaatgactgctctcctcaaagtcagcagctgtgataagaacacaggcgactattacgaagattcttacgaggacataagtgcctacttgttgtccaagaataacgccattgagcccagatcattctcccagaatcctcccgtgcttaaaaggcatcagcgcgaaatcaccagaactactcttcagtctgatcaagaggagattgactatgacgacaccataagcgtggaaatgaagaaggaggatttcgatatctatgacgaagatgagaaccagtctccgcggagctttcagaagaagacgcgacactacttcattgcagcagtcgaaaggctttgggactacggtatgtcatcatcccctcatgtgttgcgcaatagagctcagagtggaagtgttccacagttcaagaaagtcgtctttcaagagtttacagatggcagcttcacacagcctctctatcggggcgagcttaacgaacatttgggactccttggtccctatatccgagccgaagtggaggacaacattatggttacctttaggaatcaagcctctcgcccctacagcttctactcctccctcatcagttatgaggaggatcagagacaaggcgctgaaccacggaagaactttgtgaaaccgaatgagacgaagacctacttctggaaagtacagcaccacatggcccccacaaaagacgaattcgattgcaaagcatgggcgtatttttcagacgttgacttggagaaagatgtacattcaggacttattggtcctttgttggtgtgtcacactaacactctcaatccagcccatggcaggcaggtgacagtccaggaattcgctcttttctttaccatctttgatgagaccaagtcctggtacttcacggaaaacatggagcgcaattgcagagccccctgtaacatacagatggaggaccctacctttaaggaaaattatcggttccacgcaatcaacggatacattatggatacactccctggccttgtgatggctcaggaccaacgaatcaggtggtacctcctcagcatgggttctaatgagaacatacactccattcacttttcaggacatgtgttcactgtccggaagaaagaagagtataagatggccctctacaatttgtatccaggcgtgtttgagaccgttgaaatgcttccctctaaagctggcatctggagagtagagtgcttgatcggagaacatcttcacgcaggtatgagcaccttgttcctcgtgtacagcaacaaatgtcagaccccacttggcatggccagtggacacattcgcgactttcagatcacagcatctggccagtatggacaatgggccccaaagttggctcgcctccattactccggtagcataaatgcgtggtccactaaagaacctttcagctggattaaggtcgatcttcttgcccccatgatcatccacggcattaagacacagggagcgaggcagaaattctcctccctctacatctcacagttcattattatgtatagtttggacggcaagaagtggcaaacttatagaggtaacagtactggaacactcatggtgttcttcggcaacgttgatagctctggcatcaaacacaacatctttaatcctccctttatagctcggtacatcagattgcatccgacccactacagcattaggagtacactccgaatggagcttatgggttgcgacttgaattcctgttcaatgccactcggaatggagtctaaagccatctctgatgcacagataaccgccagtagctactttacgaacatgtttgctacgtggtcaccctctaaggcaaggcttcatttgcaaggccggtctaatgcctggagacctcaggtgaacaacccgaaagaatggctccaggtggactttcagaagaccatgaaagtaacaggtgtcactactcagggagttaagtccttggataccagcatgtatgtgaaggagttccttatttcctcatcacaagatggccaccagtggaccctcttctttcagaatggtaaggtcaaagtgtttcagggcaatcaagacagcttcacacccgtggtgaacagtcttgatcctccactcttgacacgataccttcgaatccatccacagtcttgggttcaccagattgcattgcgcatggaagtacttggatgcgaggctcaggacctctac

SEQ ID NO: 512 - protein, 1457 aa, synthetic construct
  REGION 1..1457: note = Variant of human B-domain deleted Factor VIII
MQIELSTCFFLCLLRFCFSATRRYYLGAVELSWDYMQSDLGELPVDARFPPRVPKSFPFNTSVVYKKTLFVEFTDHLFNIAKPRPPWMGLLGPTIQAEVYDTVVITLKNMASHPVSLHAVGVSYWKASEGAEYDDQTSQREKEDDKVFPGGSHTYVWQVLKENGPMASDPLCLTYSYLSHVDLVKDLNSGLIGALLVCREGSLAKEKTQTLHKFILLFAVFDEGKSWHSETKNSLMQDRDAASARAWPKMHTVNGYVNRSLPGLIGCHRKSVYWHVIGMGTTPEVHSIFLEGHTFLVRNHRQASLEISPITFLTAQTLLMDLGQFLLFCHISSHQHDGMEAYVKVDSCPEEPQLRMKNNEEAEDYDDDLTDSEMDVVRFDDDNSPSFIQIRSVAKKHPKTWVHYIAAEEEDWDYAPLVLAPDDRSYKSQYLNNGPQRIGRKYKKVRFMAYTDETFKTREAIQHESGILGPLLYGEVGDTLLIIFKNQASRPYNIYPHGITDVRPLYSRRLPKGVKHLKDFPILPGEIFKYKWTVTVEDGPTKSDPRCLTRYYSSFVNMERDLASGLIGPLLICYKESVDQRGNQIMSDKRNVILFSVFDENRSWYLTENIQRFLPNPAGVQLEDPEFQASNIMHSINGYVFDSLQLSVCLHEVAYWYILSIGAQTDFLSVFFSGYTFKHKMVYEDTLTLFPFSGETVFMSMENPGLWILGCHNSDFRNRGMTALLKVSSCDKNTGDYYEDSYEDISAYLLSKNNAIEPRSFSQNPPVLKRHQREITRTTLQSDQEEIDYDDTISVEMKKEDFDIYDEDENQSPRSFQKKTRHYFIAAVERLWDYGMSSSPHVLRNRAQSGSVPQFKKVVFQEFTDGSFTQPLYRGELNEHLGLLGPYIRAEVEDNIMVTFRNQASRPYSFYSSLISYEEDQRQGAEPRKNFVKPNETKTYFWKVQHHMAPTKDEFDCKAWAYFSDVDLEKDVHSGLIGPLLVCHTNTLNPAHGRQVTVQEFALFFTIFDETKSWYFTENMERNCRAPCNIQMEDPTFKENYRFHAINGYIMDTLPGLVMAQDQRIRWYLLSMGSNENIHSIHFSGHVFTVRKKEEYKMALYNLYPGVFETVEMLPSKAGIWRVECLIGEHLHAGMSTLFLVYSNKCQTPLGMASGHIRDFQITASGQYGQWAPKLARLHYSGSINAWSTKEPFSWIKVDLLAPMIIHGIKTQGARQKFSSLYISQFIIMYSLDGKKWQTYRGNSTGTLMVFFGNVDSSGIKHNIFNPPFIARYIRLHPTHYSIRSTLRMELMGCDLNSCSMPLGMESKAISDAQITASSYFTNMFATWSPSKARLHLQGRSNAWRPQVNNPKEWLQVDFQKTMKVTGVTTQGVKSLDTSMYVKEFLISSSQDGHQWTLFFQNGKVKVFQGNQDSFTPVVNSLDPPLLTRYLRIHPQSWVHQIALRMEVLGCEAQDLY

SEQ ID NO: 513 - DNA, 4371 bp, synthetic construct
  misc_feature 1..4371: note = Variant of human B-domain deleted Factor VIII
  source 1..4371: mol_type = other DNA
atgcagattgaactgtctacctgcttcttcctctgtttgctgaggttctgctttagcgccactagacggtactaccttggcgctgtggagctgtcctgggactatatgcagagtgatttgggagagcttcccgtcgacgcacgatttcctcctcgcgttccaaagtcatttcccttcaacacaagcgtggtgtacaagaagacgctcttcgtcgaattcaccgatcacctgttcaatatcgccaaacccagaccaccatggatgggtcttttggggcctaccatacaagcggaggtgtatgacacagttgttatcactctcaagaacatggcttctcatccggtaagtcttcacgcagtgggcgtgtcctactggaaagcttcagaaggagccgagtatgatgatcagacatcccagagggagaaagaagacgacaaggtatttccaggtgggtctcatacctatgtgtggcaagtgctcaaagagaatggccctatggcaagcgatccgctctgtttgacttacagctacctttcacacgttgacctcgtcaaggacctcaactccgggttgattggagccttgttggtatgcagggaaggatctcttgccaaagagaagacacagaccctccacaagtttatccttctctttgctgtgttcgatgagggcaaaagttggcatagcgaaacgaagaattccctcatgcaggatcgcgacgcagccagcgccagagcttggcccaagatgcacactgtgaacggatatgtcaataggtcacttcctggcttgcgggggtgtcatcggaaaagtgtctactggcacgtgatcggaatggggacaacaccagaggtccactccatatttctcgaaggccataccttccttgttcgaaaccacagacaggcatccttggagatctctcccattacctttctcactgcccaaacgctccttatggacttgggtcagttccttctcttctgccatatcagctcacaccagcatgatggtatggaagcttatgtgaaagtcgacagttgtcctgaggagccacagttgcgcatgaagaataatgaagaagccgaggattacgacgacgatctcaccgattctgagatggacgtggtgaggtttgatgacgacaactctccctccttcattcaaatccggagcgtggcgaagaaacaccccaagacttgggtccactatatagcggcggaagaggaggattgggattacgctcctcttgtattggcaccagatgaccgctcatacaaaagccagtacctcaacaacggaccgcagagaattggccggaagtataagaaagtgcgatttatggcctatacagacgaaacctttaagacaagggaggccatccagcatgagagtgggattttgggacctcttctttacggcgaagttggtgataccctcctcatcatcttcaagaatcaagcttctcgcccctataacatttacccacacgggatcactgacgttaggcctttgtatagcagaagacttcccaaaggcgtgaagcatctcaaagacttccccattttgccaggcgagatctttaagtacaaatggaccgtcacagtggaagatggaccgactaaatcagaccctcgatgccttacgcggtactattcctccttcgtgaatatggagagagatttggcaagcggactcataggaccactcctcatctgttacaaggaatctgtagaccagaggggtaaccagattatgagtgataaacgcaatgtgatcctttttagcgtcttcgacgagaaccggtcctggtacttgaccgagaatatacaaaggttccttcccaaccccgcaggcgttcagttggaagaccctgagtttcaggccagcaatattatgcactcaatcaacggctatgtgtttgatagtctccagctttctgtttgcctccatgaagtagcctattggtacatcttgtcaattggtgctcaaacagacttcctctccgtcttcttctccggctacacctttaagcacaagatggtgtatgaggacactctcacactctttccattttctggagaaaccgtgttcatgagcatggagaatccaggcctttggatcttgggttgccacaacagtgattttcgcaatcggggaatgactgctctcctcaaagtcagcagctgtgataagaacacaggcgactattacgaagattcttacgaggacataagtgcctacttgttgtccaagaataacgccattgagcccagatcattctcccagaatcctcccgtgcttaaaaggcatcagcgcgaaatcaccagaactactcttcagtctgatcaagaggagattgactatgacgacaccataagcgtggaaatgaagaaggaggatttcgatatctatgacgaagatgagaaccagtctccgcggagctttcagaagaagacgcgacactacttcattgcagcagtcgaaaggctttgggactacggtatgtcatcatcccctcatgtgttgcgcaatagagctcagagtggaagtgttccacagttcaagaaagtcgtctttcaagagtttacagatggcagcttcacacagcctctctatcggggcgagcttaacgaacatttgggactccttggtccctatatccgagccgaagtggaggacaacattatggttacctttaggaatcaagcctctcgcccctacagcttctactcctccctcatcagttatgaggaggatcagagacaaggcgctgaaccacggaagaactttgtgaaaccgaatgagacgaagacctacttctggaaagtacagcaccacatggcccccacaaaagacgaattcgattgcaaagcatgggcgtatttttcagacgttgacttggagaaagatgtacattcaggacttattggtcctttgttggtgtgtcacactaacactctcaatccagcccatggcaggcaggtgacagtccaggaattcgctcttttctttaccatctttgatgagaccaagtcctggtacttcacggaaaacatggagcgcaattgcagagccccctgtaacatacagatggaggaccctacctttaaggaaaattatcggttccacgcaatcaacggatacattatggatacactccctggccttgtgatggctcaggaccaacgaatcaggtggtacctcctcagcatgggttctaatgagaacatacactccattcacttttcaggacatgtgttcactgtccggaagaaagaagagtataagatggccctctacaatttgtatccaggcgtgtttgagaccgttgaaatgcttccctctaaagctggcatctggagagtagagtgcttgatcggagaacatcttcacgcaggtatgagcaccttgttcctcgtgtacagcaacaaatgtcagaccccacttggcatggccagtggacacattcgcgactttcagatcacagcatctggccagtatggacaatgggccccaaagttggctcgcctccattactccggtagcataaatgcgtggtccactaaagaacctttcagctggattaaggtcgatcttcttgcccccatgatcatccacggcattaagacacagggagcgaggcagaaattctcctccctctacatctcacagttcattattatgtatagtttggacggcaagaagtggcaaacttatagaggtaacagtactggaacactcatggtgttcttcggcaacgttgatagctctggcatcaaacacaacatctttaatcctcccataatagctcggtacatcagattgcatccgacccactacagcattaggagtacactccgaatggagcttatgggttgcgacttgaattcctgttcaatgccactcggaatggagtctaaagccatctctgatgcacagataaccgccagtagctactttacgaacatgtttgctacgtggtcaccctctaaggcaaggcttcatttgcaaggccggtctaatgcctggagacctcaggtgaacaacccgaaagaatggctccaggtggactttcagaagaccatgaaagtaacaggtgtcactactcagggagttaagtccttggataccagcatgtatgtgaaggagttccttatttcctcatcacaagatggccaccagtggaccctcttctttcagaatggtaaggtcaaagtgtttcagggcaatcaagacagcttcacacccgtggtgaacagtcttgatcctccactcttgacacgataccttcgaatccatccacagtcttgggttcaccagattgcattgcgcatggaagtacttggatgcgaggctcaggacctctac

SEQ ID NO: 514 - protein, 1457 aa, synthetic construct
  REGION 1..1457: note = Variant of human B-domain deleted Factor VIII
MQIELSTCFFLCLLRFCFSATRRYYLGAVELSWDYMQSDLGELPVDARFPPRVPKSFPFNTSVVYKKTLFVEFTDHLFNIAKPRPPWMGLLGPTIQAEVYDTVVITLKNMASHPVSLHAVGVSYWKASEGAEYDDQTSQREKEDDKVFPGGSHTYVWQVLKENGPMASDPLCLTYSYLSHVDLVKDLNSGLIGALLVCREGSLAKEKTQTLHKFILLFAVFDEGKSWHSETKNSLMQDRDAASARAWPKMHTVNGYVNRSLPGLRGCHRKSVYWHVIGMGTTPEVHSIFLEGHTFLVRNHRQASLEISPITFLTAQTLLMDLGQFLLFCHISSHQHDGMEAYVKVDSCPEEPQLRMKNNEEAEDYDDDLTDSEMDVVRFDDDNSPSFIQIRSVAKKHPKTWVHYIAAEEEDWDYAPLVLAPDDRSYKSQYLNNGPQRIGRKYKKVRFMAYTDETFKTREAIQHESGILGPLLYGEVGDTLLIIFKNQASRPYNIYPHGITDVRPLYSRRLPKGVKHLKDFPILPGEIFKYKWTVTVEDGPTKSDPRCLTRYYSSFVNMERDLASGLIGPLLICYKESVDQRGNQIMSDKRNVILFSVFDENRSWYLTENIQRFLPNPAGVQLEDPEFQASNIMHSINGYVFDSLQLSVCLHEVAYWYILSIGAQTDFLSVFFSGYTFKHKMVYEDTLTLFPFSGETVFMSMENPGLWILGCHNSDFRNRGMTALLKVSSCDKNTGDYYEDSYEDISAYLLSKNNAIEPRSFSQNPPVLKRHQREITRTTLQSDQEEIDYDDTISVEMKKEDFDIYDEDENQSPRSFQKKTRHYFIAAVERLWDYGMSSSPHVLRNRAQSGSVPQFKKVVFQEFTDGSFTQPLYRGELNEHLGLLGPYIRAEVEDNIMVTFRNQASRPYSFYSSLISYEEDQRQGAEPRKNFVKPNETKTYFWKVQHHMAPTKDEFDCKAWAYFSDVDLEKDVHSGLIGPLLVCHTNTLNPAHGRQVTVQEFALFFTIFDETKSWYFTENMERNCRAPCNIQMEDPTFKENYRFHAINGYIMDTLPGLVMAQDQRIRWYLLSMGSNENIHSIHFSGHVFTVRKKEEYKMALYNLYPGVFETVEMLPSKAGIWRVECLIGEHLHAGMSTLFLVYSNKCQTPLGMASGHIRDFQITASGQYGQWAPKLARLHYSGSINAWSTKEPFSWIKVDLLAPMIIHGIKTQGARQKFSSLYISQFIIMYSLDGKKWQTYRGNSTGTLMVFFGNVDSSGIKHNIFNPPIIARYIRLHPTHYSIRSTLRMELMGCDLNSCSMPLGMESKAISDAQITASSYFTNMFATWSPSKARLHLQGRSNAWRPQVNNPKEWLQVDFQKTMKVTGVTTQGVKSLDTSMYVKEFLISSSQDGHQWTLFFQNGKVKVFQGNQDSFTPVVNSLDPPLLTRYLRIHPQSWVHQIALRMEVLGCEAQDLY

SEQ ID NO: 515 - DNA, 4371 bp, synthetic construct
  misc_feature 1..4371: note = Variant of human B-domain deleted Factor VIII
  source 1..4371: mol_type = other DNA
atgcagattgaactgtctacctgcttcttcctctgtttgctgaggttctgctttagcgccactagacggtactaccttggcgctgtggagctgtcctgggactatatgcagagtgatttgggagagcttcccgtcgacgcacgatttcctcctcgcgttccaaagtcatttcccttcaacacaagcgtggtgtacaagaagacgctcttcgtcgaattcaccgatcacctgttcaatatcgccaaacccagaccaccatggatgggtcttttggggcctaccatacaagcggaggtgtatgacacagttgttatcactctcaagaacatggcttctcatccggtaagtcttcacgcagtgggcgtgtcctactggaaagcttcagaaggagccgagtatgatgatcagacatcccagagggagaaagaagacgacaaggtatttccaggtgggtctcatacctatgtgtggcaagtgctcaaagagaatggccctatggcaagcgatccgctctgtttgacttacagctacctttcacacgttgacctcgtcaaggacctcaactccgggttgattggagccttgttggtatgcagggaaggatctcttgccaaagagaagacacagaccctccacaagtttatccttctctttgctgtgttcgatgagggcaaaagttggcatagcgaaacgaagaattccctcatgcaggatcgcgacgcagccagcgccagagcttggcccaagatgcacactgtgaacggatatgtcaataggtcacttcctggcttgattgggtgtcatcggaaaagtgtctactggcacgtgatcggaatggggacaacaccagaggtccactccatatttctcgaaggccataccttccttgttcgaaaccacagacaggcatccttggagatctctcccattacctttctcactgcccaaacgctccttatggacttgggtcagttccttctcttctgccatatcagctcacaccagcatgatggtatggaagcttatgtgaaagtcgacagttgtcctgaggagccacagttgcgcatgaagaataatgaagaagccgaggattacgacgacgatctcaccgattctgagatggacgtggtgaggtttgatgacgacaactctccctccttcattcaaatccggagcgtggcgaagaaacaccccaagacttgggtccactatatagcggcggaagaggaggattgggattacgctcctcttgtattggcaccagatgaccgctcatacaaaagccagtacctcaacaacggaccgcagagaattggccggaagtataagaaagtgcgatttatggcctatacagacgaaacctttaagacaagggaggccatccagcatgagagtgggattttgggacctcttctttacggcgaagttggtgataccctcctcatcatcttcaagaatcaagcttctcgcccctataacatttacccacacgggatcactgacgttaggcctttgtatagcagaagacttcccaaaggcgtgaagcatctcaaagacttccccattttgccaggcgagatctttaagtacaaatggaccgtcacagtggaagatggaccgactaaatcagaccctcgatgccttacgcggtactattcctccttcgtgaatatggagagagatttggcaagcggactcataggaccactcctcatctgttacaaggaatctgtagaccagaggggtaaccagattatgagtgataaacgcaatgtgatcctttttagcgtcttcgacgagaaccggtcctggtacttgaccgagaatatacaaaggttccttcccaaccccgcaggcgttcagttggaagaccctgagtttcaggccagcaatattatgcactcaatcaacggctatgtgtttgatagtctccagctttctgtttgcctccatgaagtagcctattggtacatcttgtcaattggtgctcaaacagacttcctctccgtcttcttctccggctacacctttaagcacaagatggtgtatgaggacactctcacactctttccattttctggagaaaccgtgttcatgagcatggagaatccaggcctttggatcttgggttgccacaacagtgattttcgcaatcggggaatgactgctctcctcaaagtcagcagctgtgataagaacacaggcgactattacgaagattcttacgaggacataagtgcctacttgttgtccaagaataacgccattgagcccagatcattctcccagaatcctcccgtgcttaaaaggcatcagcgcgaaatcaccagaactactcttcagtctgatcaagaggagattgactatgacgacaccataagcgtggaaatgaagaaggaggatttcgatatctatgacgaagatgagaaccagtctccgcggagctttcagaagaagacgcgacactacttcattgcagcagtcgaaaggctttgggactacggtatgtcatcatcccctcatgtgttgcgcaatagagctcagagtggaagtgttccacagttcaagaaagtcgtctttcaagagtttacagatggcagcttcacacagcctctctatcggggcgagcttaacgaacatttgggactccttggtccctatatccgagccgaagtggaggacaacattatggttacctttaggaatcaagcctctcgcccctacagcttctactcctccctcatcagttatgaggaggatcagagacaaggcgctgaaccacggaagaactttgtgaaaccgaatgagacgaagacctacttctggaaagtacagcaccacatggcccccacaaaagacgaattcgattgcaaagcatgggcgtatttttcagacgttgacttggagaaagatgtacattcaggacttattggtcctttgttggtgtgtcacactaacactctcaatccagcccatggcaggcaggtgacagtccaggaattcgctcttttctttaccatctttgatgagaccaagtcctggtacttcacggaaaacatggagcgcaattgcagagccccctgtaacatacagatggaggaccctacctttaaggaaaattatcggttccacgcaatcaacggatacattagggatacactccctggccttgtgatggctcaggaccaacgaatcaggtggtacctcctcagcatgggttctaatgagaacatacactccattcacttttcaggacatgtgttcactgtccggaagaaagaagagtataagatggccctctacaatttgtatccaggcgtgtttgagaccgttgaaatgcttccctctaaagctggcatctggagagtagagtgcttgatcggagaacatcttcacgcaggtatgagcaccttgttcctcgtgtacagcaacaaatgtcagaccccacttggcatggccagtggacacattcgcgactttcagatcacagcatctggccagtatggacaatgggccccaaagttggctcgcctccattactccggtagcataaatgcgtggtccactaaagaacctttcagctggattaaggtcgatcttcttgcccccatgatcatccacggcattaagacacagggagcgaggcagaaattctcctccctctacatctcacagttcattattatgtatagtttggacggcaagaagtggcaaacttatagaggtaacagtactggaacactcatggtgttcttcggcaacgttgatagctctggcatcaaacacaacatctttaatcctcccataatagctcggtacatcagattgcatccgacccactacagcattaggagtacactccgaatggagcttatgggttgcgacttgaattcctgttcaatgccactcggaatggagtctaaagccatctctgatgcacagataaccgccagtagctactttacgaacatgtttgctacgtggtcaccctctaaggcaaggcttcatttgcaaggccggtctaatgcctggagacctcaggtgaacaacccgaaagaatggctccaggtggactttcagaagaccatgaaagtaacaggtgtcactactcagggagttaagtccttggataccagcatgtatgtgaaggagttccttatttcctcatcacaagatggccaccagtggaccctcttctttcagaatggtaaggtcaaagtgtttcagggcaatcaagacagcttcacacccgtggtgaacagtcttgatcctccactcttgacacgataccttcgaatccatccacagtcttgggttcaccagattgcattgcgcatggaagtacttggatgcgaggctcaggacctctac

SEQ ID NO: 516 - protein, 1457 aa, synthetic construct
  REGION 1..1457: note = Variant of human B-domain deleted Factor VIII
MQIELSTCFFLCLLRFCFSATRRYYLGAVELSWDYMQSDLGELPVDARFPPRVPKSFPFNTSVVYKKTLFVEFTDHLFNIAKPRPPWMGLLGPTIQAEVYDTVVITLKNMASHPVSLHAVGVSYWKASEGAEYDDQTSQREKEDDKVFPGGSHTYVWQVLKENGPMASDPLCLTYSYLSHVDLVKDLNSGLIGALLVCREGSLAKEKTQTLHKFILLFAVFDEGKSWHSETKNSLMQDRDAASARAWPKMHTVNGYVNRSLPGLIGCHRKSVYWHVIGMGTTPEVHSIFLEGHTFLVRNHRQASLEISPITFLTAQTLLMDLGQFLLFCHISSHQHDGMEAYVKVDSCPEEPQLRMKNNEEAEDYDDDLTDSEMDVVRFDDDNSPSFIQIRSVAKKHPKTWVHYIAAEEEDWDYAPLVLAPDDRSYKSQYLNNGPQRIGRKYKKVRFMAYTDETFKTREAIQHESGILGPLLYGEVGDTLLIIFKNQASRPYNIYPHGITDVRPLYSRRLPKGVKHLKDFPILPGEIFKYKWTVTVEDGPTKSDPRCLTRYYSSFVNMERDLASGLIGPLLICYKESVDQRGNQIMSDKRNVILFSVFDENRSWYLTENIQRFLPNPAGVQLEDPEFQASNIMHSINGYVFDSLQLSVCLHEVAYWYILSIGAQTDFLSVFFSGYTFKHKMVYEDTLTLFPFSGETVFMSMENPGLWILGCHNSDFRNRGMTALLKVSSCDKNTGDYYEDSYEDISAYLLSKNNAIEPRSFSQNPPVLKRHQREITRTTLQSDQEEIDYDDTISVEMKKEDFDIYDEDENQSPRSFQKKTRHYFIAAVERLWDYGMSSSPHVLRNRAQSGSVPQFKKVVFQEFTDGSFTQPLYRGELNEHLGLLGPYIRAEVEDNIMVTFRNQASRPYSFYSSLISYEEDQRQGAEPRKNFVKPNETKTYFWKVQHHMAPTKDEFDCKAWAYFSDVDLEKDVHSGLIGPLLVCHTNTLNPAHGRQVTVQEFALFFTIFDETKSWYFTENMERNCRAPCNIQMEDPTFKENYRFHAINGYIRDTLPGLVMAQDQRIRWYLLSMGSNENIHSIHFSGHVFTVRKKEEYKMALYNLYPGVFETVEMLPSKAGIWRVECLIGEHLHAGMSTLFLVYSNKCQTPLGMASGHIRDFQITASGQYGQWAPKLARLHYSGSINAWSTKEPFSWIKVDLLAPMIIHGIKTQGARQKFSSLYISQFIIMYSLDGKKWQTYRGNSTGTLMVFFGNVDSSGIKHNIFNPPIIARYIRLHPTHYSIRSTLRMELMGCDLNSCSMPLGMESKAISDAQITASSYFTNMFATWSPSKARLHLQGRSNAWRPQVNNPKEWLQVDFQKTMKVTGVTTQGVKSLDTSMYVKEFLISSSQDGHQWTLFFQNGKVKVFQGNQDSFTPVVNSLDPPLLTRYLRIHPQSWVHQIALRMEVLGCEAQDLY

SEQ ID NO: 517 - DNA, 4371 bp, synthetic construct
  misc_feature 1..4371: note = Variant of human B-domain deleted Factor VIII
  source 1..4371: mol_type = other DNA
atgcagattgaactgtctacctgcttcttcctctgtttgctgaggttctgctttagcgccactagacggtactaccttggcgctgtggagctgtcctgggactatatgcagagtgatttgggagagcttcccgtcgacgcacgatttcctcctcgcgttccaaagtcatttcccttcaacacaagcgtggtgtacaagaagacgctcttcgtcgaattcaccgatcacctgttcaatatcgccaaacccagaccaccatggatgggtcttttggggcctaccatacaagcggaggtgtatgacacagttgttatcactctcaagaacatggcttctcatccggtaagtcttcacgcagtgggcgtgtcctactggaaagcttcagaaggagccgagtatgatgatcagacatcccagagggagaaagaagacgacaaggtatttccaggtgggtctcatacctatgtgtggcaagtgctcaaagagaatggccctatggcaagcgatccgctctgtttgacttacagctacctttcacacgttgacctcgtcaaggacctcaactccgggttgattggagccttgttggtatgcagggaaggatctcttgccaaagagaagacacagaccctccacaagtttatccttctctttgctgtgttcgatgagggcaaaagttggcatagcgaaacgaagaattccctcatgcaggatcgcgacgcagccagcgccagagcttggcccaagatgcacactgtgaacggatatgtcaataggtcacttcctggcttgattgggtgtcatcggaaaagtgtctactggcacgtgatcggaatggggacaacaccagaggtccactccatatttctcgaaggccataccttccttgttcgaaaccacagacaggcatccttggagatctctcccattacctttctcactgcccaaacgctccttatggacttgggtcagttccttctcttctgccatatcagctcacaccagcatgatggtatggaagcttatgtgaaagtcgacagttgtcctgaggagccacagttgcgcatgaagaataatgaagaagccgaggattacgacgacgatctcaccgattctgagatggacgtggtgaggtttgatgacgacaactctccctccttcattcaaatccggagcgtggcgaagaaacaccccaagacttgggtccactatatagcggcggaagaggaggattgggattacgctcctcttgtattggcaccagatgaccgctcatacaaaagccagtacctcaacaacggaccgcagagaattggccggaagtataagaaagtgcgatttatggcctatacagacgaaacctttaagacaagggaggccatccagcatgagagtgggattttgggacctcttctttacggcgaagttggtgataccctcctcatcatcttcaagaatcaagcttctcgcccctataacatttacccacacgggatcactgacgttaggcctttgtatagcagaagacttcccaaaggcgtgaagcatctcaaagacttccccattttgccaggcgagatctttaagtacaaatggaccgtcacagtggaagatggaccgactaaatcagaccctcgatgccttacgcggtactattcctccttcgtgaatatggagagagatttggcaagcggactcataggaccactcctcatctgttacaaggaatctgtagaccagaggggtaaccagattatgagtgataaacgcaatgtgatcctttttagcgtcttcgacgagaaccggtcctggtacttgaccgagaatatacaaaggttccttcccaaccccgcaggcgttcagttggaagaccctgagtttcaggccagcaatattatgcactcaatcaacggctatgtgtttgatagtctccagctttctgtttgcctccatgaagtagcctattggtacatcttgtcaattggtgctcaaacagacttcctctccgtcttcttctccggctacacctttaagcacaagatggtgtatgaggacactctcacactctttccattttctggagaaaccgtgttcatgagcatggagaatccaggcctttggatcttgggttgccacaacagtgattttcgcaatcggggaatgactgctctcctcaaagtcagcagctgtgataagaacacaggcgactattacgaagattcttacgaggacataagtgcctacttgttgtccaagaataacgccattgagcccagatcattctcccagaatcctcccgtgcttaaaaggcatcagcgcgaaatcaccagaactactcttcagtctgatcaagaggagattgactatgacgacaccataagcgtggaaatgaagaaggaggatttcgatatctatgacgaagatgagaaccagtctccgcggagctttcagaagaagacgcgacactacttcattgcagcagtcgaaaggctttgggactacggtatgtcatcatcccctcatgtgttgcgcaatagagctcagagtggaagtgttccacagttcaagaaagtcgtctttcaagagtttacagatggcagcttcacacagcctctctatcggggcgagcttaacgaacatttgggactccttggtccctatatccgagccgaagtggaggacaacattatggttacctttaggaatcaagcctctcgcccctacagcttctactcctccctcatcagttatgaggaggatcagagacaaggcgctgaaccacggaagaactttgtgaaaccgaatgagacgaagacctacttctggaaagtacagcaccacatggcccccacaaaagacgaattcgattgcaaagcatgggcgtatttttcagacgttgacttggagaaagatgtacattcaggacttattggtcctttgttggtgtgtcacactaacactctcaatccagcccatggcaggcaggtgacagtccaggaattcgctcttttctttaccatctttgatgagaccaagtcctggtacttcacggaaaacatggagcgcaattgcagagccccctgtaacatacagatggaggaccctacctttaaggaaaattatcggttccacgcaatcaacggatacattatggatacactccctggccttgtgatggctcaggaccaacgaatcaggtggtacctcctcagcatgggttctaatgagaacatacactccattcacttttcaggacatgtgttcactgtccggaagaaagaagagtataagatggccctctacaatttgtatccaggcgtgtttgagaccgttgaaatgcttccctctaaagctggcatctggagagtagagtgcttgatcggagaacatcttcacgcaggtatgagcaccttgttcctcgtgtacagcaacaaatgtcagaccccacttggcatggccagtggacacattcgcgactttcagatcacagcatctggccagtatggacaatgggccccaaagttggctcgcctccattactccggtagcataaatgcgtggtccactaaagaacctttcagctggattaaggtcgatcttcttgcccccatgatcatccacggcattaagacacagggagcgaggcagaaattgtcctccctctacatctcacagttcattattatgtatagtttggacggcaagaagtggcaaacttatagaggtaacagtactggaacactcatggtgttcttcggcaacgttgatagctctggcatcaaacacaacatctttaatcctcccataatagctcggtacatcagattgcatccgacccactacagcattaggagtacactccgaatggagcttatgggttgcgacttgaattcctgttcaatgccactcggaatggagtctaaagccatctctgatgcacagataaccgccagtagctactttacgaacatgtttgctacgtggtcaccctctaaggcaaggcttcatttgcaaggccggtctaatgcctggagacctcaggtgaacaacccgaaagaatggctccaggtggactttcagaagaccatgaaagtaacaggtgtcactactcagggagttaagtccttggataccagcatgtatgtgaaggagttccttatttcctcatcacaagatggccaccagtggaccctcttctttcagaatggtaaggtcaaagtgtttcagggcaatcaagacagcttcacacccgtggtgaacagtcttgatcctccactcttgacacgataccttcgaatccatccacagtcttgggttcaccagattgcattgcgcatggaagtacttggatgcgaggctcaggacctctac

SEQ ID NO: 518 - protein, 1457 aa, synthetic construct
  REGION 1..1457: note = Variant of human B-domain deleted Factor VIII
MQIELSTCFFLCLLRFCFSATRRYYLGAVELSWDYMQSDLGELPVDARFPPRVPKSFPFNTSVVYKKTLFVEFTDHLFNIAKPRPPWMGLLGPTIQAEVYDTVVITLKNMASHPVSLHAVGVSYWKASEGAEYDDQTSQREKEDDKVFPGGSHTYVWQVLKENGPMASDPLCLTYSYLSHVDLVKDLNSGLIGALLVCREGSLAKEKTQTLHKFILLFAVFDEGKSWHSETKNSLMQDRDAASARAWPKMHTVNGYVNRSLPGLIGCHRKSVYWHVIGMGTTPEVHSIFLEGHTFLVRNHRQASLEISPITFLTAQTLLMDLGQFLLFCHISSHQHDGMEAYVKVDSCPEEPQLRMKNNEEAEDYDDDLTDSEMDVVRFDDDNSPSFIQIRSVAKKHPKTWVHYIAAEEEDWDYAPLVLAPDDRSYKSQYLNNGPQRIGRKYKKVRFMAYTDETFKTREAIQHESGILGPLLYGEVGDTLLIIFKNQASRPYNIYPHGITDVRPLYSRRLPKGVKHLKDFPILPGEIFKYKWTVTVEDGPTKSDPRCLTRYYSSFVNMERDLASGLIGPLLICYKESVDQRGNQIMSDKRNVILFSVFDENRSWYLTENIQRFLPNPAGVQLEDPEFQASNIMHSINGYVFDSLQLSVCLHEVAYWYILSIGAQTDFLSVFFSGYTFKHKMVYEDTLTLFPFSGETVFMSMENPGLWILGCHNSDFRNRGMTALLKVSSCDKNTGDYYEDSYEDISAYLLSKNNAIEPRSFSQNPPVLKRHQREITRTTLQSDQEEIDYDDTISVEMKKEDFDIYDEDENQSPRSFQKKTRHYFIAAVERLWDYGMSSSPHVLRNRAQSGSVPQFKKVVFQEFTDGSFTQPLYRGELNEHLGLLGPYIRAEVEDNIMVTFRNQASRPYSFYSSLISYEEDQRQGAEPRKNFVKPNETKTYFWKVQHHMAPTKDEFDCKAWAYFSDVDLEKDVHSGLIGPLLVCHTNTLNPAHGRQVTVQEFALFFTIFDETKSWYFTENMERNCRAPCNIQMEDPTFKENYRFHAINGYIMDTLPGLVMAQDQRIRWYLLSMGSNENIHSIHFSGHVFTVRKKEEYKMALYNLYPGVFETVEMLPSKAGIWRVECLIGEHLHAGMSTLFLVYSNKCQTPLGMASGHIRDFQITASGQYGQWAPKLARLHYSGSINAWSTKEPFSWIKVDLLAPMIIHGIKTQGARQKLSSLYISQFIIMYSLDGKKWQTYRGNSTGTLMVFFGNVDSSGIKHNIFNPPIIARYIRLHPTHYSIRSTLRMELMGCDLNSCSMPLGMESKAISDAQITASSYFTNMFATWSPSKARLHLQGRSNAWRPQVNNPKEWLQVDFQKTMKVTGVTTQGVKSLDTSMYVKEFLISSSQDGHQWTLFFQNGKVKVFQGNQDSFTPVVNSLDPPLLTRYLRIHPQSWVHQIALRMEVLGCEAQDLY

SEQ ID NO: 519 - DNA, 4371 bp, synthetic construct
  misc_feature 1..4371: note = Variant of human B-domain deleted Factor VIII
  source 1..4371: mol_type = other DNA
atgcagattgaactgtctacctgcttcttcctctgtttgctgaggttctgctttagcgccactagacggtactaccttggcgctgtggagctgtcctgggactatatgcagagtgatttgggagagcttcccgtcgacgcacgatttcctcctcgcgttccaaagtcatttcccttcaacacaagcgtggtgtacaagaagacgctcttcgtcgaattcaccgatcacctgttcaatatcgccaaacccagaccaccatggatgggtcttttggggcctaccatacaagcggaggtgtatgacacagttgttatcactctcaagaacatggcttctcatccggtaagtcttcacgcagtgggcgtgtcctactggaaagcttcagaaggagccgagtatgatgatcagacatcccagagggagaaagaagacgacaaggtatttccaggtgggtctcatacctatgtgtggcaagtgctcaaagagaatggccctatggcaagcgatccgctctgtttgacttacagctacctttcacacgttgacctcgtcaaggacctcaactccgggttgattggagccttgttggtatgcagggaaggatctcttgccaaagagaagacacagaccctccacaagtttatccttctctttgctgtgttcgatgagggcaaaagttggcatagcgaaacgaagaattccctcatgcaggatcgcgacgcagccagcgccagagcttggcccaagatgcacactgtgaacggatatgtcaataggtcacttcctggcttgattgggtgtcatcggaaaagtgtctactggcacgtgatcggaatggggacaacaccagaggtccactccatatttctcgaaggccataccttccttgttcgaaaccacagacaggcatccttggagatctctcccattacctttctcactgcccaaacgctccttatggacttgggtcagttccttctcttctgccatatcagctcacaccagcatgatggtatggaagcttatgtgaaagtcgacagttgtcctgaggagccacagttgcgcatgaagaataatgaagaagccgaggattacgacgacgatctcaccgattctgagatggacgtggtgaggtttgatgacgacaactctccctccttcattcaaatccggagcgtggcgaagaaacaccccaagacttgggtccactatatagcggcggaagaggaggattgggattacgctcctcttgtattggcaccagatgaccgctcatacaaaagccagtacctcaacaacggaccgcagagaattggccggaagtataagaaagtgcgatttatggcctatacagacgaaacctttaagacaagggaggccatccagcatgagagtgggattttgggacctcttctttacggcgaagttggtgataccctcctcatcatcttcaagaatcaagcttctcgcccctataacatttacccacacgggatcactgacgttaggcctttgtatagcagaagacttcccaaaggcgtgaagcatctcaaagacttccccattttgccaggcgagatctttaagtacaaatggaccgtcacagtggaagatggaccgactaaatcagaccctcgatgccttacgcggtactattcctccttcgtgaatatggagagagatttggcaagcggactcataggaccactcctcatctgttacaaggaatctgtagaccagaggggtaaccagattatgagtgataaacgcaatgtgatcctttttagcgtcttcgacgagaaccggtcctggtacttgaccgagaatatacaaaggttccttcccaaccccgcaggcgttcagttggaagaccctgagtttcaggccagcaatattatgcactcaatcaacggctatgtgtttgatagtctccagctttctgtttgcctccatgaagtagcctattggtacatcttgtcaattggtgctcaaacagacttcctctccgtcttcttctccggctacacctttaagcacaagatggtgtatgaggacactctcacactctttccattttctggagaaaccgtgttcatgagcatggagaatccaggcctttggatcttgggttgccacaacagtgattttcgcaatcggggaatgactgctctcctcaaagtcagcagctgtgataagaacacaggcgactattacgaagattcttacgaggacataagtgcctacttgttgtccaagaataacgccattgagcccagatcattctcccagaatcctcccgtgcttaaaaggcatcagcgcgaaatcaccagaactactcttcagtctgatcaagaggagattgactatgacgacaccataagcgtggaaatgaagaaggaggatttcgatatctatgacgaagatgagaaccagtctccgcggagctttcagaagaagacgcgacactacttcattgcagcagtcgaaaggctttgggactacggtatgtcatcatcccctcatgtgttgcgcaatagagctcagagtggaagtgttccacagttcaagaaagtcgtctttcaagagtttacagatggcagcttcacacagcctctctatcggggcgagcttaacgaacatttgggactccttggtccctatatccgagccgaagtggaggacaacattagggttacctttaggaatcaagcctctcgcccctacagcttctactcctccctcatcagttatgaggaggatcagagacaaggcgctgaaccacggaagaactttgtgaaaccgaatgagacgaagacctacttctggaaagtacagcaccacatggcccccacaaaagacgaattcgattgcaaagcatgggcgtatttttcagacgttgacttggagaaagatgtacattcaggacttattggtcctttgttggtgtgtcacactaacactctcaatccagcccatggcaggcaggtgacagtccaggaattcgctcttttctttaccatctttgatgagaccaagtcctggtacttcacggaaaacatggagcgcaattgcagagccccctgtaacatacagatggaggaccctacctttaaggaaaattatcggttccacgcaatcaacggatacattatggatacactccctggccttgtgatggctcaggaccaacgaatcaggtggtacctcctcagcatgggttctaatgagaacatacactccattcacttttcaggacatgtgttcactgtccggaagaaagaagagtataagatggccctctacaatttgtatccaggcgtgtttgagaccgttgaaatgcttccctctaaagctggcatctggagagtagagtgcttgatcggagaacatcttcacgcaggtatgagcaccttgttcctcgtgtacagcaacaaatgtcagaccccacttggcatggccagtggacacattcgcgactttcagatcacagcatctggccagtatggacaatgggccccaaagttggctcgcctccattactccggtagcataaatgcgtggtccactaaagaacctttcagctggattaaggtcgatcttcttgcccccatgatcatccacggcattaagacacagggagcgaggcagaaattctcctccctctacatctcacagttcattattatgtatagtttggacggcaagaagtggcaaacttatagaggtaacagtactggaacactcatggtgttcttcggcaacgttgatagctctggcatcaaacacaacatctttaatcctcccataatagctcggtacatcagattgcatccgacccactacagcattaggagtacactccgaatggagcttatgggttgcgacttgaattcctgttcaatgccactcggaatggagtctaaagccatctctgatgcacagataaccgccagtagctactttacgaacatgtttgctacgtggtcaccctctaaggcaaggcttcatttgcaaggccggtctaatgcctggagacctcaggtgaacaacccgaaagaatggctccaggtggactttcagaagaccatgaaagtaacaggtgtcactactcagggagttaagtccttggataccagcatgtatgtgaaggagttccttatttcctcatcacaagatggccaccagtggaccctcttctttcagaatggtaaggtcaaagtgtttcagggcaatcaagacagcttcacacccgtggtgaacagtcttgatcctccactcttgacacgataccttcgaatccatccacagtcttgggttcaccagattgcattgcgcatggaagtacttggatgcgaggctcaggacctctac

SEQ ID NO: 520 - protein, 1457 aa, synthetic construct
  REGION 1..1457: note = Variant of human B-domain deleted Factor VIII
MQIELSTCFFLCLLRFCFSATRRYYLGAVELSWDYMQSDLGELPVDARFPPRVPKSFPFNTSVVYKKTLFVEFTDHLFNIAKPRPPWMGLLGPTIQAEVYDTVVITLKNMASHPVSLHAVGVSYWKASEGAEYDDQTSQREKEDDKVFPGGSHTYVWQVLKENGPMASDPLCLTYSYLSHVDLVKDLNSGLIGALLVCREGSLAKEKTQTLHKFILLFAVFDEGKSWHSETKNSLMQDRDAASARAWPKMHTVNGYVNRSLPGLIGCHRKSVYWHVIGMGTTPEVHSIFLEGHTFLVRNHRQASLEISPITFLTAQTLLMDLGQFLLFCHISSHQHDGMEAYVKVDSCPEEPQLRMKNNEEAEDYDDDLTDSEMDVVRFDDDNSPSFIQIRSVAKKHPKTWVHYIAAEEEDWDYAPLVLAPDDRSYKSQYLNNGPQRIGRKYKKVRFMAYTDETFKTREAIQHESGILGPLLYGEVGDTLLIIFKNQASRPYNIYPHGITDVRPLYSRRLPKGVKHLKDFPILPGEIFKYKWTVTVEDGPTKSDPRCLTRYYSSFVNMERDLASGLIGPLLICYKESVDQRGNQIMSDKRNVILFSVFDENRSWYLTENIQRFLPNPAGVQLEDPEFQASNIMHSINGYVFDSLQLSVCLHEVAYWYILSIGAQTDFLSVFFSGYTFKHKMVYEDTLTLFPFSGETVFMSMENPGLWILGCHNSDFRNRGMTALLKVSSCDKNTGDYYEDSYEDISAYLLSKNNAIEPRSFSQNPPVLKRHQREITRTTLQSDQEEIDYDDTISVEMKKEDFDIYDEDENQSPRSFQKKTRHYFIAAVERLWDYGMSSSPHVLRNRAQSGSVPQFKKVVFQEFTDGSFTQPLYRGELNEHLGLLGPYIRAEVEDNIRVTFRNQASRPYSFYSSLISYEEDQRQGAEPRKNFVKPNETKTYFWKVQHHMAPTKDEFDCKAWAYFSDVDLEKDVHSGLIGPLLVCHTNTLNPAHGRQVTVQEFALFFTIFDETKSWYFTENMERNCRAPCNIQMEDPTFKENYRFHAINGYIMDTLPGLVMAQDQRIRWYLLSMGSNENIHSIHFSGHVFTVRKKEEYKMALYNLYPGVFETVEMLPSKAGIWRVECLIGEHLHAGMSTLFLVYSNKCQTPLGMASGHIRDFQITASGQYGQWAPKLARLHYSGSINAWSTKEPFSWIKVDLLAPMIIHGIKTQGARQKFSSLYISQFIIMYSLDGKKWQTYRGNSTGTLMVFFGNVDSSGIKHNIFNPPIIARYIRLHPTHYSIRSTLRMELMGCDLNSCSMPLGMESKAISDAQITASSYFTNMFATWSPSKARLHLQGRSNAWRPQVNNPKEWLQVDFQKTMKVTGVTTQGVKSLDTSMYVKEFLISSSQDGHQWTLFFQNGKVKVFQGNQDSFTPVVNSLDPPLLTRYLRIHPQSWVHQIALRMEVLGCEAQDLY

SEQ ID NO: 521 - DNA, 4371 bp, synthetic construct
  misc_feature 1..4371: note = Variant of human B-domain deleted Factor VIII
  source 1..4371: mol_type = other DNA
atgcagattgaactgtctacctgcttcttcctctgtttgctgaggttctgctttagcgccactagacggtactaccttggcgctgtggagctgtcctgggactatatgcagagtgatttgggagagcttcccgtcgacgcacgatttcctcctcgcgttccaaagtcatttcccttcaacacaagcgtggtgtacaagaagacgctcttcgtcgaattcaccgatcacctgttcaatatcgccaaacccagaccaccatggatgggtcttttggggcctaccatacaagcggaggtgtatgacacagttgttatcactctcaagaacatggcttctcatccggtaagtcttcacgcagtgggcgtgtcctactggaaagcttcagaaggagccgagtatgatgatcagacatcccagagggagaaagaagacgacaaggtatttccaggtgggtctcatacctatgtgtggcaagtgctcaaagagaatggccctatggcaagcgatccgctctgtttgacttacagctacctttcacacgttgacctcgtcaaggacctcaactccgggttgattggagccttgttggtatgcagggaaggatctcttgccaaagagaagacacagaccctccacaagtttatccttctctttgctgtgttcgatgagggcaaaagttggcatagcgaaacgaagaattccctcatgcaggatcgcgacgcagccagcgccagagcttggcccaagatgcacactgtgaacggatatgtcaataggtcacttcctggcttgattgggtgtcatcggaaaagtgtctactggcacgtgatcggaatggggacaacaccagaggtccactccatatttctcgaaggccataccttccttgttcgaaaccacagacaggcatccttggagatctctcccattacctttctcactgcccaaacgctccttatggacttgggtcagttccttctcttctgccatatcagctcacaccagcatgatggtatggaagcttatgtgaaagtcgacagttgtcctgaggagccacagttgcgcatgaagaataatgaagaagccgaggattacgacgacgatctcaccgattctgagatggacgtggtgaggtttgatgacgacaactctccctccttccctcaaatccggagcgtggcgaagaaacaccccaagacttgggtccactatatagcggcggaagaggaggattgggattacgctcctcttgtattggcaccagatgaccgctcatacaaaagccagtacctcaacaacggaccgcagagaattggccggaagtataagaaagtgcgatttatggcctatacagacgaaacctttaagacaagggaggccatccagcatgagagtgggattttgggacctcttctttacggcgaagttggtgataccctcctcatcatcttcaagaatcaagcttctcgcccctataacatttacccacacgggatcactgacgttaggcctttgtatagcagaagacttcccaaaggcgtgaagcatctcaaagacttccccattttgccaggcgagatctttaagtacaaatggaccgtcacagtggaagatggaccgactaaatcagaccctcgatgccttacgcggtactattcctccttcgtgaatatggagagagatttggcaagcggactcataggaccactcctcatctgttacaaggaatctgtagaccagaggggtaaccagattatgagtgataaacgcaatgtgatcctttttagcgtcttcgacgagaaccggtcctggtacttgaccgagaatatacaaaggttccttcccaaccccgcaggcgttcagttggaagaccctgagtttcaggccagcaatattatgcactcaatcaacggctatgtgtttgatagtctccagctttctgtttgcctccatgaagtagcctattggtacatcttgtcaattggtgctcaaacagacttcctctccgtcttcttctccggctacacctttaagcacaagatggtgtatgaggacactctcacactctttccattttctggagaaaccgtgttcatgagcatggagaatccaggcctttggatcttgggttgccacaacagtgattttcgcaatcggggaatgactgctctcctcaaagtcagcagctgtgataagaacacaggcgactattacgaagattcttacgaggacataagtgcctacttgttgtccaagaataacgccattgagcccagatcattctcccagaatcctcccgtgcttaaaaggcatcagcgcgaaatcaccagaactactcttcagtctgatcaagaggagattgactatgacgacaccataagcgtggaaatgaagaaggaggatttcgatatctatgacgaagatgagaaccagtctccgcggagctttcagaagaagacgcgacactacttcattgcagcagtcgaaaggctttgggactacggtatgtcatcatcccctcatgtgttgcgcaatagagctcagagtggaagtgttccacagttcaagaaagtcgtctttcaagagtttacagatggcagcttcacacagcctctctatcggggcgagcttaacgaacatttgggactccttggtccctatatccgagccgaagtggaggacaacattatggttacctttaggaatcaagcctctcgcccctacagcttctactcctccctcatcagttatgaggaggatcagagacaaggcgctgaaccacggaagaactttgtgaaaccgaatgagacgaagacctacttctggaaagtacagcaccacatggcccccacaaaagacgaattcgattgcaaagcatgggcgtatttttcagacgttgacttggagaaagatgtacattcaggacttattggtcctttgttggtgtgtcacactaacactctcaatccagcccatggcaggcaggtgacagtccaggaattcgctcttttctttaccatctttgatgagaccaagtcctggtacttcacggaaaacatggagcgcaattgcagagccccctgtaacatacagatggaggaccctacctttaaggaaaattatcggttccacgcaatcaacggatacattatggatacactccctggccttgtgatggctcaggaccaacgaatcaggtggtacctcctcagcatgggttctaatgagaacatacactccattcacttttcaggacatgtgttcactgtccggaagaaagaagagtataagatggccctctacaatttgtatccaggcgtgtttgagaccgttgaaatgcttccctctaaagctggcatctggagagtagagtgcttgatcggagaacatcttcacgcaggtatgagcaccttgttcctcgtgtacagcaacaaatgtcagaccccacttggcatggccagtggacacattcgcgactttcagatcacagcatctggccagtatggacaatgggccccaaagttggctcgcctccattactccggtagcataaatgcgtggtccactaaagaacctttcagctggattaaggtcgatcttcttgcccccatgatcatccacggcattaagacacagggagcgaggcagaaattctcctccctctacatctcacagttcattattatgtatagtttggacggcaagaagtggcaaacttatagaggtaacagtactggaacactcatggtgttcttcggcaacgttgatagctctggcatcaaacacaacatctttaatcctcccataatagctcggtacatcagattgcatccgacccactacagcattaggagtacactccgaatggagcttatgggttgcgacttgaattcctgttcaatgccactcggaatggagtctaaagccatctctgatgcacagataaccgccagtagctactttacgaacatgtttgctacgtggtcaccctctaaggcaaggcttcatttgcaaggccggtctaatgcctggagacctcaggtgaacaacccgaaagaatggctccaggtggactttcagaagaccatgaaagtaacaggtgtcactactcagggagttaagtccttggataccagcatgtatgtgaaggagttccttatttcctcatcacaagatggccaccagtggaccctcttctttcagaatggtaaggtcaaagtgtttcagggcaatcaagacagcttcacacccgtggtgaacagtcttgatcctccactcttgacacgataccttcgaatccatccacagtcttgggttcaccagattgcattgcgcatggaagtacttggatgcgaggctcaggacctctac

SEQ ID NO: 522 - protein, 1457 aa, synthetic construct
  REGION 1..1457: note = Variant of human B-domain deleted Factor VIII
MQIELSTCFFLCLLRFCFSATRRYYLGAVELSWDYMQSDLGELPVDARFPPRVPKSFPFNTSVVYKKTLFVEFTDHLFNIAKPRPPWMGLLGPTIQAEVYDTVVITLKNMASHPVSLHAVGVSYWKASEGAEYDDQTSQREKEDDKVFPGGSHTYVWQVLKENGPMASDPLCLTYSYLSHVDLVKDLNSGLIGALLVCREGSLAKEKTQTLHKFILLFAVFDEGKSWHSETKNSLMQDRDAASARAWPKMHTVNGYVNRSLPGLIGCHRKSVYWHVIGMGTTPEVHSIFLEGHTFLVRNHRQASLEISPITFLTAQTLLMDLGQFLLFCHISSHQHDGMEAYVKVDSCPEEPQLRMKNNEEAEDYDDDLTDSEMDVVRFDDDNSPSFPQIRSVAKKHPKTWVHYIAAEEEDWDYAPLVLAPDDRSYKSQYLNNGPQRIGRKYKKVRFMAYTDETFKTREAIQHESGILGPLLYGEVGDTLLIIFKNQASRPYNIYPHGITDVRPLYSRRLPKGVKHLKDFPILPGEIFKYKWTVTVEDGPTKSDPRCLTRYYSSFVNMERDLASGLIGPLLICYKESVDQRGNQIMSDKRNVILFSVFDENRSWYLTENIQRFLPNPAGVQLEDPEFQASNIMHSINGYVFDSLQLSVCLHEVAYWYILSIGAQTDFLSVFFSGYTFKHKMVYEDTLTLFPFSGETVFMSMENPGLWILGCHNSDFRNRGMTALLKVSSCDKNTGDYYEDSYEDISAYLLSKNNAIEPRSFSQNPPVLKRHQREITRTTLQSDQEEIDYDDTISVEMKKEDFDIYDEDENQSPRSFQKKTRHYFIAAVERLWDYGMSSSPHVLRNRAQSGSVPQFKKVVFQEFTDGSFTQPLYRGELNEHLGLLGPYIRAEVEDNIMVTFRNQASRPYSFYSSLISYEEDQRQGAEPRKNFVKPNETKTYFWKVQHHMAPTKDEFDCKAWAYFSDVDLEKDVHSGLIGPLLVCHTNTLNPAHGRQVTVQEFALFFTIFDETKSWYFTENMERNCRAPCNIQMEDPTFKENYRFHAINGYIMDTLPGLVMAQDQRIRWYLLSMGSNENIHSIHFSGHVFTVRKKEEYKMALYNLYPGVFETVEMLPSKAGIWRVECLIGEHLHAGMSTLFLVYSNKCQTPLGMASGHIRDFQITASGQYGQWAPKLARLHYSGSINAWSTKEPFSWIKVDLLAPMIIHGIKTQGARQKFSSLYISQFIIMYSLDGKKWQTYRGNSTGTLMVFFGNVDSSGIKHNIFNPPIIARYIRLHPTHYSIRSTLRMELMGCDLNSCSMPLGMESKAISDAQITASSYFTNMFATWSPSKARLHLQGRSNAWRPQVNNPKEWLQVDFQKTMKVTGVTTQGVKSLDTSMYVKEFLISSSQDGHQWTLFFQNGKVKVFQGNQDSFTPVVNSLDPPLLTRYLRIHPQSWVHQIALRMEVLGCEAQDLY

SEQ ID NO: 523 - DNA, 4371 bp, synthetic construct
  misc_feature 1..4371: note = Variant of human B-domain deleted Factor VIII
  source 1..4371: mol_type = other DNA
atgcagattgaactgtctacctgcttcttcctctgtttgctgaggttctgctttagcgccactagacggtactaccttggcgctgtggagctgtcctgggactatatgcagagtgatttgggagagcttcccgtcgacgcacgatttcctcctcgcgttccaaagtcatttcccttcaacacaagcgtggtgtacaagaagacgctcttcgtcgaattcaccgatcacctgttcaatatcgccaaacccagaccaccatggatgggtcttttggggcctaccatacaagcggaggtgtatgacacagttgttatcactctcaagaacatggcttctcatccggtaagtcttcacgcagtgggcgtgtcctactggaaagcttcagaaggagccgagtatgatgatcagacatcccagagggagaaagaagacgacaaggtatttccaggtgggtctcatacctatgtgtggcaagtgctcaaagagaatggccctatggcaagcgatccgctctgtttgacttacagctacctttcacacgttgacctcgtcaaggacctcaactccgggttgattggagccttgttggtatgcagggaaggatctcttgccaaagagaagacacagaccctccacaagtttatccttctctttgctgtgttcgatgagggcaaaagttggcatagcgaaacgaagaattccctcatgcaggatcgcgacgcagccagcgccagagcttggcccaagatgcacactgtgaacggatatgtcaataggtcacttcctggcttgattgggtgtcatcggaaaagtgtctactggcacgtgatcggaatggggacaacaccagaggtccactccatatttctcgaaggccataccttccttgttcgaaaccacagacaggcatccttggagatctctcccattacctttctcactgcccaaacgctccttatggacttgggtcagttccttctcttctgccatatcagctcacaccagcatgatggtatggaagcttatgtgaaagtcgacagttgtcctgaggagccacagttgcgcatgaagaataatgaagaagccgaggattacgacgacgatctcaccgattctgagatggacgtggtgaggtttgatgacgacaactctccctccttcattcaaatccggagcgtggcgaagaaacaccccaagacttgggtccactatatagcggcggaagaggaggattgggattacgctcctcttgtattggcaccagatgaccgctcatacaaaagccagtacctcaacaacggaccgcagagaattggccggaagtataagaaagtgcgatttatggcctatacagacgaaacctttaagacaagggaggccatccagcatgagagtgggattttgggacctcttctttacggcgaagttggtgataccctcctcatcatcttcaagaatcaagcttctcgcccctataacatttacccacacgggatcactgacgttaggcctttgtatagcagaagacttcccaaaggcgtgaagcatctcaaagacttccccattttgccaggcgagatctttaagtacaaatggaccgtcacagtggaagatggaccgactaaatcagaccctcgatgccttacgcggtactattcctccttcgtgaatatggagagagatttggcaagcggactcataggaccactcctcatctgttacaaggaatctgtagaccagaggggtaaccagattatgagtgataaacgcaatgtgatcctttttagcgtcttcgacgagaaccggtcctggtacttgaccgagaatatacaaaggttccttcccaaccccgcaggcgttcagttggaagaccctgagtttcaggccagcaatattatgcactcaatcaacggctatgtgtttgatagtctccagctttctgtttgcctccatgaagtagcctattggtacatcttgtcaattggtgctcaaacagacttcctctccgtcttcttctccggctacacctttaagcacaagatggtgtatgaggacactctcacactctttccattttctggagaaaccgtgttcatgagcatggagaatccaggcctttggatcttgggttgccacaacagtgattttcgcaatcggggaatgactgctctcctcaaagtcagcagctgtgataagaacacaggcgactattacgaagattcttacgaggacataagtgccggtttgttgtccaagaataacgccattgagcccagatcattctcccagaatcctcccgtgcttaaaaggcatcagcgcgaaatcaccagaactactcttcagtctgatcaagaggagattgactatgacgacaccataagcgtggaaatgaagaaggaggatttcgatatctatgacgaagatgagaaccagtctccgcggagctttcagaagaagacgcgacactacttcattgcagcagtcgaaaggctttgggactacggtatgtcatcatcccctcatgtgttgcgcaatagagctcagagtggaagtgttccacagttcaagaaagtcgtctttcaagagtttacagatggcagcttcacacagcctctctatcggggcgagcttaacgaacatttgggactccttggtccctatatccgagccgaagtggaggacaacattatggttacctttaggaatcaagcctctcgcccctacagcttctactcctccctcatcagttatgaggaggatcagagacaaggcgctgaaccacggaagaactttgtgaaaccgaatgagacgaagacctacttctggaaagtacagcaccacatggcccccacaaaagacgaattcgattgcaaagcatgggcgtatttttcagacgttgacttggagaaagatgtacattcaggacttattggtcctttgttggtgtgtcacactaacactctcaatccagcccatggcaggcaggtgacagtccaggaattcgctcttttctttaccatctttgatgagaccaagtcctggtacttcacggaaaacatggagcgcaattgcagagccccctgtaacatacagatggaggaccctacctttaaggaaaattatcggttccacgcaatcaacggatacattatggatacactccctggccttgtgatggctcaggaccaacgaatcaggtggtacctcctcagcatgggttctaatgagaacatacactccattcacttttcaggacatgtgttcactgtccggaagaaagaagagtataagatggccctctacaatttgtatccaggcgtgtttgagaccgttgaaatgcttccctctaaagctggcatctggagagtagagtgcttgatcggagaacatcttcacgcaggtatgagcaccttgttcctcgtgtacagcaacaaatgtcagaccccacttggcatggccagtggacacattcgcgactttcagatcacagcatctggccagtatggacaatgggccccaaagttggctcgcctccattactccggtagcataaatgcgtggtccactaaagaacctttcagctggattaaggtcgatcttcttgcccccatgatcatccacggcattaagacacagggagcgaggcagaaattctcctccctctacatctcacagttcattattatgtatagtttggacggcaagaagtggcaaacttatagaggtaacagtactggaacactcatggtgttcttcggcaacgttgatagctctggcatcaaacacaacatctttaatcctcccataatagctcggtacatcagattgcatccgacccactacagcattaggagtacactccgaatggagcttatgggttgcgacttgaattcctgttcaatgccactcggaatggagtctaaagccatctctgatgcacagataaccgccagtagctactttacgaacatgtttgctacgtggtcaccctctaaggcaaggcttcatttgcaaggccggtctaatgcctggagacctcaggtgaacaacccgaaagaatggctccaggtggactttcagaagaccatgaaagtaacaggtgtcactactcagggagttaagtccttggataccagcatgtatgtgaaggagttccttatttcctcatcacaagatggccaccagtggaccctcttctttcagaatggtaaggtcaaagtgtttcagggcaatcaagacagcttcacacccgtggtgaacagtcttgatcctccactcttgacacgataccttcgaatccatccacagtcttgggttcaccagattgcattgcgcatggaagtacttggatgcgaggctcaggacctctac

SEQ ID NO: 524 - protein, 1457 aa, synthetic construct
  REGION 1..1457: note = Variant of human B-domain deleted Factor VIII
MQIELSTCFFLCLLRFCFSATRRYYLGAVELSWDYMQSDLGELPVDARFPPRVPKSFPFNTSVVYKKTLFVEFTDHLFNIAKPRPPWMGLLGPTIQAEVYDTVVITLKNMASHPVSLHAVGVSYWKASEGAEYDDQTSQREKEDDKVFPGGSHTYVWQVLKENGPMASDPLCLTYSYLSHVDLVKDLNSGLIGALLVCREGSLAKEKTQTLHKFILLFAVFDEGKSWHSETKNSLMQDRDAASARAWPKMHTVNGYVNRSLPGLIGCHRKSVYWHVIGMGTTPEVHSIFLEGHTFLVRNHRQASLEISPITFLTAQTLLMDLGQFLLFCHISSHQHDGMEAYVKVDSCPEEPQLRMKNNEEAEDYDDDLTDSEMDVVRFDDDNSPSFIQIRSVAKKHPKTWVHYIAAEEEDWDYAPLVLAPDDRSYKSQYLNNGPQRIGRKYKKVRFMAYTDETFKTREAIQHESGILGPLLYGEVGDTLLIIFKNQASRPYNIYPHGITDVRPLYSRRLPKGVKHLKDFPILPGEIFKYKWTVTVEDGPTKSDPRCLTRYYSSFVNMERDLASGLIGPLLICYKESVDQRGNQIMSDKRNVILFSVFDENRSWYLTENIQRFLPNPAGVQLEDPEFQASNIMHSINGYVFDSLQLSVCLHEVAYWYILSIGAQTDFLSVFFSGYTFKHKMVYEDTLTLFPFSGETVFMSMENPGLWILGCHNSDFRNRGMTALLKVSSCDKNTGDYYEDSYEDISAGLLSKNNAIEPRSFSQNPPVLKRHQREITRTTLQSDQEEIDYDDTISVEMKKEDFDIYDEDENQSPRSFQKKTRHYFIAAVERLWDYGMSSSPHVLRNRAQSGSVPQFKKVVFQEFTDGSFTQPLYRGELNEHLGLLGPYIRAEVEDNIMVTFRNQASRPYSFYSSLISYEEDQRQGAEPRKNFVKPNETKTYFWKVQHHMAPTKDEFDCKAWAYFSDVDLEKDVHSGLIGPLLVCHTNTLNPAHGRQVTVQEFALFFTIFDETKSWYFTENMERNCRAPCNIQMEDPTFKENYRFHAINGYIMDTLPGLVMAQDQRIRWYLLSMGSNENIHSIHFSGHVFTVRKKEEYKMALYNLYPGVFETVEMLPSKAGIWRVECLIGEHLHAGMSTLFLVYSNKCQTPLGMASGHIRDFQITASGQYGQWAPKLARLHYSGSINAWSTKEPFSWIKVDLLAPMIIHGIKTQGARQKFSSLYISQFIIMYSLDGKKWQTYRGNSTGTLMVFFGNVDSSGIKHNIFNPPIIARYIRLHPTHYSIRSTLRMELMGCDLNSCSMPLGMESKAISDAQITASSYFTNMFATWSPSKARLHLQGRSNAWRPQVNNPKEWLQVDFQKTMKVTGVTTQGVKSLDTSMYVKEFLISSSQDGHQWTLFFQNGKVKVFQGNQDSFTPVVNSLDPPLLTRYLRIHPQSWVHQIALRMEVLGCEAQDLY

SEQ ID NO: 525 - DNA, 4371 bp, synthetic construct
  misc_feature 1..4371: note = Variant of human B-domain deleted Factor VIII
  source 1..4371: mol_type = other DNA
atgcagattgaactgtctacctgcttcttcctctgtttgctgaggttctgctttagcgccactagacggtactaccttggcgctgtggagctgtcctgggactatatgcagagtgatttgggagagcttcccgtcgacgcacgatttcctcctcgcgttccaaagtcatttcccttcaacacaagcgtggtgtacaagaagacgctcttcgtcgaattcaccgatcacctgttcaatatcgccaaacccagaccaccatggatgggtcttttggggcctaccatacaagcggaggtgtatgacacagttgttatcactctcaagaacatggcttctcatccggtaagtcttcacgcagtgggcgtgtcctactggaaagcttcagaaggagccgagtatgatgatcagacatcccagagggagaaagaagacgacaaggtatttccaggtgggtctcatacctatgtgtggcaagtgctcaaagagaatggccctatggcaagcgatccgctctgtttgacttacagctacctttcacacgttgacctcgtcaaggacctcaactccgggttgattggagccttgttggtatgcagggaaggatctcttgccaaagagaagacacagaccctccacaagtttatccttctctttgctgtgttcgatgagggcaaaagttggcatagcgaaacgaagaattccctcatgcaggatcgcgacgcagccagcgccagagcttggcccaagatgcacactgtgaacggatatgtcaataggtcacttcctggcttgattgggtgtcatcggaaaagtgtctactggcacgtgatcggaatggggacaacaccagaggtccactccatatttctcgaaggccataccttccttgttcgaaaccacagacaggcatccttggagatctctcccattacctttctcactgcccaaacgctccttatggacttgggtcagttccttctcttctgccatatcagctcacaccagcatgatggtatggaagcttatgtgaaagtcgacagttgtcctgaggagccacagttgcgcatgaagaataatgaagaagccgaggattacgacgacgatctcaccgattctgagatggacgtggtgaggtttgatgacgacaactctccctccttcattcaaatccggagcgtggcgaagaaacaccccaagacttgggtccactatatagcggcggaagaggaggattgggattacgctcctcttgtattggcaccagatgaccgctcatacaaaagccagtacctcaacaacggaccgcagagaattggccggaagtataagaaagtgcgatttatggcctatacagacgaaacctttaagacaagggaggccatccagcatgagagtgggattttgggacctcttctttacggcgaagttggtgataccctcctcatcatcttcaagaatcaagcttctcgcccctataacatttacccacacgggatcactgacgttaggcctttgtatagcagaagacttcccaaaggcgtgaagcatctcaaagacttccccattttgccaggcgagatctttaagtacaaatggaccgtcacagtggaagatggaccgactaaatcagaccctcgatgccttacgcggtactattcctccttcgtgaatatggagagagatttggcaagcggactcataggaccactcctcatctgttacaaggaatctgtagaccagaggggtaaccagattatgagtgataaacgcaatgtgatcctttttagcgtcttcgacgagaaccggtcctggtacttgaccgagaatatacaaaggttccttcccaaccccgcaggcgttcagttggaagaccctgagtttcaggccagcaatattatgcactcaatcaacggctatgtgtttgatagtctccagctttctgtttgcctccatgaagtagcctattggtacatcttgtcaattggtgctcaaacagacttcctctccgtcttcttctccggctacacctttaagcacaagatggtgtatgaggacactctcacactctttccattttctggagaaaccgtgttcatgagcatggagaatccaggcctttggatcttgggttgccacaacagtgattttcgcaatcggggaatgactgctctcctcaaagtcagcagctgtgataagaacacaggcgactattacgaagattcttacgaggacataagtgcctacttgttgtccaagaataacgccccggagcccagatcattctcccagaatcctcccgtgcttaaaaggcatcagcgcgaaatcaccagaactactcttcagtctgatcaagaggagattgactatgacgacaccataagcgtggaaatgaagaaggaggatttcgatatctatgacgaagatgagaaccagtctccgcggagctttcagaagaagacgcgacactacttcattgcagcagtcgaaaggctttgggactacggtatgtcatcatcccctcatgtgttgcgcaatagagctcagagtggaagtgttccacagttcaagaaagtcgtctttcaagagtttacagatggcagcttcacacagcctctctatcggggcgagcttaacgaacatttgggactccttggtccctatatccgagccgaagtggaggacaacattatggttacctttaggaatcaagcctctcgcccctacagcttctactcctccctcatcagttatgaggaggatcagagacaaggcgctgaaccacggaagaactttgtgaaaccgaatgagacgaagacctacttctggaaagtacagcaccacatggcccccacaaaagacgaattcgattgcaaagcatgggcgtatttttcagacgttgacttggagaaagatgtacattcaggacttattggtcctttgttggtgtgtcacactaacactctcaatccagcccatggcaggcaggtgacagtccaggaattcgctcttttctttaccatctttgatgagaccaagtcctggtacttcacggaaaacatggagcgcaattgcagagccccctgtaacatacagatggaggaccctacctttaaggaaaattatcggttccacgcaatcaacggatacattatggatacactccctggccttgtgatggctcaggaccaacgaatcaggtggtacctcctcagcatgggttctaatgagaacatacactccattcacttttcaggacatgtgttcactgtccggaagaaagaagagtataagatggccctctacaatttgtatccaggcgtgtttgagaccgttgaaatgcttccctctaaagctggcatctggagagtagagtgcttgatcggagaacatcttcacgcaggtatgagcaccttgttcctcgtgtacagcaacaaatgtcagaccccacttggcatggccagtggacacattcgcgactttcagatcacagcatctggccagtatggacaatgggccccaaagttggctcgcctccattactccggtagcataaatgcgtggtccactaaagaacctttcagctggattaaggtcgatcttcttgcccccatgatcatccacggcattaagacacagggagcgaggcagaaattctcctccctctacatctcacagttcattattatgtatagtttggacggcaagaagtggcaaacttatagaggtaacagtactggaacactcatggtgttcttcggcaacgttgatagctctggcatcaaacacaacatctttaatcctcccataatagctcggtacatcagattgcatccgacccactacagcattaggagtacactccgaatggagcttatgggttgcgacttgaattcctgttcaatgccactcggaatggagtctaaagccatctctgatgcacagataaccgccagtagctactttacgaacatgtttgctacgtggtcaccctctaaggcaaggcttcatttgcaaggccggtctaatgcctggagacctcaggtgaacaacccgaaagaatggctccaggtggactttcagaagaccatgaaagtaacaggtgtcactactcagggagttaagtccttggataccagcatgtatgtgaaggagttccttatttcctcatcacaagatggccaccagtggaccctcttctttcagaatggtaaggtcaaagtgtttcagggcaatcaagacagcttcacacccgtggtgaacagtcttgatcctccactcttgacacgataccttcgaatccatccacagtcttgggttcaccagattgcattgcgcatggaagtacttggatgcgaggctcaggacctctac

SEQ ID NO: 526 - protein, 1457 aa, synthetic construct
  REGION 1..1457: note = Variant of human B-domain deleted Factor VIII
MQIELSTCFFLCLLRFCFSATRRYYLGAVELSWDYMQSDLGELPVDARFPPRVPKSFPFNTSVVYKKTLFVEFTDHLFNIAKPRPPWMGLLGPTIQAEVYDTVVITLKNMASHPVSLHAVGVSYWKASEGAEYDDQTSQREKEDDKVFPGGSHTYVWQVLKENGPMASDPLCLTYSYLSHVDLVKDLNSGLIGALLVCREGSLAKEKTQTLHKFILLFAVFDEGKSWHSETKNSLMQDRDAASARAWPKMHTVNGYVNRSLPGLIGCHRKSVYWHVIGMGTTPEVHSIFLEGHTFLVRNHRQASLEISPITFLTAQTLLMDLGQFLLFCHISSHQHDGMEAYVKVDSCPEEPQLRMKNNEEAEDYDDDLTDSEMDVVRFDDDNSPSFIQIRSVAKKHPKTWVHYIAAEEEDWDYAPLVLAPDDRSYKSQYLNNGPQRIGRKYKKVRFMAYTDETFKTREAIQHESGILGPLLYGEVGDTLLIIFKNQASRPYNIYPHGITDVRPLYSRRLPKGVKHLKDFPILPGEIFKYKWTVTVEDGPTKSDPRCLTRYYSSFVNMERDLASGLIGPLLICYKESVDQRGNQIMSDKRNVILFSVFDENRSWYLTENIQRFLPNPAGVQLEDPEFQASNIMHSINGYVFDSLQLSVCLHEVAYWYILSIGAQTDFLSVFFSGYTFKHKMVYEDTLTLFPFSGETVFMSMENPGLWILGCHNSDFRNRGMTALLKVSSCDKNTGDYYEDSYEDISAYLLSKNNAPEPRSFSQNPPVLKRHQREITRTTLQSDQEEIDYDDTISVEMKKEDFDIYDEDENQSPRSFQKKTRHYFIAAVERLWDYGMSSSPHVLRNRAQSGSVPQFKKVVFQEFTDGSFTQPLYRGELNEHLGLLGPYIRAEVEDNIMVTFRNQASRPYSFYSSLISYEEDQRQGAEPRKNFVKPNETKTYFWKVQHHMAPTKDEFDCKAWAYFSDVDLEKDVHSGLIGPLLVCHTNTLNPAHGRQVTVQEFALFFTIFDETKSWYFTENMERNCRAPCNIQMEDPTFKENYRFHAINGYIMDTLPGLVMAQDQRIRWYLLSMGSNENIHSIHFSGHVFTVRKKEEYKMALYNLYPGVFETVEMLPSKAGIWRVECLIGEHLHAGMSTLFLVYSNKCQTPLGMASGHIRDFQITASGQYGQWAPKLARLHYSGSINAWSTKEPFSWIKVDLLAPMIIHGIKTQGARQKFSSLYISQFIIMYSLDGKKWQTYRGNSTGTLMVFFGNVDSSGIKHNIFNPPIIARYIRLHPTHYSIRSTLRMELMGCDLNSCSMPLGMESKAISDAQITASSYFTNMFATWSPSKARLHLQGRSNAWRPQVNNPKEWLQVDFQKTMKVTGVTTQGVKSLDTSMYVKEFLISSSQDGHQWTLFFQNGKVKVFQGNQDSFTPVVNSLDPPLLTRYLRIHPQSWVHQIALRMEVLGCEAQDLY

SEQ ID NO: 527 - DNA, 4371 bp, synthetic construct
  misc_feature 1..4371: note = Variant of human B-domain deleted Factor VIII
  source 1..4371: mol_type = other DNA
atgcagattgaactgtctacctgcttcttcctctgtttgctgaggttctgctttagcgccactagacggtactaccttggcgctgtggagctgtcctgggactatatgcagagtgatttgggagagcttcccgtcgacgcacgatttcctcctcgcgttccaaagtcatttcccttcaacacaagcgtggtgtacaagaagacgctcttcgtcgaattcaccgatcacctgttcaatatcgccaaacccagaccaccatggatgggtcttttggggcctaccatacaagcggaggtgtatgacacagttgttatcactctcaagaacatggcttctcatccggtaagtcttcacgcagtgggcgtgtcctactggaaagcttcagaaggagccgagtatgatgatcagacatcccagagggagaaagaagacgacaaggtatttccaggtgggtctcatacctatgtgtggcaagtgctcaaagagaatggccctatggcaagcgatccgctctgtttgacttacagctacctttcacacgttgacctcgtcaaggacctcaactccgggttgattggagccttgttggtatgcagggaaggatctcttgccaaagagaagacacagaccctccacaagtttatccttctctttgctgtgttcgatgagggcaaaagttggcatagcgaaacgaagaattccctcatgcaggatcgcgacgcagccagcgccagagcttggcccaagatgcacactgtgaacggatatgtcaataggtcacttcctggcttgattgggtgtcatcggaaaagtgtctactggcacgtgatcggaatggggacaacaccagaggtccactccatatttctcgaaggccataccttccttgttcgaaaccacagacaggcatccttggagatctctcccattacctttctcactgcccaaacgctccttatggacttgggtcagttccttctcttctgccatatcagctcacaccagcatgatggtatggaagcttatgtgaaagtcgacagttgtcctgaggagccacagttgcgcatgaagaataatgaagaagccgaggattacgacgacgatctcaccgattctgagatggacgtggtgaggtttgatgacgacaactctccctccttcattcaaatccggagcgtggcgaagaaacaccccaagacttgggtccactatatagcggcggaagaggaggattgggattacgctcctcttgtattggcaccagatgaccgctcatacaaaagccagtacctcaacaacggaccgcagagaattggccggaagtataagaaagtgcgatttatggcctatacagacgaaacctttaagacaagggaggccatccagcatgagagtgggattttgggacctcttctttacggcgaagttggtgataccctcctcatcatcttcaagaatcaagcttctcgcccctataacatttacccacacgggatcactgacgttaggcctttgtatagcagaagacttcccaaaggcgtgaagcatctcaaagacttccccattttgccaggcgagatctttaagtacaaatggaccgtcacagtggaagatggaccgactaaatcagaccctcgatgccttacgcggtactattcctccttcgtgaatatggagagagatttggcaagcggactcataggaccactcctcatctgttacaaggaatctgtagaccagaggggtaaccagattatgagtgataaacgcaatgtgatcctttttagcgtcttcgacgagaaccggtcctggtacttgaccgagaatatacaaaggttccttcccaaccccgcaggcgttcagttggaagaccctgagtttcaggccagcaatattatgcactcaatcaacggctatgtgtttgatagtctccagctttctgtttgcctccatgaagtagcctattggtacatcttgtcaattggtgctcaaacagacttcctctccgtcttcttctccggctacacctttaagcacaagatggtgtatgaggacactctcacactctttccattttctggagaaaccgtgttcatgagcatggagaatccaggcctttggatcttgggttgccacaacagtgattttcgcaatcggggaatgactgctctcctcaaagtcagcagctgtgataagaacacaggcgactattacgaagattcttacgaggacataagtgcctttttgttgtccaagaataacgccattgagcccagatcattctcccagaatcctcccgtgcttaaaaggcatcagcgcgaaatcaccagaactactcttcagtctgatcaagaggagattgactatgacgacaccataagcgtggaaatgaagaaggaggatttcgatatctatgacgaagatgagaaccagtctccgcggagctttcagaagaagacgcgacactacttcattgcagcagtcgaaaggctttgggactacggtatgtcatcatcccctcatgtgttgcgcaatagagctcagagtggaagtgttccacagttcaagaaagtcgtctttcaagagtttacagatggcagcttcacacagcctctctatcggggcgagcttaacgaacatttgggactccttggtccctatatccgagccgaagtggaggacaacattatggttacctttaggaatcaagcctctcgcccctacagcttctactcctccctcatcagttatgaggaggatcagagacaaggcgctgaaccacggaagaactttgtgaaaccgaatgagacgaagacctacttctggaaagtacagcaccacatggcccccacaaaagacgaattcgattgcaaagcatgggcgtatttttcagacgttgacttggagaaagatgtacattcaggacttattggtcctttgttggtgtgtcacactaacactctcaatccagcccatggcaggcaggtgacagtccaggaattcgctcttttctttaccatctttgatgagaccaagtcctggtacttcacggaaaacatggagcgcaattgcagagccccctgtaacatacagatggaggaccctacctttaaggaaaattatcggttccacgcaatcaacggatacattatggatacactccctggccttgtgatggctcaggaccaacgaatcaggtggtacctcctcagcatgggttctaatgagaacatacactccattcacttttcaggacatgtgttcactgtccggaagaaagaagagtataagatggccctctacaatttgtatccaggcgtgtttgagaccgttgaaatgcttccctctaaagctggcatctggagagtagagtgcttgatcggagaacatcttcacgcaggtatgagcaccttgttcctcgtgtacagcaacaaatgtcagaccccacttggcatggccagtggacacattcgcgactttcagatcacagcatctggccagtatggacaatgggccccaaagttggctcgcctccattactccggtagcataaatgcgtggtccactaaagaacctttcagctggattaaggtcgatcttcttgcccccatgatcatccacggcattaagacacagggagcgaggcagaaattctcctccctctacatctcacagttcattattatgtatagtttggacggcaagaagtggcaaacttatagaggtaacagtactggaacactcatggtgttcttcggcaacgttgatagctctggcatcaaacacaacatctttaatcctcccataatagctcggtacatcagattgcatccgacccactacagcattaggagtacactccgaatggagcttatgggttgcgacttgaattcctgttcaatgccactcggaatggagtctaaagccatctctgatgcacagataaccgccagtagctactttacgaacatgtttgctacgtggtcaccctctaaggcaaggcttcatttgcaaggccggtctaatgcctggagacctcaggtgaacaacccgaaagaatggctccaggtggactttcagaagaccatgaaagtaacaggtgtcactactcagggagttaagtccttggataccagcatgtatgtgaaggagttccttatttcctcatcacaagatggccaccagtggaccctcttctttcagaatggtaaggtcaaagtgtttcagggcaatcaagacagcttcacacccgtggtgaacagtcttgatcctccactcttgacacgataccttcgaatccatccacagtcttgggttcaccagattgcattgcgcatggaagtacttggatgcgaggctcaggacctctac

SEQ ID NO: 528 - protein, 1457 aa, synthetic construct
  REGION 1..1457: note = Variant of human B-domain deleted Factor VIII
MQIELSTCFFLCLLRFCFSATRRYYLGAVELSWDYMQSDLGELPVDARFPPRVPKSFPFNTSVVYKKTLFVEFTDHLFNIAKPRPPWMGLLGPTIQAEVYDTVVITLKNMASHPVSLHAVGVSYWKASEGAEYDDQTSQREKEDDKVFPGGSHTYVWQVLKENGPMASDPLCLTYSYLSHVDLVKDLNSGLIGALLVCREGSLAKEKTQTLHKFILLFAVFDEGKSWHSETKNSLMQDRDAASARAWPKMHTVNGYVNRSLPGLIGCHRKSVYWHVIGMGTTPEVHSIFLEGHTFLVRNHRQASLEISPITFLTAQTLLMDLGQFLLFCHISSHQHDGMEAYVKVDSCPEEPQLRMKNNEEAEDYDDDLTDSEMDVVRFDDDNSPSFIQIRSVAKKHPKTWVHYIAAEEEDWDYAPLVLAPDDRSYKSQYLNNGPQRIGRKYKKVRFMAYTDETFKTREAIQHESGILGPLLYGEVGDTLLIIFKNQASRPYNIYPHGITDVRPLYSRRLPKGVKHLKDFPILPGEIFKYKWTVTVEDGPTKSDPRCLTRYYSSFVNMERDLASGLIGPLLICYKESVDQRGNQIMSDKRNVILFSVFDENRSWYLTENIQRFLPNPAGVQLEDPEFQASNIMHSINGYVFDSLQLSVCLHEVAYWYILSIGAQTDFLSVFFSGYTFKHKMVYEDTLTLFPFSGETVFMSMENPGLWILGCHNSDFRNRGMTALLKVSSCDKNTGDYYEDSYEDISAFLLSKNNAIEPRSFSQNPPVLKRHQREITRTTLQSDQEEIDYDDTISVEMKKEDFDIYDEDENQSPRSFQKKTRHYFIAAVERLWDYGMSSSPHVLRNRAQSGSVPQFKKVVFQEFTDGSFTQPLYRGELNEHLGLLGPYIRAEVEDNIMVTFRNQASRPYSFYSSLISYEEDQRQGAEPRKNFVKPNETKTYFWKVQHHMAPTKDEFDCKAWAYFSDVDLEKDVHSGLIGPLLVCHTNTLNPAHGRQVTVQEFALFFTIFDETKSWYFTENMERNCRAPCNIQMEDPTFKENYRFHAINGYIMDTLPGLVMAQDQRIRWYLLSMGSNENIHSIHFSGHVFTVRKKEEYKMALYNLYPGVFETVEMLPSKAGIWRVECLIGEHLHAGMSTLFLVYSNKCQTPLGMASGHIRDFQITASGQYGQWAPKLARLHYSGSINAWSTKEPFSWIKVDLLAPMIIHGIKTQGARQKFSSLYISQFIIMYSLDGKKWQTYRGNSTGTLMVFFGNVDSSGIKHNIFNPPIIARYIRLHPTHYSIRSTLRMELMGCDLNSCSMPLGMESKAISDAQITASSYFTNMFATWSPSKARLHLQGRSNAWRPQVNNPKEWLQVDFQKTMKVTGVTTQGVKSLDTSMYVKEFLISSSQDGHQWTLFFQNGKVKVFQGNQDSFTPVVNSLDPPLLTRYLRIHPQSWVHQIALRMEVLGCEAQDLY

SEQ ID NO: 529 - DNA, 4371 bp, synthetic construct
  misc_feature 1..4371: note = Variant of human B-domain deleted Factor VIII
  source 1..4371: mol_type = other DNA
atgcagattgaactgtctacctgcttcttcctctgtttgctgaggttctgctttagcgccactagacggtactaccttggcgctgtggagctgtcctgggactatatgcagagtgatttgggagagcttcccgtcgacgcacgatttcctcctcgcgttccaaagtcatttcccttcaacacaagcgtggtgtacaagaagacgctcttcgtcgaattcaccgatcacctgttcaatatcgccaaacccagaccaccatggatgggtcttttggggcctaccatacaagcggaggtgtatgacacagttgttatcactctcaagaacatggcttctcatccggtaagtcttcacgcagtgggcgtgtcctactggaaagcttcagaaggagccgagtatgatgatcagacatcccagagggagaaagaagacgacaaggtatttccaggtgggtctcatacctatgtgtggcaagtgctcaaagagaatggccctatggcaagcgatccgctctgtttgacttacagctacctttcacacgttgacctcgtcaaggacctcaactccgggttgattggagccttgttggtatgcagggaaggatctcttgccaaagagaagacacagaccctccacaagtttatccttctctttgctgtgttcgatgagggcaaaagttggcatagcgaaacgaagaattccctcatgcaggatcgcgacgcagccagcgccagagcttggcccaagatgcacactgtgaacggatatgtcaataggtcacttcctggcttgattgggtgtcatcggaaaagtgtctactggcacgtgatcggaatggggacaacaccagaggtccactccatatttctcgaaggccataccttccttgttcgaaaccacagacaggcatccttggagatctctcccattacctttctcactgcccaaacgctccttatggacttgggtcagttccttctcttctgccatatcagctcacaccagcatgatggtatggaagcttatgtgaaagtcgacagttgtcctgaggagccacagttgcgcatgaagaataatgaagaagccgaggattacgacgacgatctcaccgattctgagatggacgtggtgaggtttgatgacgacaactctccctccttcattcaagctcggagcgtggcgaagaaacaccccaagacttgggtccactatatagcggcggaagaggaggattgggattacgctcctcttgtattggcaccagatgaccgctcatacaaaagccagtacctcaacaacggaccgcagagaattggccggaagtataagaaagtgcgatttatggcctatacagacgaaacctttaagacaagggaggccatccagcatgagagtgggattttgggacctcttctttacggcgaagttggtgataccctcctcatcatcttcaagaatcaagcttctcgcccctataacatttacccacacgggatcactgacgttaggcctttgtatagcagaagacttcccaaaggcgtgaagcatctcaaagacttccccattttgccaggcgagatctttaagtacaaatggaccgtcacagtggaagatggaccgactaaatcagaccctcgatgccttacgcggtactattcctccttcgtgaatatggagagagatttggcaagcggactcataggaccactcctcatctgttacaaggaatctgtagaccagaggggtaaccagattatgagtgataaacgcaatgtgatcctttttagcgtcttcgacgagaaccggtcctggtacttgaccgagaatatacaaaggttccttcccaaccccgcaggcgttcagttggaagaccctgagtttcaggccagcaatattatgcactcaatcaacggctatgtgtttgatagtctccagctttctgtttgcctccatgaagtagcctattggtacatcttgtcaattggtgctcaaacagacttcctctccgtcttcttctccggctacacctttaagcacaagatggtgtatgaggacactctcacactctttccattttctggagaaaccgtgttcatgagcatggagaatccaggcctttggatcttgggttgccacaacagtgattttcgcaatcggggaatgactgctctcctcaaagtcagcagctgtgataagaacacaggcgactattacgaagattcttacgaggacataagtgcctacttgttgtccaagaataacgccattgagcccagatcattctcccagaatcctcccgtgcttaaaaggcatcagcgcgaaatcaccagaactactcttcagtctgatcaagaggagattgactatgacgacaccataagcgtggaaatgaagaaggaggatttcgatatctatgacgaagatgagaaccagtctccgcggagctttcagaagaagacgcgacactacttcattgcagcagtcgaaaggctttgggactacggtatgtcatcatcccctcatgtgttgcgcaatagagctcagagtggaagtgttccacagttcaagaaagtcgtctttcaagagtttacagatggcagcttcacacagcctctctatcggggcgagcttaacgaacatttgggactccttggtccctatatccgagccgaagtggaggacaacattatggttacctttaggaatcaagcctctcgcccctacagcttctactcctccctcatcagttatgaggaggatcagagacaaggcgctgaaccacggaagaactttgtgaaaccgaatgagacgaagacctacttctggaaagtacagcaccacatggcccccacaaaagacgaattcgattgcaaagcatgggcgtatttttcagacgttgacttggagaaagatgtacattcaggacttattggtcctttgttggtgtgtcacactaacactctcaatccagcccatggcaggcaggtgacagtccaggaattcgctcttttctttaccatctttgatgagaccaagtcctggtacttcacggaaaacatggagcgcaattgcagagccccctgtaacatacagatggaggaccctacctttaaggaaaattatcggttccacgcaatcaacggatacattatggatacactccctggccttgtgatggctcaggaccaacgaatcaggtggtacctcctcagcatgggttctaatgagaacatacactccattcacttttcaggacatgtgttcactgtccggaagaaagaagagtataagatggccctctacaatttgtatccaggcgtgtttgagaccgttgaaatgcttccctctaaagctggcatctggagagtagagtgcttgatcggagaacatcttcacgcaggtatgagcaccttgttcctcgtgtacagcaacaaatgtcagaccccacttggcatggccagtggacacattcgcgactttcagatcacagcatctggccagtatggacaatgggccccaaagttggctcgcctccattactccggtagcataaatgcgtggtccactaaagaacctttcagctggattaaggtcgatcttcttgcccccatgatcatccacggcattaagacacagggagcgaggcagaaattctcctccctctacatctcacagttcattattatgtatagtttggacggcaagaagtggcaaacttatagaggtaacagtactggaacactcatggtgttcttcggcaacgttgatagctctggcatcaaacacaacatctttaatcctcccataatagctcggtacatcagattgcatccgacccactacagcattaggagtacactccgaatggagcttatgggttgcgacttgaattcctgttcaatgccactcggaatggagtctaaagccatctctgatgcacagataaccgccagtagctactttacgaacatgtttgctacgtggtcaccctctaaggcaaggcttcatttgcaaggccggtctaatgcctggagacctcaggtgaacaacccgaaagaatggctccaggtggactttcagaagaccatgaaagtaacaggtgtcactactcagggagttaagtccttggataccagcatgtatgtgaaggagttccttatttcctcatcacaagatggccaccagtggaccctcttctttcagaatggtaaggtcaaagtgtttcagggcaatcaagacagcttcacacccgtggtgaacagtcttgatcctccactcttgacacgataccttcgaatccatccacagtcttgggttcaccagattgcattgcgcatggaagtacttggatgcgaggctcaggacctctac

SEQ ID NO: 530 - protein, 1457 aa, synthetic construct
  REGION 1..1457: note = Variant of human B-domain deleted Factor VIII
MQIELSTCFFLCLLRFCFSATRRYYLGAVELSWDYMQSDLGELPVDARFPPRVPKSFPFNTSVVYKKTLFVEFTDHLFNIAKPRPPWMGLLGPTIQAEVYDTVVITLKNMASHPVSLHAVGVSYWKASEGAEYDDQTSQREKEDDKVFPGGSHTYVWQVLKENGPMASDPLCLTYSYLSHVDLVKDLNSGLIGALLVCREGSLAKEKTQTLHKFILLFAVFDEGKSWHSETKNSLMQDRDAASARAWPKMHTVNGYVNRSLPGLIGCHRKSVYWHVIGMGTTPEVHSIFLEGHTFLVRNHRQASLEISPITFLTAQTLLMDLGQFLLFCHISSHQHDGMEAYVKVDSCPEEPQLRMKNNEEAEDYDDDLTDSEMDVVRFDDDNSPSFIQARSVAKKHPKTWVHYIAAEEEDWDYAPLVLAPDDRSYKSQYLNNGPQRIGRKYKKVRFMAYTDETFKTREAIQHESGILGPLLYGEVGDTLLIIFKNQASRPYNIYPHGITDVRPLYSRRLPKGVKHLKDFPILPGEIFKYKWTVTVEDGPTKSDPRCLTRYYSSFVNMERDLASGLIGPLLICYKESVDQRGNQIMSDKRNVILFSVFDENRSWYLTENIQRFLPNPAGVQLEDPEFQASNIMHSINGYVFDSLQLSVCLHEVAYWYILSIGAQTDFLSVFFSGYTFKHKMVYEDTLTLFPFSGETVFMSMENPGLWILGCHNSDFRNRGMTALLKVSSCDKNTGDYYEDSYEDISAYLLSKNNAIEPRSFSQNPPVLKRHQREITRTTLQSDQEEIDYDDTISVEMKKEDFDIYDEDENQSPRSFQKKTRHYFIAAVERLWDYGMSSSPHVLRNRAQSGSVPQFKKVVFQEFTDGSFTQPLYRGELNEHLGLLGPYIRAEVEDNIMVTFRNQASRPYSFYSSLISYEEDQRQGAEPRKNFVKPNETKTYFWKVQHHMAPTKDEFDCKAWAYFSDVDLEKDVHSGLIGPLLVCHTNTLNPAHGRQVTVQEFALFFTIFDETKSWYFTENMERNCRAPCNIQMEDPTFKENYRFHAINGYIMDTLPGLVMAQDQRIRWYLLSMGSNENIHSIHFSGHVFTVRKKEEYKMALYNLYPGVFETVEMLPSKAGIWRVECLIGEHLHAGMSTLFLVYSNKCQTPLGMASGHIRDFQITASGQYGQWAPKLARLHYSGSINAWSTKEPFSWIKVDLLAPMIIHGIKTQGARQKFSSLYISQFIIMYSLDGKKWQTYRGNSTGTLMVFFGNVDSSGIKHNIFNPPIIARYIRLHPTHYSIRSTLRMELMGCDLNSCSMPLGMESKAISDAQITASSYFTNMFATWSPSKARLHLQGRSNAWRPQVNNPKEWLQVDFQKTMKVTGVTTQGVKSLDTSMYVKEFLISSSQDGHQWTLFFQNGKVKVFQGNQDSFTPVVNSLDPPLLTRYLRIHPQSWVHQIALRMEVLGCEAQDLY

SEQ ID NO: 531 - DNA, 4371 bp, synthetic construct
  misc_feature 1..4371: note = Variant of human B-domain deleted Factor VIII
  source 1..4371: mol_type = other DNA
atgcagattgaactgtctacctgcttcttcctctgtttgctgaggttctgctttagcgccactagacggtactaccttggcgctgtggagctgtcctgggactatatgcagagtgatttgggagagcttcccgtcgacgcacgatttcctcctcgcgttccaaagtcatttcccttcaacacaagcgtggtgtacaagaagacgctcttcgtcgaattcaccgatcacctgttcaatatcgccaaacccagaccaccatggatgggtcttttggggcctaccatacaagcggaggtgtatgacacagttgttatcactctcaagaacatggcttctcatccggtaagtcttcacgcagtgggcgtgtcctactggaaagcttcagaaggagccgagtatgatgatcagacatcccagagggagaaagaagacgacaaggtatttccaggtgggtctcatacctatgtgtggcaagtgctcaaagagaatggccctatggcaagcgatccgctctgtttgacttacagctacctttcacacgttgacctcgtcaaggacctcaactccgggttgattggagccttgttggtatgcagggaaggatctcttgccaaagagaagacacagaccctccacaagtttatccttctctttgctgtgttcgatgagggcaaaagttggcatagcgaaacgaagaattccctcatgcaggatcgcgacgcagccagcgccagagcttggcccaagatgcacactgtgaacggatatgtcaataggtcacttcctggcttgattgggtgtcatcggaaaagtgtctactggcacgtgatcggaatggggacaacaccagaggtccactccatatttctcgaaggccataccttccttgttcgaaaccacagacaggcatccttggagatctctcccattacctttctcactgcccaaacgctccttatggacttgggtcagttccttctcttctgccatatcagctcacaccagcatgatggtatggaagcttatgtgaaagtcgacagttgtcctgaggagccacagttgcgcatgaagaataatgaagaagccgaggattacgacgacgatctcaccgattctgagatggacgtggtgaggtttgatgacgacaactctccctccttcattcaaatccggagcgtggcgaagaaacaccccaagacttgggtccactatatagcggcggaagaggaggattgggattacgctcctcttgtattggcaccagatgaccgctcatacaaaagccagtacctcaacaacggaccgcagagaattggccggaagtataagaaagtgcgatttatggcctatacagacgaaacctttaagacaagggaggccatccagcatgagagtgggattttgggacctcttctttacggcgaagttggtgataccctcctcatcatcttcaagaatcaagcttctcgcccctataacatttacccacacgggatcactgacgttaggcctttgtatagcagaagacttcccaaaggcgtgaagcatctcaaagacttccccattttgccaggcgagatctttaagtacaaatggaccgtcacagtggaagatggaccgactaaatcagaccctcgatgccttacgcggtactattcctccttcgtgaatatggagagagatttggcaagcggactcataggaccactcctcatctgttacaaggaatctgtagaccagaggggtaaccagattatgagtgataaacgcaatgtgatcctttttagcgtcttcgacgagaaccggtcctggtacttgaccgagaatctgcaaaggttccttcccaaccccgcaggcgttcagttggaagaccctgagtttcaggccagcaatattatgcactcaatcaacggctatgtgtttgatagtctccagctttctgtttgcctccatgaagtagcctattggtacatcttgtcaattggtgctcaaacagacttcctctccgtcttcttctccggctacacctttaagcacaagatggtgtatgaggacactctcacactctttccattttctggagaaaccgtgttcatgagcatggagaatccaggcctttggatcttgggttgccacaacagtgattttcgcaatcggggaatgactgctctcctcaaagtcagcagctgtgataagaacacaggcgactattacgaagattcttacgaggacataagtgcctacttgttgtccaagaataacgccattgagcccagatcattctcccagaatcctcccgtgcttaaaaggcatcagcgcgaaatcaccagaactactcttcagtctgatcaagaggagattgactatgacgacaccataagcgtggaaatgaagaaggaggatttcgatatctatgacgaagatgagaaccagtctccgcggagctttcagaagaagacgcgacactacttcattgcagcagtcgaaaggctttgggactacggtatgtcatcatcccctcatgtgttgcgcaatagagctcagagtggaagtgttccacagttcaagaaagtcgtctttcaagagtttacagatggcagcttcacacagcctctctatcggggcgagcttaacgaacatttgggactccttggtccctatatccgagccgaagtggaggacaacattatggttacctttaggaatcaagcctctcgcccctacagcttctactcctccctcatcagttatgaggaggatcagagacaaggcgctgaaccacggaagaactttgtgaaaccgaatgagacgaagacctacttctggaaagtacagcaccacatggcccccacaaaagacgaattcgattgcaaagcatgggcgtatttttcagacgttgacttggagaaagatgtacattcaggacttattggtcctttgttggtgtgtcacactaacactctcaatccagcccatggcaggcaggtgacagtccaggaattcgctcttttctttaccatctttgatgagaccaagtcctggtacttcacggaaaacatggagcgcaattgcagagccccctgtaacatacagatggaggaccctacctttaaggaaaattatcggttccacgcaatcaacggatacattatggatacactccctggccttgtgatggctcaggaccaacgaatcaggtggtacctcctcagcatgggttctaatgagaacatacactccattcacttttcaggacatgtgttcactgtccggaagaaagaagagtataagatggccctctacaatttgtatccaggcgtgtttgagaccgttgaaatgcttccctctaaagctggcatctggagagtagagtgcttgatcggagaacatcttcacgcaggtatgagcaccttgttcctcgtgtacagcaacaaatgtcagaccccacttggcatggccagtggacacattcgcgactttcagatcacagcatctggccagtatggacaatgggccccaaagttggctcgcctccattactccggtagcataaatgcgtggtccactaaagaacctttcagctggattaaggtcgatcttcttgcccccatgatcatccacggcattaagacacagggagcgaggcagaaattctcctccctctacatctcacagttcattattatgtatagtttggacggcaagaagtggcaaacttatagaggtaacagtactggaacactcatggtgttcttcggcaacgttgatagctctggcatcaaacacaacatctttaatcctcccataatagctcggtacatcagattgcatccgacccactacagcattaggagtacactccgaatggagcttatgggttgcgacttgaattcctgttcaatgccactcggaatggagtctaaagccatctctgatgcacagataaccgccagtagctactttacgaacatgtttgctacgtggtcaccctctaaggcaaggcttcatttgcaaggccggtctaatgcctggagacctcaggtgaacaacccgaaagaatggctccaggtggactttcagaagaccatgaaagtaacaggtgtcactactcagggagttaagtccttggataccagcatgtatgtgaaggagttccttatttcctcatcacaagatggccaccagtggaccctcttctttcagaatggtaaggtcaaagtgtttcagggcaatcaagacagcttcacacccgtggtgaacagtcttgatcctccactcttgacacgataccttcgaatccatccacagtcttgggttcaccagattgcattgcgcatggaagtacttggatgcgaggctcaggacctctac

SEQ ID NO: 532 - protein, 1457 aa, synthetic construct
  REGION 1..1457: note = Variant of human B-domain deleted Factor VIII
MQIELSTCFFLCLLRFCFSATRRYYLGAVELSWDYMQSDLGELPVDARFPPRVPKSFPFNTSVVYKKTLFVEFTDHLFNIAKPRPPWMGLLGPTIQAEVYDTVVITLKNMASHPVSLHAVGVSYWKASEGAEYDDQTSQREKEDDKVFPGGSHTYVWQVLKENGPMASDPLCLTYSYLSHVDLVKDLNSGLIGALLVCREGSLAKEKTQTLHKFILLFAVFDEGKSWHSETKNSLMQDRDAASARAWPKMHTVNGYVNRSLPGLIGCHRKSVYWHVIGMGTTPEVHSIFLEGHTFLVRNHRQASLEISPITFLTAQTLLMDLGQFLLFCHISSHQHDGMEAYVKVDSCPEEPQLRMKNNEEAEDYDDDLTDSEMDVVRFDDDNSPSFIQIRSVAKKHPKTWVHYIAAEEEDWDYAPLVLAPDDRSYKSQYLNNGPQRIGRKYKKVRFMAYTDETFKTREAIQHESGILGPLLYGEVGDTLLIIFKNQASRPYNIYPHGITDVRPLYSRRLPKGVKHLKDFPILPGEIFKYKWTVTVEDGPTKSDPRCLTRYYSSFVNMERDLASGLIGPLLICYKESVDQRGNQIMSDKRNVILFSVFDENRSWYLTENLQRFLPNPAGVQLEDPEFQASNIMHSINGYVFDSLQLSVCLHEVAYWYILSIGAQTDFLSVFFSGYTFKHKMVYEDTLTLFPFSGETVFMSMENPGLWILGCHNSDFRNRGMTALLKVSSCDKNTGDYYEDSYEDISAYLLSKNNAIEPRSFSQNPPVLKRHQREITRTTLQSDQEEIDYDDTISVEMKKEDFDIYDEDENQSPRSFQKKTRHYFIAAVERLWDYGMSSSPHVLRNRAQSGSVPQFKKVVFQEFTDGSFTQPLYRGELNEHLGLLGPYIRAEVEDNIMVTFRNQASRPYSFYSSLISYEEDQRQGAEPRKNFVKPNETKTYFWKVQHHMAPTKDEFDCKAWAYFSDVDLEKDVHSGLIGPLLVCHTNTLNPAHGRQVTVQEFALFFTIFDETKSWYFTENMERNCRAPCNIQMEDPTFKENYRFHAINGYIMDTLPGLVMAQDQRIRWYLLSMGSNENIHSIHFSGHVFTVRKKEEYKMALYNLYPGVFETVEMLPSKAGIWRVECLIGEHLHAGMSTLFLVYSNKCQTPLGMASGHIRDFQITASGQYGQWAPKLARLHYSGSINAWSTKEPFSWIKVDLLAPMIIHGIKTQGARQKFSSLYISQFIIMYSLDGKKWQTYRGNSTGTLMVFFGNVDSSGIKHNIFNPPIIARYIRLHPTHYSIRSTLRMELMGCDLNSCSMPLGMESKAISDAQITASSYFTNMFATWSPSKARLHLQGRSNAWRPQVNNPKEWLQVDFQKTMKVTGVTTQGVKSLDTSMYVKEFLISSSQDGHQWTLFFQNGKVKVFQGNQDSFTPVVNSLDPPLLTRYLRIHPQSWVHQIALRMEVLGCEAQDLY

SEQ ID NO: 533 - DNA, 4371 bp, synthetic construct
  misc_feature 1..4371: note = Variant of human B-domain deleted Factor VIII
  source 1..4371: mol_type = other DNA
atgcagattgaactgtctacctgcttcttcctctgtttgctgaggttctgctttagcgccactagacggtactaccttggcgctgtggagctgtcctgggactatatgcagagtgatttgggagagcttcccgtcgacgcacgatttcctcctcgcgttccaaagtcatttcccttcaacacaagcgtggtgtacaagaagacgctcttcgtcgaattcaccgatcacctgttcaatatcgccaaacccagaccaccatggatgggtcttttggggcctaccatacaagcggaggtgtatgacacagttgttatcactctcaagaacatggcttctcatccggtaagtcttcacgcagtgggcgtgtcctactggaaagcttcagaaggagccgagtatgatgatcagacatcccagagggagaaagaagacgacaaggtatttccaggtgggtctcatacctatgtgtggcaagtgctcaaagagaatggccctatggcaagcgatccgctctgtttgacttacagctacctttcacacgttgacctcgtcaaggacctcaactccgggttgattggagccttgttggtatgcagggaaggatctcttgccaaagagaagacacagaccctccacaagtttatccttctctttgctgtgttcgatgagggcaaaagttggcatagcgaaacgaagaattccctcatgcaggatcgcgacgcagccagcgccagagcttggcccaagatgcacactgtgaacggatatgtcaataggtcacttcctggcttgattgggtgtcatcggaaaagtgtctactggcacgtgatcggaatggggacaacaccagaggtccactccatatttctcgaaggccataccttccttgttcgaaaccacagacaggcatccttggagatctctcccattacctttctcactgcccaaacgctccttatggacttgggtcagttccttctcttctgccatatcagctcacaccagcatgatggtatggaagcttatgtgaaagtcgacagttgtcctgaggagccacagttgcgcatgaagaataatgaagaagccgaggattacgacgacgatctcaccgattctgagatggacgtggtgaggtttgatgacgacaactctccctccttcattcaaatccggagcgtggcgaagaaacaccccaagacttgggtccactatatagcggcggaagaggaggattgggattacgctcctcttgtattggcaccagatgaccgctcatacaaaagccagtacctcaacaacggaccgcagagaattggccggaagtataagaaagtgcgatttatggcctatacagacgaaacctttaagacaagggaggccatccagcatgagagtgggattttgggacctcttctttacggcgaagttggtgataccctcctcatcatcttcaagaatcaagcttctcgcccctataacatttacccacacgggatcactgacgttaggcctttgtatagcagaagacttcccaaaggcgtgaagcatctcaaagacttccccattttgccaggcgagatctttaagtacaaatggaccgtcacagtggaagatggaccgactaaatcagaccctcgatgccttacgcggtactattcctccttcgtgaatatggagagagatttggcaagcggactcataggaccactcctcatctgttacaaggaatctgtagaccagaggggtaaccagattatgagtgataaacgcaatgtgatcctttttagcgtcttcgacgagaaccggtcctggtacttgaccgagaatatacaaaggttccttcccaaccccgcaggcgttcagttggaagaccctgagtttcaggccagcaatattatgcactcaatcaacggctatgtgtttgatagtctccagctttctgtttgcctccatgaagtagcctattggtacatcttgtcaattggtgctcaaacagacttcctctccgtcttcttctccggctacacctttaagcacaagatggtgtatgaggacactctcacactctttccattttctggagaaaccgtgttcatgagcatggagaatccaggcctttggatcttgggttgccacaacagtgattttcgcaatcggggaatgactgctctcctcaaagtcagcagctgtgataagaacacaggcgactattacgaagattcttacgaggacataagtgcctacttgttgtccaagaataacgggattgagcccagatcattctcccagaatcctcccgtgcttaaaaggcatcagcgcgaaatcaccagaactactcttcagtctgatcaagaggagattgactatgacgacaccataagcgtggaaatgaagaaggaggatttcgatatctatgacgaagatgagaaccagtctccgcggagctttcagaagaagacgcgacactacttcattgcagcagtcgaaaggctttgggactacggtatgtcatcatcccctcatgtgttgcgcaatagagctcagagtggaagtgttccacagttcaagaaagtcgtctttcaagagtttacagatggcagcttcacacagcctctctatcggggcgagcttaacgaacatttgggactccttggtccctatatccgagccgaagtggaggacaacattatggttacctttaggaatcaagcctctcgcccctacagcttctactcctccctcatcagttatgaggaggatcagagacaaggcgctgaaccacggaagaactttgtgaaaccgaatgagacgaagacctacttctggaaagtacagcaccacatggcccccacaaaagacgaattcgattgcaaagcatgggcgtatttttcagacgttgacttggagaaagatgtacattcaggacttattggtcctttgttggtgtgtcacactaacactctcaatccagcccatggcaggcaggtgacagtccaggaattcgctcttttctttaccatctttgatgagaccaagtcctggtacttcacggaaaacatggagcgcaattgcagagccccctgtaacatacagatggaggaccctacctttaaggaaaattatcggttccacgcaatcaacggatacattatggatacactccctggccttgtgatggctcaggaccaacgaatcaggtggtacctcctcagcatgggttctaatgagaacatacactccattcacttttcaggacatgtgttcactgtccggaagaaagaagagtataagatggccctctacaatttgtatccaggcgtgtttgagaccgttgaaatgcttccctctaaagctggcatctggagagtagagtgcttgatcggagaacatcttcacgcaggtatgagcaccttgttcctcgtgtacagcaacaaatgtcagaccccacttggcatggccagtggacacattcgcgactttcagatcacagcatctggccagtatggacaatgggccccaaagttggctcgcctccattactccggtagcataaatgcgtggtccactaaagaacctttcagctggattaaggtcgatcttcttgcccccatgatcatccacggcattaagacacagggagcgaggcagaaattctcctccctctacatctcacagttcattattatgtatagtttggacggcaagaagtggcaaacttatagaggtaacagtactggaacactcatggtgttcttcggcaacgttgatagctctggcatcaaacacaacatctttaatcctcccataatagctcggtacatcagattgcatccgacccactacagcattaggagtacactccgaatggagcttatgggttgcgacttgaattcctgttcaatgccactcggaatggagtctaaagccatctctgatgcacagataaccgccagtagctactttacgaacatgtttgctacgtggtcaccctctaaggcaaggcttcatttgcaaggccggtctaatgcctggagacctcaggtgaacaacccgaaagaatggctccaggtggactttcagaagaccatgaaagtaacaggtgtcactactcagggagttaagtccttggataccagcatgtatgtgaaggagttccttatttcctcatcacaagatggccaccagtggaccctcttctttcagaatggtaaggtcaaagtgtttcagggcaatcaagacagcttcacacccgtggtgaacagtcttgatcctccactcttgacacgataccttcgaatccatccacagtcttgggttcaccagattgcattgcgcatggaagtacttggatgcgaggctcaggacctctac

SEQ ID NO: 534 - protein, 1457 aa, synthetic construct
  REGION 1..1457: note = Variant of human B-domain deleted Factor VIII
MQIELSTCFFLCLLRFCFSATRRYYLGAVELSWDYMQSDLGELPVDARFPPRVPKSFPFNTSVVYKKTLFVEFTDHLFNIAKPRPPWMGLLGPTIQAEVYDTVVITLKNMASHPVSLHAVGVSYWKASEGAEYDDQTSQREKEDDKVFPGGSHTYVWQVLKENGPMASDPLCLTYSYLSHVDLVKDLNSGLIGALLVCREGSLAKEKTQTLHKFILLFAVFDEGKSWHSETKNSLMQDRDAASARAWPKMHTVNGYVNRSLPGLIGCHRKSVYWHVIGMGTTPEVHSIFLEGHTFLVRNHRQASLEISPITFLTAQTLLMDLGQFLLFCHISSHQHDGMEAYVKVDSCPEEPQLRMKNNEEAEDYDDDLTDSEMDVVRFDDDNSPSFIQIRSVAKKHPKTWVHYIAAEEEDWDYAPLVLAPDDRSYKSQYLNNGPQRIGRKYKKVRFMAYTDETFKTREAIQHESGILGPLLYGEVGDTLLIIFKNQASRPYNIYPHGITDVRPLYSRRLPKGVKHLKDFPILPGEIFKYKWTVTVEDGPTKSDPRCLTRYYSSFVNMERDLASGLIGPLLICYKESVDQRGNQIMSDKRNVILFSVFDENRSWYLTENIQRFLPNPAGVQLEDPEFQASNIMHSINGYVFDSLQLSVCLHEVAYWYILSIGAQTDFLSVFFSGYTFKHKMVYEDTLTLFPFSGETVFMSMENPGLWILGCHNSDFRNRGMTALLKVSSCDKNTGDYYEDSYEDISAYLLSKNNGIEPRSFSQNPPVLKRHQREITRTTLQSDQEEIDYDDTISVEMKKEDFDIYDEDENQSPRSFQKKTRHYFIAAVERLWDYGMSSSPHVLRNRAQSGSVPQFKKVVFQEFTDGSFTQPLYRGELNEHLGLLGPYIRAEVEDNIMVTFRNQASRPYSFYSSLISYEEDQRQGAEPRKNFVKPNETKTYFWKVQHHMAPTKDEFDCKAWAYFSDVDLEKDVHSGLIGPLLVCHTNTLNPAHGRQVTVQEFALFFTIFDETKSWYFTENMERNCRAPCNIQMEDPTFKENYRFHAINGYIMDTLPGLVMAQDQRIRWYLLSMGSNENIHSIHFSGHVFTVRKKEEYKMALYNLYPGVFETVEMLPSKAGIWRVECLIGEHLHAGMSTLFLVYSNKCQTPLGMASGHIRDFQITASGQYGQWAPKLARLHYSGSINAWSTKEPFSWIKVDLLAPMIIHGIKTQGARQKFSSLYISQFIIMYSLDGKKWQTYRGNSTGTLMVFFGNVDSSGIKHNIFNPPIIARYIRLHPTHYSIRSTLRMELMGCDLNSCSMPLGMESKAISDAQITASSYFTNMFATWSPSKARLHLQGRSNAWRPQVNNPKEWLQVDFQKTMKVTGVTTQGVKSLDTSMYVKEFLISSSQDGHQWTLFFQNGKVKVFQGNQDSFTPVVNSLDPPLLTRYLRIHPQSWVHQIALRMEVLGCEAQDLY

SEQ ID NO: 535 - DNA, 4371 bp, synthetic construct
  misc_feature 1..4371: note = Variant of human B-domain deleted Factor VIII
  source 1..4371: mol_type = other DNA
atgcagattgaactgtctacctgcttcttcctctgtttgctgaggttctgctttagcgccactagacggtactaccttggcgctgtggagctgtcctgggactatatgcagagtgatttgggagagcttcccgtcgacgcacgatttcctcctcgcgttccaaagtcatttcccttcaacacaagcgtggtgtacaagaagacgctcttcgtcgaattcaccgatcacctgttcaatatcgccaaacccagaccaccatggatgggtcttttggggcctaccatacaagcggaggtgtatgacacagttgttatcactctcaagaacatggcttctcatccggtaagtcttcacgcagtgggcgtgtcctactggaaagcttcagaaggagccgagtatgatgatcagacatcccagagggagaaagaagacgacaaggtatttccaggtgggtctcatacctatgtgtggcaagtgctcaaagagaatggccctatggcaagcgatccgctctgtttgacttacagctacctttcacacgttgacctcgtcaaggacctcaactccgggttgattggagccttgttggtatgcagggaaggatctcttgccaaagagaagacacagaccctccacaagtttatccttctctttgctgtgttcgatgagggcaaaagttggcatagcgaaacgaagaattccctcatgcaggatcgcgacgcagccagcgccagagcttggcccaagatgcacactgtgaacggatatgtcaataggtcacttcctggcttgattgggtgtcatcggaaaagtgtctactggcacgtgatcggaatggggacaacaccagaggtccactccatatttctcgaaggccataccttccttgttcgaaaccacagacaggcatccttggagatctctcccattacctttctcactgcccaaacgctccttatggacttgggtcagttccttctcttctgccatatcagctcacaccagcatgatggtatggaagcttatgtgaaagtcgacagttgtcctgaggagccacagttgcgcatgaagaataatgaagaagccgaggattacgacgacgatctcaccgattctgagatggacgtggtgaggtttgatgacgacaactctccctccttcattcaaatccggagcgtggcgaagaaacaccccaagacttgggtccactatatagcggcggaagaggaggattgggattacgctcctcttgtattggcaccagatgaccgctcatacaaaagccagtacctcaacaacggaccgcagagaattggccggaagtataagaaagtgcgatttatggcctatacagacgaaacctttaagacaagggaggccatccagcatgagagtgggattttgggacctcttctttacggcgaagttggtgataccctcctcatcatcttcaagaatcaagcttctcgcccctataacatttacccacacgggatcactgacgttaggcctttgtatagcagaagacttcccaaaggcgtgaagcatctcaaagacttccccattttgccaggcgagatctttaagtacaaatggaccgtcacagtggaagatggaccgactaaatcagaccctcgatgccttacgcggtactattcctccttcgtgaatatggagagagatttggcaagcggactcataggaccactcctcatctgttacaaggaatctgtagaccagaggggtaaccagattatgagtgataaacgcaatgtgatcctttttagcgtcttcgacgagaaccggtcctggtacttgaccgagaatatacaaaggttccttcccaaccccgcaggcgttcagttggaagaccctgagtttcaggccagcaatattatgcactcaatcaacggctatgtgtttgatagtctccagctttctgtttgcctccatgaagtagcctattggtacatcttgtcaattggtgctcaaacagacttcctctccgtcttcttctccggctacacctttaagcacaagatggtgtatgaggacactctcacactctttccattttctggagaaaccgtgttcatgagcatggagaatccaggcctttggatcttgggttgccacaacagtgattttcgcaatcggggaatgactgctctcctcaaagtcagcagctgtgataagaacacaggcgactattacgaagattcttacgaggacataagtgcctacaggttgtccaagaataacgccattgagcccagatcattctcccagaatcctcccgtgcttaaaaggcatcagcgcgaaatcaccagaactactcttcagtctgatcaagaggagattgactatgacgacaccataagcgtggaaatgaagaaggaggatttcgatatctatgacgaagatgagaaccagtctccgcggagctttcagaagaagacgcgacactacttcattgcagcagtcgaaaggctttgggactacggtatgtcatcatcccctcatgtgttgcgcaatagagctcagagtggaagtgttccacagttcaagaaagtcgtctttcaagagtttacagatggcagcttcacacagcctctctatcggggcgagcttaacgaacatttgggactccttggtccctatatccgagccgaagtggaggacaacattatggttacctttaggaatcaagcctctcgcccctacagcttctactcctccctcatcagttatgaggaggatcagagacaaggcgctgaaccacggaagaactttgtgaaaccgaatgagacgaagacctacttctggaaagtacagcaccacatggcccccacaaaagacgaattcgattgcaaagcatgggcgtatttttcagacgttgacttggagaaagatgtacattcaggacttattggtcctttgttggtgtgtcacactaacactctcaatccagcccatggcaggcaggtgacagtccaggaattcgctcttttctttaccatctttgatgagaccaagtcctggtacttcacggaaaacatggagcgcaattgcagagccccctgtaacatacagatggaggaccctacctttaaggaaaattatcggttccacgcaatcaacggatacattatggatacactccctggccttgtgatggctcaggaccaacgaatcaggtggtacctcctcagcatgggttctaatgagaacatacactccattcacttttcaggacatgtgttcactgtccggaagaaagaagagtataagatggccctctacaatttgtatccaggcgtgtttgagaccgttgaaatgcttccctctaaagctggcatctggagagtagagtgcttgatcggagaacatcttcacgcaggtatgagcaccttgttcctcgtgtacagcaacaaatgtcagaccccacttggcatggccagtggacacattcgcgactttcagatcacagcatctggccagtatggacaatgggccccaaagttggctcgcctccattactccggtagcataaatgcgtggtccactaaagaacctttcagctggattaaggtcgatcttcttgcccccatgatcatccacggcattaagacacagggagcgaggcagaaattctcctccctctacatctcacagttcattattatgtatagtttggacggcaagaagtggcaaacttatagaggtaacagtactggaacactcatggtgttcttcggcaacgttgatagctctggcatcaaacacaacatctttaatcctcccataatagctcggtacatcagattgcatccgacccactacagcattaggagtacactccgaatggagcttatgggttgcgacttgaattcctgttcaatgccactcggaatggagtctaaagccatctctgatgcacagataaccgccagtagctactttacgaacatgtttgctacgtggtcaccctctaaggcaaggcttcatttgcaaggccggtctaatgcctggagacctcaggtgaacaacccgaaagaatggctccaggtggactttcagaagaccatgaaagtaacaggtgtcactactcagggagttaagtccttggataccagcatgtatgtgaaggagttccttatttcctcatcacaagatggccaccagtggaccctcttctttcagaatggtaaggtcaaagtgtttcagggcaatcaagacagcttcacacccgtggtgaacagtcttgatcctccactcttgacacgataccttcgaatccatccacagtcttgggttcaccagattgcattgcgcatggaagtacttggatgcgaggctcaggacctctac

SEQ ID NO: 536 - protein, 1457 aa, synthetic construct
  REGION 1..1457: note = Variant of human B-domain deleted Factor VIII
MQIELSTCFFLCLLRFCFSATRRYYLGAVELSWDYMQSDLGELPVDARFPPRVPKSFPFNTSVVYKKTLFVEFTDHLFNIAKPRPPWMGLLGPTIQAEVYDTVVITLKNMASHPVSLHAVGVSYWKASEGAEYDDQTSQREKEDDKVFPGGSHTYVWQVLKENGPMASDPLCLTYSYLSHVDLVKDLNSGLIGALLVCREGSLAKEKTQTLHKFILLFAVFDEGKSWHSETKNSLMQDRDAASARAWPKMHTVNGYVNRSLPGLIGCHRKSVYWHVIGMGTTPEVHSIFLEGHTFLVRNHRQASLEISPITFLTAQTLLMDLGQFLLFCHISSHQHDGMEAYVKVDSCPEEPQLRMKNNEEAEDYDDDLTDSEMDVVRFDDDNSPSFIQIRSVAKKHPKTWVHYIAAEEEDWDYAPLVLAPDDRSYKSQYLNNGPQRIGRKYKKVRFMAYTDETFKTREAIQHESGILGPLLYGEVGDTLLIIFKNQASRPYNIYPHGITDVRPLYSRRLPKGVKHLKDFPILPGEIFKYKWTVTVEDGPTKSDPRCLTRYYSSFVNMERDLASGLIGPLLICYKESVDQRGNQIMSDKRNVILFSVFDENRSWYLTENIQRFLPNPAGVQLEDPEFQASNIMHSINGYVFDSLQLSVCLHEVAYWYILSIGAQTDFLSVFFSGYTFKHKMVYEDTLTLFPFSGETVFMSMENPGLWILGCHNSDFRNRGMTALLKVSSCDKNTGDYYEDSYEDISAYRLSKNNAIEPRSFSQNPPVLKRHQREITRTTLQSDQEEIDYDDTISVEMKKEDFDIYDEDENQSPRSFQKKTRHYFIAAVERLWDYGMSSSPHVLRNRAQSGSVPQFKKVVFQEFTDGSFTQPLYRGELNEHLGLLGPYIRAEVEDNIMVTFRNQASRPYSFYSSLISYEEDQRQGAEPRKNFVKPNETKTYFWKVQHHMAPTKDEFDCKAWAYFSDVDLEKDVHSGLIGPLLVCHTNTLNPAHGRQVTVQEFALFFTIFDETKSWYFTENMERNCRAPCNIQMEDPTFKENYRFHAINGYIMDTLPGLVMAQDQRIRWYLLSMGSNENIHSIHFSGHVFTVRKKEEYKMALYNLYPGVFETVEMLPSKAGIWRVECLIGEHLHAGMSTLFLVYSNKCQTPLGMASGHIRDFQITASGQYGQWAPKLARLHYSGSINAWSTKEPFSWIKVDLLAPMIIHGIKTQGARQKFSSLYISQFIIMYSLDGKKWQTYRGNSTGTLMVFFGNVDSSGIKHNIFNPPIIARYIRLHPTHYSIRSTLRMELMGCDLNSCSMPLGMESKAISDAQITASSYFTNMFATWSPSKARLHLQGRSNAWRPQVNNPKEWLQVDFQKTMKVTGVTTQGVKSLDTSMYVKEFLISSSQDGHQWTLFFQNGKVKVFQGNQDSFTPVVNSLDPPLLTRYLRIHPQSWVHQIALRMEVLGCEAQDLY

SEQ ID NO: 537 - DNA, 4371 bp, synthetic construct
  misc_feature 1..4371: note = Variant of human B-domain deleted Factor VIII
  source 1..4371: mol_type = other DNA
atgcagattgaactgtctacctgcttcttcctctgtttgctgaggttctgctttagcgccactagacggtactaccttggcgctgtggagctgtcctgggactatatgcagagtgatttgggagagcttcccgtcgacgcacgatttcctcctcgcgttccaaagtcatttcccttcaacacaagcgtggtgtacaagaagacgctcttcgtcgaattcaccgatcacctgttcaatatcgccaaacccagaccaccatggatgggtcttttggggcctaccatacaagcggaggtgtatgacacagttgttatcactctcaagaacatggcttctcatccggtaagtcttcacgcagtgggcgtgtcctactggaaagcttcagaaggagccgagtatgatgatcagacatcccagagggagaaagaagacgacaaggtatttccaggtgggtctcatacctatgtgtggcaagtgctcaaagagaatggccctatggcaagcgatccgctctgtttgacttacagctacctttcacacgttgacctcgtcaaggacctcaactccgggttgattggagccttgttggtatgcagggaaggatctcttgccaaagagaagacacagaccctccacaagtttatccttctctttgctgtgttcgatgagggcaaaagttggcatagcgaaacgaagaattccctcatgcaggatcgcgacgcagccagcgccagagcttggcccaagatgcacactgtgaacggatatgtcaataggtcacttcctggcttgattgggtgtcatcggaaaagtgtctactggcacgtgatcggaatggggacaacaccagaggtccactccatatttctcgaaggccataccttccttgttcgaaaccacagacaggcatccttggagatctctcccattacctttctcactgcccaaacgctccttatggacttgggtcagttccttctcttctgccatatcagctcacaccagcatgatggtatggaagcttatgtgaaagtcgacagttgtcctgaggagccacagttgcgcatgaagaataatgaagaagccgaggattacgacgacgatctcaccgattctgagatggacgtggtgaggtttgatgacgacaactctccctccttcattcaaatccggagcgtggcgaagaaacaccccaagacttgggtccactatatagcggcggaagaggaggattgggattacgctcctcttgtattggcaccagatgaccgctcatacaaaagccagtacctcaacaacggaccgcagagaattggccggaagtataagaaagtgcgatttatggcctatacagacgaaacctttaagacaagggaggccatccagcatgagagtgggattttgggacctcttctttacggcgaagttggtgataccctcctcatcatcttcaagaatcaagcttctcgcccctataacatttacccacacgggatcactgacgttaggcctttgtatagcagaagacttcccaaaggcgtgaagcatctcaaagacttccccattttgccaggcgagatctttaagtacaaatggaccgtcacagtggaagatggaccgactaaatcagaccctcgatgccttacgcggtactattcctccttcgtgaatatggagagagatttggcaagcggactcataggaccactcctcatctgttacaaggaatctgtagaccagaggggtaaccagattatgagtgataaacgcaatgtgatcctttttagcgtcttcgacgagaaccggtcctggtacttgaccgagaatatacaaaggttccttcccaaccccgcaggcgttcagttggaagaccctgagtttcaggccagcaatattatgcactcaatcaacggctatgtgtttgatagtctccagctttctgtttgcctccatgaagtagcctattggtacatcttgtcaattggtgctcaaacagacttcctctccgtcttcttctccggctacacctttaagcacaagatggtgtatgaggacactctcacactctttccattttctggagaaaccgtgttcatgagcatggagaatccaggcctttggatcttgggttgccacaacagtgattttcgcaatcggggaatgactgctctcctcaaagtcagcagctgtgataagaacacaggcgactattacgaagattcttacgaggacataagtgccgtgttgttgtccaagaataacgccattgagcccagatcattctcccagaatcctcccgtgcttaaaaggcatcagcgcgaaatcaccagaactactcttcagtctgatcaagaggagattgactatgacgacaccataagcgtggaaatgaagaaggaggatttcgatatctatgacgaagatgagaaccagtctccgcggagctttcagaagaagacgcgacactacttcattgcagcagtcgaaaggctttgggactacggtatgtcatcatcccctcatgtgttgcgcaatagagctcagagtggaagtgttccacagttcaagaaagtcgtctttcaagagtttacagatggcagcttcacacagcctctctatcggggcgagcttaacgaacatttgggactccttggtccctatatccgagccgaagtggaggacaacattatggttacctttaggaatcaagcctctcgcccctacagcttctactcctccctcatcagttatgaggaggatcagagacaaggcgctgaaccacggaagaactttgtgaaaccgaatgagacgaagacctacttctggaaagtacagcaccacatggcccccacaaaagacgaattcgattgcaaagcatgggcgtatttttcagacgttgacttggagaaagatgtacattcaggacttattggtcctttgttggtgtgtcacactaacactctcaatccagcccatggcaggcaggtgacagtccaggaattcgctcttttctttaccatctttgatgagaccaagtcctggtacttcacggaaaacatggagcgcaattgcagagccccctgtaacatacagatggaggaccctacctttaaggaaaattatcggttccacgcaatcaacggatacattatggatacactccctggccttgtgatggctcaggaccaacgaatcaggtggtacctcctcagcatgggttctaatgagaacatacactccattcacttttcaggacatgtgttcactgtccggaagaaagaagagtataagatggccctctacaatttgtatccaggcgtgtttgagaccgttgaaatgcttccctctaaagctggcatctggagagtagagtgcttgatcggagaacatcttcacgcaggtatgagcaccttgttcctcgtgtacagcaacaaatgtcagaccccacttggcatggccagtggacacattcgcgactttcagatcacagcatctggccagtatggacaatgggccccaaagttggctcgcctccattactccggtagcataaatgcgtggtccactaaagaacctttcagctggattaaggtcgatcttcttgcccccatgatcatccacggcattaagacacagggagcgaggcagaaattctcctccctctacatctcacagttcattattatgtatagtttggacggcaagaagtggcaaacttatagaggtaacagtactggaacactcatggtgttcttcggcaacgttgatagctctggcatcaaacacaacatctttaatcctcccataatagctcggtacatcagattgcatccgacccactacagcattaggagtacactccgaatggagcttatgggttgcgacttgaattcctgttcaatgccactcggaatggagtctaaagccatctctgatgcacagataaccgccagtagctactttacgaacatgtttgctacgtggtcaccctctaaggcaaggcttcatttgcaaggccggtctaatgcctggagacctcaggtgaacaacccgaaagaatggctccaggtggactttcagaagaccatgaaagtaacaggtgtcactactcagggagttaagtccttggataccagcatgtatgtgaaggagttccttatttcctcatcacaagatggccaccagtggaccctcttctttcagaatggtaaggtcaaagtgtttcagggcaatcaagacagcttcacacccgtggtgaacagtcttgatcctccactcttgacacgataccttcgaatccatccacagtcttgggttcaccagattgcattgcgcatggaagtacttggatgcgaggctcaggacctctac

SEQ ID NO: 538 - protein, 1457 aa, synthetic construct
  REGION 1..1457: note = Variant of human B-domain deleted Factor VIII
MQIELSTCFFLCLLRFCFSATRRYYLGAVELSWDYMQSDLGELPVDARFPPRVPKSFPFNTSVVYKKTLFVEFTDHLFNIAKPRPPWMGLLGPTIQAEVYDTVVITLKNMASHPVSLHAVGVSYWKASEGAEYDDQTSQREKEDDKVFPGGSHTYVWQVLKENGPMASDPLCLTYSYLSHVDLVKDLNSGLIGALLVCREGSLAKEKTQTLHKFILLFAVFDEGKSWHSETKNSLMQDRDAASARAWPKMHTVNGYVNRSLPGLIGCHRKSVYWHVIGMGTTPEVHSIFLEGHTFLVRNHRQASLEISPITFLTAQTLLMDLGQFLLFCHISSHQHDGMEAYVKVDSCPEEPQLRMKNNEEAEDYDDDLTDSEMDVVRFDDDNSPSFIQIRSVAKKHPKTWVHYIAAEEEDWDYAPLVLAPDDRSYKSQYLNNGPQRIGRKYKKVRFMAYTDETFKTREAIQHESGILGPLLYGEVGDTLLIIFKNQASRPYNIYPHGITDVRPLYSRRLPKGVKHLKDFPILPGEIFKYKWTVTVEDGPTKSDPRCLTRYYSSFVNMERDLASGLIGPLLICYKESVDQRGNQIMSDKRNVILFSVFDENRSWYLTENIQRFLPNPAGVQLEDPEFQASNIMHSINGYVFDSLQLSVCLHEVAYWYILSIGAQTDFLSVFFSGYTFKHKMVYEDTLTLFPFSGETVFMSMENPGLWILGCHNSDFRNRGMTALLKVSSCDKNTGDYYEDSYEDISAVLLSKNNAIEPRSFSQNPPVLKRHQREITRTTLQSDQEEIDYDDTISVEMKKEDFDIYDEDENQSPRSFQKKTRHYFIAAVERLWDYGMSSSPHVLRNRAQSGSVPQFKKVVFQEFTDGSFTQPLYRGELNEHLGLLGPYIRAEVEDNIMVTFRNQASRPYSFYSSLISYEEDQRQGAEPRKNFVKPNETKTYFWKVQHHMAPTKDEFDCKAWAYFSDVDLEKDVHSGLIGPLLVCHTNTLNPAHGRQVTVQEFALFFTIFDETKSWYFTENMERNCRAPCNIQMEDPTFKENYRFHAINGYIMDTLPGLVMAQDQRIRWYLLSMGSNENIHSIHFSGHVFTVRKKEEYKMALYNLYPGVFETVEMLPSKAGIWRVECLIGEHLHAGMSTLFLVYSNKCQTPLGMASGHIRDFQITASGQYGQWAPKLARLHYSGSINAWSTKEPFSWIKVDLLAPMIIHGIKTQGARQKFSSLYISQFIIMYSLDGKKWQTYRGNSTGTLMVFFGNVDSSGIKHNIFNPPIIARYIRLHPTHYSIRSTLRMELMGCDLNSCSMPLGMESKAISDAQITASSYFTNMFATWSPSKARLHLQGRSNAWRPQVNNPKEWLQVDFQKTMKVTGVTTQGVKSLDTSMYVKEFLISSSQDGHQWTLFFQNGKVKVFQGNQDSFTPVVNSLDPPLLTRYLRIHPQSWVHQIALRMEVLGCEAQDLY

SEQ ID NO: 539 - DNA, 4371 bp, synthetic construct
  misc_feature 1..4371: note = Variant of human B-domain deleted Factor VIII
  source 1..4371: mol_type = other DNA
atgcagattgaactgtctacctgcttcttcctctgtttgctgaggttctgctttagcgccactagacggtactaccttggcgctgtggagctgtcctgggactatatgcagagtgatttgggagagcttcccgtcgacgcacgatttcctcctcgcgttccaaagtcatttcccttcaacacaagcgtggtgtacaagaagacgctcttcgtcgaattcaccgatcacctgttcaatatcgccaaacccagaccaccatggatgggtcttttggggcctaccatacaagcggaggtgtatgacacagttgttatcactctcaagaacatggcttctcatccggtaagtcttcacgcagtgggcgtgtcctactggaaagcttcagaaggagccgagtatgatgatcagacatcccagagggagaaagaagacgacaaggtatttccaggtgggtctcatacctatgtgtggcaagtgctcaaagagaatggccctatggcaagcgatccgctctgtttgacttacagctacctttcacacgttgacctcgtcaaggacctcaactccgggttgattggagccttgttggtatgcagggaaggatctcttgccaaagagaagacacagaccctccacaagtttatccttctctttgctgtgttcgatgagggcaaaagttggcatagcgaaacgaagaattccctcatgcaggatcgcgacgcagccagcgccagagcttggcccaagatgcacactgtgaacggatatgtcaataggtcacttcctggcttgattgggtgtcatcggaaaagtgtctactggcacgtgatcggaatggggacaacaccagaggtccactccatatttctcgaaggccataccttccttgttcgaaaccacagacaggcatccttggagatctctcccattacctttctcactgcccaaacgctccttatggacttgggtcagttccttctcttctgccatatcagctcacaccagcatgatggtatggaagcttatgtgaaagtcgacagttgtcctgaggagccacagttgcgcatgaagaataatgaagaagccgaggattacgacgacgatctcaccgattctgagatggacgtggtgaggtttgatgacgacaactctccctccttcattcaaatccggagcgtggcgaagaaacaccccaagacttgggtccactatatagcggcggaagaggaggattgggattacgctcctcttgtattggcaccagatgaccgctcatacaaaagccagtacctcaacaacggaccgcagagaattggccggaagtataagaaagtgcgatttatggcctatacagacgaaacctttaagacaagggaggccatccagcatgagagtgggattttgggacctcttctttacggcgaagttggtgataccctcctcatcatcttcaagaatcaagcttctcgcccctataacatttacccacacgggatcactgacgttaggcctttgtatagcagaagacttcccaaaggcgtgaagcatctcaaagacttccccattttgccaggcgagatctttaagtacaaatggaccgtcacagtggaagatggaccgactaaatcagaccctcgatgccttacgcggtactattcctccttcgtgaatatggagagagatttggcaagcggactcataggaccactcctcatctgttacaaggaatctgtagaccagaggggtaaccagattatgagtgataaacgcaatgtgatcctttttagcgtcttcgacgagaaccggtcctggtacttgaccgagaatatacaaaggttccttcccaaccccgcaggcgttcagttggaagaccctgagtttcaggccagcaatattatgcactcaatcaacggctatgtgtttgatagtctccagctttctgtttgcctccatgaagtagcctattggtacatcttgtcaattggtgctcaaacagacttcctctccgtcttcttctccggctacacctttaagcacaagatggtgtatgaggacactctcacactctttccattttctggagaaaccgtgttcatgagcatggagaatccaggcctttggatcttgggttgccacaacagtgattttcgcaatcggggaatgactgctctcctcaaagtcagcagctgtgataagaacacaggcgactattacgaagattcttacgaggacataagtgcctacttgttgtccaagaataacgccattgagcccagatcattctcccagaatcctcccgtgcttaaaaggcatcagcgcgaaatcaccagaactactcttcagtctgatcaagaggagattgactatgacgacaccataagcgtggaaatgaagaaggaggatttcgatatctatgacgaagatgagaaccagtctccgcggagctttcagaagaagacgcgacactacttcattgcagcagtcgaaaggctttgggactacggtatgtcatcatcccctcatgtgttgcgcaatagagctcagagtggaagtgttccacagttcaagaaagtcgtctttcaagagtttacagatggcagcttcacacagcctctctatcggggcgagcttaacgaacatttgggactccttggtccctatatccgagccgaagtggaggacaacattatggttacctttaggaatcaagcctctcgcccctacagcttctactcctccctcatcagttatgaggaggatcagagacaaggcgctgaaccacggaagaactttgtgaaaccgaatgagacgaagacctacttctggaaagtacagcaccacatggcccccacaaaagacgaattcgattgcaaagcatgggcgtatttttcagacgttgacttggagaaagatgtacattcaggacttattggtcctttgttggtgtgtcacactaacactctcaatccagcccatggcaggcaggtgacagtccaggaattcgctcttttctttaccatctttgatgagaccaagtcctggtacttcacggaaaacatggagcgcaattgcagagccccctgtaacatacagatggaggaccctacctttaaggaaaattatcggttccacgcaatcaacggatacattatggatacactccctggccttgtgatggctcaggaccaacgaatcaggtggtacctcctcagcatgggttctaatgagaacatacactccattcacttttcaggacatgtgttcactgtccggaagaaagaagagtataagatggccctctacaatttgtatccaggcgtgtttgagaccgttgaaatgcttccctctaaagctggcatctggagagtagagtgcttgatcggagaacatcttcacgcaggtatgagcaccttgttcctcgtgtacagcaacaaatgtcagaccccacttggcatggccagtggacacattcgcgactttcagatcacagcatctggccagtatggacaatgggccccaaagttggctcgcctccattactccggtagcataaatgcgtggtccactaaagaacctttcagctggattaaggtcgatcttcttgcccccatgatcatccacggcattaagacacagggagcgaggcagaaattctcctccctctacatctcacagttcattattatgtatagtttggacggcaagaagtggcaaacttatagaggtaacagtactggaacactcatggtgttcttcggcaacgttgatagctctggcatcaaacacaacatctttaatcctcccataatagctcggtacatcagattgcatccgacccactacagcattaggagtacactccgaatggagcttatgggttgcgacttgaattcctgttcaatgccactcggaatggagtctaaagccatctctgatgcacagataaccgccagtagctactttacgaacatgtttgctacgtggtcaccctctaaggcaaggcttcatttgcaaggccggtctaatgcctggagacctcaggtgaacaacccgaaagaatggctccaggtggactttcagaagaccatgaaagtaacaggtgtcactactcagggagttaagtccttggataccagcgcttatgtgaaggagttccttatttcctcatcacaagatggccaccagtggaccctcttctttcagaatggtaaggtcaaagtgtttcagggcaatcaagacagcttcacacccgtggtgaacagtcttgatcctccactcttgacacgataccttcgaatccatccacagtcttgggttcaccagattgcattgcgcatggaagtacttggatgcgaggctcaggacctctac

SEQ ID NO: 540 - protein, 1457 aa, synthetic construct
  REGION 1..1457: note = Variant of human B-domain deleted Factor VIII
MQIELSTCFFLCLLRFCFSATRRYYLGAVELSWDYMQSDLGELPVDARFPPRVPKSFPFNTSVVYKKTLFVEFTDHLFNIAKPRPPWMGLLGPTIQAEVYDTVVITLKNMASHPVSLHAVGVSYWKASEGAEYDDQTSQREKEDDKVFPGGSHTYVWQVLKENGPMASDPLCLTYSYLSHVDLVKDLNSGLIGALLVCREGSLAKEKTQTLHKFILLFAVFDEGKSWHSETKNSLMQDRDAASARAWPKMHTVNGYVNRSLPGLIGCHRKSVYWHVIGMGTTPEVHSIFLEGHTFLVRNHRQASLEISPITFLTAQTLLMDLGQFLLFCHISSHQHDGMEAYVKVDSCPEEPQLRMKNNEEAEDYDDDLTDSEMDVVRFDDDNSPSFIQIRSVAKKHPKTWVHYIAAEEEDWDYAPLVLAPDDRSYKSQYLNNGPQRIGRKYKKVRFMAYTDETFKTREAIQHESGILGPLLYGEVGDTLLIIFKNQASRPYNIYPHGITDVRPLYSRRLPKGVKHLKDFPILPGEIFKYKWTVTVEDGPTKSDPRCLTRYYSSFVNMERDLASGLIGPLLICYKESVDQRGNQIMSDKRNVILFSVFDENRSWYLTENIQRFLPNPAGVQLEDPEFQASNIMHSINGYVFDSLQLSVCLHEVAYWYILSIGAQTDFLSVFFSGYTFKHKMVYEDTLTLFPFSGETVFMSMENPGLWILGCHNSDFRNRGMTALLKVSSCDKNTGDYYEDSYEDISAYLLSKNNAIEPRSFSQNPPVLKRHQREITRTTLQSDQEEIDYDDTISVEMKKEDFDIYDEDENQSPRSFQKKTRHYFIAAVERLWDYGMSSSPHVLRNRAQSGSVPQFKKVVFQEFTDGSFTQPLYRGELNEHLGLLGPYIRAEVEDNIMVTFRNQASRPYSFYSSLISYEEDQRQGAEPRKNFVKPNETKTYFWKVQHHMAPTKDEFDCKAWAYFSDVDLEKDVHSGLIGPLLVCHTNTLNPAHGRQVTVQEFALFFTIFDETKSWYFTENMERNCRAPCNIQMEDPTFKENYRFHAINGYIMDTLPGLVMAQDQRIRWYLLSMGSNENIHSIHFSGHVFTVRKKEEYKMALYNLYPGVFETVEMLPSKAGIWRVECLIGEHLHAGMSTLFLVYSNKCQTPLGMASGHIRDFQITASGQYGQWAPKLARLHYSGSINAWSTKEPFSWIKVDLLAPMIIHGIKTQGARQKFSSLYISQFIIMYSLDGKKWQTYRGNSTGTLMVFFGNVDSSGIKHNIFNPPIIARYIRLHPTHYSIRSTLRMELMGCDLNSCSMPLGMESKAISDAQITASSYFTNMFATWSPSKARLHLQGRSNAWRPQVNNPKEWLQVDFQKTMKVTGVTTQGVKSLDTSAYVKEFLISSSQDGHQWTLFFQNGKVKVFQGNQDSFTPVVNSLDPPLLTRYLRIHPQSWVHQIALRMEVLGCEAQDLY

SEQ ID NO: 541 - DNA, 4371 bp, synthetic construct
  misc_feature 1..4371: note = Variant of human B-domain deleted Factor VIII
  source 1..4371: mol_type = other DNA
atgcagattgaactgtctacctgcttcttcctctgtttgctgaggttctgctttagcgccactagacggtactaccttggcgctgtggagctgtcctgggactatatgcagagtgatttgggagagcttcccgtcgacgcacgatttcctcctcgcgttccaaagtcatttcccttcaacacaagcgtggtgtacaagaagacgctcttcgtcgaattcaccgatcacctgttcaatatcgccaaacccagaccaccatggatgggtcttttggggcctaccatacaagcggaggtgtatgacacagttgttatcactctcaagaacatggcttctcatccggtaagtcttcacgcagtgggcgtgtcctactggaaagcttcagaaggagccgagtatgatgatcagacatcccagagggagaaagaagacgacaaggtatttccaggtgggtctcatacctatgtgtggcaagtgctcaaagagaatggccctatggcaagcgatccgctctgtttgacttacagctacctttcacacgttgacctcgtcaaggacctcaactccgggttgattggagccttgttggtatgcagggaaggatctcttgccaaagagaagacacagaccctccacaagtttatccttctctttgctgtgttcgatgagggcaaaagttggcatagcgaaacgaagaattccctcatgcaggatcgcgacgcagccagcgccagagcttggcccaagatgcacactgtgaacggatatgtcaataggtcacttcctggcttgattgggtgtcatcggaaaagtgtctactggcacgtgatcggaatggggacaacaccagaggtccactccatatttctcgaaggccataccttccttgttcgaaaccacagacaggcatccttggagatctctcccattacctttctcactgcccaaacgctccttatggacttgggtcagttccttctcttctgccatatcagctcacaccagcatgatggtatggaagcttatgtgaaagtcgacagttgtcctgaggagccacagttgcgcatgaagaataatgaagaagccgaggattacgacgacgatctcaccgattctgagatggacgtggtgaggtttgatgacgacaactctccctccttcattcaaatccggagcgtggcgaagaaacaccccaagacttgggtccactatatagcggcggaagaggaggattgggattacgctcctcttgtattggcaccagatgaccgctcatacaaaagccagtacctcaacaacggaccgcagagaattggccggaagtataagaaagtgcgatttatggcctatacagacgaaacctttaagacaagggaggccatccagcatgagagtgggattttgggacctcttctttacggcgaagttggtgataccctcctcatcatcttcaagaatcaagcttctcgcccctataacatttacccacacgggatcactgacgttaggcctttgtatagcagaagacttcccaaaggcgtgaagcatctcaaagacttccccattttgccaggcgagatctttaagtacaaatggaccgtcacagtggaagatggaccgactaaatcagaccctcgatgccttacgcggtactattcctccttcgtgaatatggagagagatttggcaagcggactcataggaccactcctcatctgttacaaggaatctgtagaccagaggggtaaccagattatgagtgataaacgcaatgtgatcctttttagcgtcttcgacgagaaccggtcctggtacttgaccgagaatatacaaaggttccttcccaaccccgcaggcgttcagttggaagaccctgagtttcaggccagcaatattatgcactcaatcaacggctatgtgtttgatagtctccagctttctgtttgcctccatgaagtagcctattggtacatcttgtcaattggtgctcaaacagacttcctctccgtcttcttctccggctacacctttaagcacaagatggtgtatgaggacactctcacactctttccattttctggagaaaccgtgttcatgagcatggagaatccaggcctttggatcttgggttgccacaacagtgattttcgcaatcggggaatgactgctctcctcaaagtcagcagctgtgataagaacacaggcgactattacgaagattcttacgaggacataagtgcctacttgttgtccaagaataacgccattgagcccagatcattctcccagaatcctcccgtgcttaaaaggcatcagcgcgaaatcaccagaactactcttcagtctgatcaagaggagattgactatgacgacaccataagcgtggaaatgaagaaggaggatttcgatatctatgacgaagatgagaaccagtctccgcggagctttcagaagaagacgcgacactacttcattgcagcagtcgaaaggctttgggactacggtatgtcatcatcccctcatgtgttgcgcaatagagctcagagtggaagtgttccacagttcaagaaagtcgtctttcaagagtttacagatggcagcttcacacagcctctctatcggggcgagcttaacgaacatttgggactccttggtccctatatccgagccgaagtggaggacaacattatggttacctttaggaatcaagcctctcgcccctacagcttctactcctccctcatcagttatgaggaggatcagagacaaggcgctgaaccacggaagaactttgtgaaaccgaatgagacgaagacctacttctggaaagtacagcaccacatggcccccacaaaagacgaattcgattgcaaagcatgggcgtatttttcagacgttgacttggagaaagatgtacattcaggacttattggtcctttgttggtgtgtcacactaacactctcaatccagcccatggcaggcaggtgacagtccaggaattcgctcttttctttaccatctttgatgagaccaagtcctggtacttcacggaaaacatggagcgcaattgcagagccccctgtaacatacagatggaggaccctacctttaaggaaaattatcggttccacgcaatcaacggatacattatggatacactccctggccttgtgatggctcaggaccaacgaatcaggtggtacctcctcagcatgggttctaatgagaacatacactccattcacttttcaggacatgtgttcactgtccggaagaaagaagagtataagatggccctctacaatttgtatccaggcgtgtttgagaccgttgaaatgcttccctctaaagctggcatctggagagtagagtgcttgatcggagaacatcttcacgcaggtatgagcaccttgttcctcgtgtacagcaacaaatgtcagaccccacttggcatggccagtggacacattcgcgactttcagatcacagcatctggccagtatggacaatgggccccaaagttggctcgcctccattactccggtagcataaatgcgtggtccactaaagaacctttcagctggattaaggtcgatcttcttgcccccatgatcatccacggcattaagacacagggagcgaggcagaaattctcctccctctacatctcacagttcattattatgtatagtttggacggcaagaagtggcaaacttatagaggtaacagtactggaacactcatggtgttcttcggcaacgttgatagctctggcatcaaacacaacatctttaatcctcccataatagctcggtacatcagattgcatccgacccactacagcattaggagtacactccgaatggagcttatgggttgcgacttgaattcctgttcaatgccactcggaatggagtctaaagccatctctgatgcacagataaccgccagtagctactttacgaacatgtttgctacgtggtcaccctctaaggcaaggcttcatttgcaaggccggtctaatgcctggagacctcaggtgaacaacccgaaagaatggctccaggtggactttcagaagaccatgaaagtaacaggtgtcactactcagggagttaagtccttggataccagcatgtatgtgaaggagttccttatttcctcatcacaagatggccaccagtggaccctcttctttcagaatggtaaggtcaaagtgtttcagggcaatcaagacagcttcacacccgtggtgaacagtcttgatcctccactcttgacacgataccttcgaatccatccacagtcttgggtttgtcagattgcattgcgcatggaagtacttggatgcgaggctcaggacctctac

SEQ ID NO: 542 - protein, 1457 aa, synthetic construct
  REGION 1..1457: note = Variant of human B-domain deleted Factor VIII
MQIELSTCFFLCLLRFCFSATRRYYLGAVELSWDYMQSDLGELPVDARFPPRVPKSFPFNTSVVYKKTLFVEFTDHLFNIAKPRPPWMGLLGPTIQAEVYDTVVITLKNMASHPVSLHAVGVSYWKASEGAEYDDQTSQREKEDDKVFPGGSHTYVWQVLKENGPMASDPLCLTYSYLSHVDLVKDLNSGLIGALLVCREGSLAKEKTQTLHKFILLFAVFDEGKSWHSETKNSLMQDRDAASARAWPKMHTVNGYVNRSLPGLIGCHRKSVYWHVIGMGTTPEVHSIFLEGHTFLVRNHRQASLEISPITFLTAQTLLMDLGQFLLFCHISSHQHDGMEAYVKVDSCPEEPQLRMKNNEEAEDYDDDLTDSEMDVVRFDDDNSPSFIQIRSVAKKHPKTWVHYIAAEEEDWDYAPLVLAPDDRSYKSQYLNNGPQRIGRKYKKVRFMAYTDETFKTREAIQHESGILGPLLYGEVGDTLLIIFKNQASRPYNIYPHGITDVRPLYSRRLPKGVKHLKDFPILPGEIFKYKWTVTVEDGPTKSDPRCLTRYYSSFVNMERDLASGLIGPLLICYKESVDQRGNQIMSDKRNVILFSVFDENRSWYLTENIQRFLPNPAGVQLEDPEFQASNIMHSINGYVFDSLQLSVCLHEVAYWYILSIGAQTDFLSVFFSGYTFKHKMVYEDTLTLFPFSGETVFMSMENPGLWILGCHNSDFRNRGMTALLKVSSCDKNTGDYYEDSYEDISAYLLSKNNAIEPRSFSQNPPVLKRHQREITRTTLQSDQEEIDYDDTISVEMKKEDFDIYDEDENQSPRSFQKKTRHYFIAAVERLWDYGMSSSPHVLRNRAQSGSVPQFKKVVFQEFTDGSFTQPLYRGELNEHLGLLGPYIRAEVEDNIMVTFRNQASRPYSFYSSLISYEEDQRQGAEPRKNFVKPNETKTYFWKVQHHMAPTKDEFDCKAWAYFSDVDLEKDVHSGLIGPLLVCHTNTLNPAHGRQVTVQEFALFFTIFDETKSWYFTENMERNCRAPCNIQMEDPTFKENYRFHAINGYIMDTLPGLVMAQDQRIRWYLLSMGSNENIHSIHFSGHVFTVRKKEEYKMALYNLYPGVFETVEMLPSKAGIWRVECLIGEHLHAGMSTLFLVYSNKCQTPLGMASGHIRDFQITASGQYGQWAPKLARLHYSGSINAWSTKEPFSWIKVDLLAPMIIHGIKTQGARQKFSSLYISQFIIMYSLDGKKWQTYRGNSTGTLMVFFGNVDSSGIKHNIFNPPIIARYIRLHPTHYSIRSTLRMELMGCDLNSCSMPLGMESKAISDAQITASSYFTNMFATWSPSKARLHLQGRSNAWRPQVNNPKEWLQVDFQKTMKVTGVTTQGVKSLDTSMYVKEFLISSSQDGHQWTLFFQNGKVKVFQGNQDSFTPVVNSLDPPLLTRYLRIHPQSWVCQIALRMEVLGCEAQDLY

SEQ ID NO: 543 - DNA, 4371 bp, synthetic construct
  misc_feature 1..4371: note = Variant of human B-domain deleted Factor VIII
  source 1..4371: mol_type = other DNA
atgcagattgaactgtctacctgcttcttcctctgtttgctgaggttctgctttagcgccactagacggtactaccttggcgctgtggagctgtcctgggactatatgcagagtgatttgggagagcttcccgtcgacgcacgatttcctcctcgcgttccaaagtcatttcccttcaacacaagcgtggtgtacaagaagacgctcttcgtcgaattcaccgatcacctgttcaatatcgccaaacccagaccaccatggatgggtcttttggggcctaccatacaagcggaggtgtatgacacagttgttatcactctcaagaacatggcttctcatccggtaagtcttcacgcagtgggcgtgtcctactggaaagcttcagaaggagccgagtatgatgatcagacatcccagagggagaaagaagacgacaaggtatttccaggtgggtctcatacctatgtgtggcaagtgctcaaagagaatggccctatggcaagcgatccgctctgtttgacttacagctacctttcacacgttgacctcgtcaaggacctcaactccgggttgattggagccttgttggtatgcagggaaggatctcttgccaaagagaagacacagaccctccacaagtttatccttctctttgctgtgttcgatgagggcaaaagttggcatagcgaaacgaagaattccctcatgcaggatcgcgacgcagccagcgccagagcttggcccaagatgcacactgtgaacggatatgtcaataggtcacttcctggcttgattgggtgtcatcggaaaagtgtctactggcacgtgatcggaatggggacaacaccagaggtccactccatatttctcgaaggccataccttccttgttcgaaaccacagacaggcatccttggagatctctcccattacctttctcactgcccaaacgctccttatggacttgggtcagttccttctcttctgccatatcagctcacaccagcatgatggtatggaagcttatgtgaaagtcgacagttgtcctgaggagccacagttgcgcatgaagaataatgaagaagccgaggattacgacgacgatctcaccgattctgagatggacgtggtgaggtttgatgacgacaactctccctccttcattcaaatccggagcgtggcgaagaaaaaccccaagacttgggtccactatatagcggcggaagaggaggattgggattacgctcctcttgtattggcaccagatgaccgctcatacaaaagccagtacctcaacaacggaccgcagagaattggccggaagtataagaaagtgcgatttatggcctatacagacgaaacctttaagacaagggaggccatccagcatgagagtgggattttgggacctcttctttacggcgaagttggtgataccctcctcatcatcttcaagaatcaagcttctcgcccctataacatttacccacacgggatcactgacgttaggcctttgtatagcagaagacttcccaaaggcgtgaagcatctcaaagacttccccattttgccaggcgagatctttaagtacaaatggaccgtcacagtggaagatggaccgactaaatcagaccctcgatgccttacgcggtactattcctccttcgtgaatatggagagagatttggcaagcggactcataggaccactcctcatctgttacaaggaatctgtagaccagaggggtaaccagattatgagtgataaacgcaatgtgatcctttttagcgtcttcgacgagaaccggtcctggtacttgaccgagaatatacaaaggttccttcccaaccccgcaggcgttcagttggaagaccctgagtttcaggccagcaatattatgcactcaatcaacggctatgtgtttgatagtctccagctttctgtttgcctccatgaagtagcctattggtacatcttgtcaattggtgctcaaacagacttcctctccgtcttcttctccggctacacctttaagcacaagatggtgtatgaggacactctcacactctttccattttctggagaaaccgtgttcatgagcatggagaatccaggcctttggatcttgggttgccacaacagtgattttcgcaatcggggaatgactgctctcctcaaagtcagcagctgtgataagaacacaggcgactattacgaagattcttacgaggacataagtgcctacttgttgtccaagaataacgccattgagcccagatcattctcccagaatcctcccgtgcttaaaaggcatcagcgcgaaatcaccagaactactcttcagtctgatcaagaggagattgactatgacgacaccataagcgtggaaatgaagaaggaggatttcgatatctatgacgaagatgagaaccagtctccgcggagctttcagaagaagacgcgacactacttcattgcagcagtcgaaaggctttgggactacggtatgtcatcatcccctcatgtgttgcgcaatagagctcagagtggaagtgttccacagttcaagaaagtcgtctttcaagagtttacagatggcagcttcacacagcctctctatcggggcgagcttaacgaacatttgggactccttggtccctatatccgagccgaagtggaggacaacattatggttacctttaggaatcaagcctctcgcccctacagcttctactcctccctcatcagttatgaggaggatcagagacaaggcgctgaaccacggaagaactttgtgaaaccgaatgagacgaagacctacttctggaaagtacagcaccacatggcccccacaaaagacgaattcgattgcaaagcatgggcgtatttttcagacgttgacttggagaaagatgtacattcaggacttattggtcctttgttggtgtgtcacactaacactctcaatccagcccatggcaggcaggtgacagtccaggaattcgctcttttctttaccatctttgatgagaccaagtcctggtacttcacggaaaacatggagcgcaattgcagagccccctgtaacatacagatggaggaccctacctttaaggaaaattatcggttccacgcaatcaacggatacattatggatacactccctggccttgtgatggctcaggaccaacgaatcaggtggtacctcctcagcatgggttctaatgagaacatacactccattcacttttcaggacatgtgttcactgtccggaagaaagaagagtataagatggccctctacaatttgtatccaggcgtgtttgagaccgttgaaatgcttccctctaaagctggcatctggagagtagagtgcttgatcggagaacatcttcacgcaggtatgagcaccttgttcctcgtgtacagcaacaaatgtcagaccccacttggcatggccagtggacacattcgcgactttcagatcacagcatctggccagtatggacaatgggccccaaagttggctcgcctccattactccggtagcataaatgcgtggtccactaaagaacctttcagctggattaaggtcgatcttcttgcccccatgatcatccacggcattaagacacagggagcgaggcagaaaatgtcctccctctacatctcacagttcattattatgtatagtttggacggcaagaagtggcaaacttatagaggtaacagtactggaacactcatggtgttcttcggcaacgttgatagctctggcatcaaacacaacatctttaatcctcccataatagctcggtacatcagattgcatccgacccactacagcattaggagtacactccgaatggagcttatgggttgcgacttgaattcctgttcaatgccactcggaatggagtctaaagccatctctgatgcacagataaccgccagtagctactttacgaacatgtttgctacgtggtcaccctctaaggcaaggcttcatttgcaaggccggtctaatgcctggagacctcaggtgaacaacccgaaagaatggctccaggtggactttcagaagaccatgaaagtaacaggtgtcactactcagggagttaagtccttggataccagcatgtatgtgaaggagttccttatttcctcatcacaagatggccaccagtggaccctcttctttcagaatggtaaggtcaaagtgtttcagggcaatcaagacagcttcacacccgtggtgaacagtcttgatcctccactcttgacacgataccttcgaatccatccacagtcttgggttcaccagattgcattgcgcatggaagtacttggatgcgaggctcaggacctctac

SEQ ID NO: 544 - protein, 1457 aa, synthetic construct
  REGION 1..1457: note = Variant of human B-domain deleted Factor VIII
MQIELSTCFFLCLLRFCFSATRRYYLGAVELSWDYMQSDLGELPVDARFPPRVPKSFPFNTSVVYKKTLFVEFTDHLFNIAKPRPPWMGLLGPTIQAEVYDTVVITLKNMASHPVSLHAVGVSYWKASEGAEYDDQTSQREKEDDKVFPGGSHTYVWQVLKENGPMASDPLCLTYSYLSHVDLVKDLNSGLIGALLVCREGSLAKEKTQTLHKFILLFAVFDEGKSWHSETKNSLMQDRDAASARAWPKMHTVNGYVNRSLPGLIGCHRKSVYWHVIGMGTTPEVHSIFLEGHTFLVRNHRQASLEISPITFLTAQTLLMDLGQFLLFCHISSHQHDGMEAYVKVDSCPEEPQLRMKNNEEAEDYDDDLTDSEMDVVRFDDDNSPSFIQIRSVAKKNPKTWVHYIAAEEEDWDYAPLVLAPDDRSYKSQYLNNGPQRIGRKYKKVRFMAYTDETFKTREAIQHESGILGPLLYGEVGDTLLIIFKNQASRPYNIYPHGITDVRPLYSRRLPKGVKHLKDFPILPGEIFKYKWTVTVEDGPTKSDPRCLTRYYSSFVNMERDLASGLIGPLLICYKESVDQRGNQIMSDKRNVILFSVFDENRSWYLTENIQRFLPNPAGVQLEDPEFQASNIMHSINGYVFDSLQLSVCLHEVAYWYILSIGAQTDFLSVFFSGYTFKHKMVYEDTLTLFPFSGETVFMSMENPGLWILGCHNSDFRNRGMTALLKVSSCDKNTGDYYEDSYEDISAYLLSKNNAIEPRSFSQNPPVLKRHQREITRTTLQSDQEEIDYDDTISVEMKKEDFDIYDEDENQSPRSFQKKTRHYFIAAVERLWDYGMSSSPHVLRNRAQSGSVPQFKKVVFQEFTDGSFTQPLYRGELNEHLGLLGPYIRAEVEDNIMVTFRNQASRPYSFYSSLISYEEDQRQGAEPRKNFVKPNETKTYFWKVQHHMAPTKDEFDCKAWAYFSDVDLEKDVHSGLIGPLLVCHTNTLNPAHGRQVTVQEFALFFTIFDETKSWYFTENMERNCRAPCNIQMEDPTFKENYRFHAINGYIMDTLPGLVMAQDQRIRWYLLSMGSNENIHSIHFSGHVFTVRKKEEYKMALYNLYPGVFETVEMLPSKAGIWRVECLIGEHLHAGMSTLFLVYSNKCQTPLGMASGHIRDFQITASGQYGQWAPKLARLHYSGSINAWSTKEPFSWIKVDLLAPMIIHGIKTQGARQKMSSLYISQFIIMYSLDGKKWQTYRGNSTGTLMVFFGNVDSSGIKHNIFNPPIIARYIRLHPTHYSIRSTLRMELMGCDLNSCSMPLGMESKAISDAQITASSYFTNMFATWSPSKARLHLQGRSNAWRPQVNNPKEWLQVDFQKTMKVTGVTTQGVKSLDTSMYVKEFLISSSQDGHQWTLFFQNGKVKVFQGNQDSFTPVVNSLDPPLLTRYLRIHPQSWVHQIALRMEVLGCEAQDLY

SEQ ID NO: 545 - DNA, 4371 bp, synthetic construct
  misc_feature 1..4371: note = Variant of human B-domain deleted Factor VIII
  source 1..4371: mol_type = other DNA
atgcagattgaactgtctacctgcttcttcctctgtttgctgaggttctgctttagcgccactagacggtactaccttggcgctgtggagctgtcctgggactatatgcagagtgatttgggagagcttcccgtcgacgcacgatttcctcctcgcgttccaaagtcatttcccttcaacacaagcgtggtgtacaagaagacgctcttcgtcgaattcaccgatcacctgttcaatatcgccaaacccagaccaccatggatgggtcttttggggcctaccatacaagcggaggtgtatgacacagttgttatcactctcaagaacatggcttctcatccggtaagtcttcacgcagtgggcgtgtcctactggaaagcttcagaaggagccgagtatgatgatcagacatcccagagggagaaagaagacgacaaggtatttccaggtgggtctcatacctatgtgtggcaagtgctcaaagagaatggccctatggcaagcgatccgctctgtttgacttacagctacctttcacacgttgacctcgtcaaggacctcaactccgggttgattggagccttgttggtatgcagggaaggatctcttgccaaagagaagacacagaccctccacaagtttatccttctctttgctgtgttcgatgagggcaaaagttggcatagcgaaacgaagaattccctcatgcaggatcgcgacgcagccagcgccagagcttggcccaagatgcacactgtgaacggatatgtcaataggtcacttcctggcttgattgggtgtcatcggaaaagtgtctactggcacgtgatcggaatggggacaacaccagaggtccactccatatttctcgaaggccataccttccttgttcgaaaccacagacaggcatccttggagatctctcccattacctttctcactgcccaaacgctccttatggacttgggtcagttccttctcttctgccatatcagctcacaccagcatgatggtatggaagcttatgtgaaagtcgacagttgtcctgaggagccacagttgcgcatgaagaataatgaagaagccgaggattacgacgacgatctcaccgattctgagatggacgtggtgaggtttgatgacgacaactctccctccttcattcaaatccggagcgtggcgaagaaacaccccaagacttgggtccactatatagcggcggaagaggaggattgggattacgctcctcttgtattggcaccagatgaccgctcatacaaaagccagtacctcaacaacggaccgcagagaattggccggaagtataagaaagtgcgatttatggcctatacagacgaaacctttaagacaagggaggccatccagcatgagagtgggattttgggacctcttctttacggcgaagttggtgataccctcctcatcatcttcaagaatcaagcttctcgcccctataacatttacccacacgggatcactgacgttaggcctttgtatagcagaagacttcccaaaggcgtgaagcatctcaaagacttccccattttgccaggcgagatctttaagtacaaatggaccgtcacagtggaagatggaccgactaaatcagaccctcgatgccttacgcggtactattcctccttcgtgaatatggagagagatttggcaagcggactcataggaccactcctcatctgttacaaggaatctgtagaccagaggggtaaccagattatgagtgataaacgcaatgtgatcctttttagcgtcttcgacgagaaccggtcctggtacttgaccgagaatatacaaaggttccttcccaaccccgcaggcgttcagttggaagaccctgagtttcaggccagcaatattatgcactcaatcaacggctatgtgtttgatagtctccagctttctgtttgcctccatgaagtagcctattggtacatcttgtcaattggtgctcaaacagacttcctctccgtcttcttctccggctacacctttaagcacaagatggtgtatgaggacactctcacactctttccattttctggagaaaccgtgttcatgagcatggagaatccaggcctttggatcttgggttgccacaacagtgattttcgcaatcggggaatgactgctctcctcaaagtcagcagctgtgataagaacacaggcgactattacgaagattcttacgaggacataagtgcctacttgttgtccaagaataacgccattgagcccagatcattctcccagaatcctcccgtgcttaaaaggcatcagcgcgaaatcaccagaactactcttcagtctgatcaagaggagattgactatgacgacaccataagcgtggaaatgaagaaggaggatttcgatatctatgacgaagatgagaaccagtctccgcggagctttcagaagaagacgcgacactacttcattgcagcagtcgaaaggctttgggactacggtatgtcatcatcccctcatgtgttgcgcaatagagctcagagtggaagtgttccacagttcaagaaagtcgtctttcaagagtttacagatggcagcttcacacagcctctctatcggggcgagcttaacgaacatttgggactccttggtccctatatccgagccgaagtggaggacaacattatggttacctttaggaatcaagcctctcgcccctacagcttctactcctccctcatcagttatgaggaggatcagagacaaggcgctgaaccacggaagaactttgtgaaaccgaatgagacgaagacctacttctggaaagtacagcaccacatggcccccacaaaagacgaattcgattgcaaagcatgggcgtatttttcagacgttgacttggagaaagatgtacattcaggacttattggtcctttgttggtgtgtcacactaacactctcaatccagcccatggcaggcaggtgacagtccaggaattcgctcttttctttaccatctttgatgagaccaagtcctggtacttcacggaaaacatggagcgcaattgcagagccccctgtaacatacagatggaggaccctaccatgaaggaaaattatcggttccacgcaatcaacggatacattatggatacactccctggccttgtgatggctcaggaccaacgaatcaggtggtacctcctcagcatgggttctaatgagaacatacactccattcacttttcaggacatgtgttcactgtccggaagaaagaagagtataagatggccctctacaatttgtatccaggcgtgtttgagaccgttgaaatgcttccctctaaagctggcatctggagagtagagtgcttgatcggagaacatcttcacgcaggtatgagcaccttgttcctcgtgtacagcaacaaatgtcagaccccacttggcatggccagtggacacattcgcgactttcagatcacagcatctggccagtatggacaatgggccccaaagttggctcgcctccattactccggtagcataaatgcgtggtccactaaagaacctttcagctggattaaggtcgatcttcttgcccccatgatcatccacggcattaagacacagggagcgaggcagaaattctcctccctctacatctcacagttcattattatgtatagtttggacggcaagaagtggcaaacttatagaggtaacagtactggaacactcatggtgttcttcggcaacgttgatagctctggcatcaaacacaacatctttaatcctcccataatagctcggtacatcagattgcatccgacccactacagcattaggagtacactccgaatggagcttatgggttgcgacttgaattcctgttcaatgccactcggaatggagtctaaagccatctctgatgcacagataaccgccagtagctactttacgaacatgtttgctacgtggtcaccctctaaggcaaggcttcatttgcaaggccggtctaatgcctggagacctcaggtgaacaacccgaaagaatggctccaggtggactttcagaagaccatgaaagtaacaggtgtcactactcagggagttaagtccttggataccagcatgtatgtgaaggagttccttatttcctcatcacaagatggccaccagtggaccctcttctttcagaatggtaaggtcaaagtgtttcagggcaatcaagacagcttcacacccgtggtgaacagtcttgatcctccactcttgacacgataccttcgaatccatccacagtcttgggttcaccagattgcattgcgcatggaagtacttggatgcgaggctcaggacctctac

SEQ ID NO: 546 - protein, 1457 aa, synthetic construct
  REGION 1..1457: note = Variant of human B-domain deleted Factor VIII
MQIELSTCFFLCLLRFCFSATRRYYLGAVELSWDYMQSDLGELPVDARFPPRVPKSFPFNTSVVYKKTLFVEFTDHLFNIAKPRPPWMGLLGPTIQAEVYDTVVITLKNMASHPVSLHAVGVSYWKASEGAEYDDQTSQREKEDDKVFPGGSHTYVWQVLKENGPMASDPLCLTYSYLSHVDLVKDLNSGLIGALLVCREGSLAKEKTQTLHKFILLFAVFDEGKSWHSETKNSLMQDRDAASARAWPKMHTVNGYVNRSLPGLIGCHRKSVYWHVIGMGTTPEVHSIFLEGHTFLVRNHRQASLEISPITFLTAQTLLMDLGQFLLFCHISSHQHDGMEAYVKVDSCPEEPQLRMKNNEEAEDYDDDLTDSEMDVVRFDDDNSPSFIQIRSVAKKHPKTWVHYIAAEEEDWDYAPLVLAPDDRSYKSQYLNNGPQRIGRKYKKVRFMAYTDETFKTREAIQHESGILGPLLYGEVGDTLLIIFKNQASRPYNIYPHGITDVRPLYSRRLPKGVKHLKDFPILPGEIFKYKWTVTVEDGPTKSDPRCLTRYYSSFVNMERDLASGLIGPLLICYKESVDQRGNQIMSDKRNVILFSVFDENRSWYLTENIQRFLPNPAGVQLEDPEFQASNIMHSINGYVFDSLQLSVCLHEVAYWYILSIGAQTDFLSVFFSGYTFKHKMVYEDTLTLFPFSGETVFMSMENPGLWILGCHNSDFRNRGMTALLKVSSCDKNTGDYYEDSYEDISAYLLSKNNAIEPRSFSQNPPVLKRHQREITRTTLQSDQEEIDYDDTISVEMKKEDFDIYDEDENQSPRSFQKKTRHYFIAAVERLWDYGMSSSPHVLRNRAQSGSVPQFKKVVFQEFTDGSFTQPLYRGELNEHLGLLGPYIRAEVEDNIMVTFRNQASRPYSFYSSLISYEEDQRQGAEPRKNFVKPNETKTYFWKVQHHMAPTKDEFDCKAWAYFSDVDLEKDVHSGLIGPLLVCHTNTLNPAHGRQVTVQEFALFFTIFDETKSWYFTENMERNCRAPCNIQMEDPTMKENYRFHAINGYIMDTLPGLVMAQDQRIRWYLLSMGSNENIHSIHFSGHVFTVRKKEEYKMALYNLYPGVFETVEMLPSKAGIWRVECLIGEHLHAGMSTLFLVYSNKCQTPLGMASGHIRDFQITASGQYGQWAPKLARLHYSGSINAWSTKEPFSWIKVDLLAPMIIHGIKTQGARQKFSSLYISQFIIMYSLDGKKWQTYRGNSTGTLMVFFGNVDSSGIKHNIFNPPIIARYIRLHPTHYSIRSTLRMELMGCDLNSCSMPLGMESKAISDAQITASSYFTNMFATWSPSKARLHLQGRSNAWRPQVNNPKEWLQVDFQKTMKVTGVTTQGVKSLDTSMYVKEFLISSSQDGHQWTLFFQNGKVKVFQGNQDSFTPVVNSLDPPLLTRYLRIHPQSWVHQIALRMEVLGCEAQDLY

SEQ ID NO: 547 - DNA, 4371 bp, synthetic construct
  misc_feature 1..4371: note = Variant of human B-domain deleted Factor VIII
  source 1..4371: mol_type = other DNA
atgcagattgaactgtctacctgcttcttcctctgtttgctgaggttctgctttagcgccactagacggtactaccttggcgctgtggagctgtcctgggactatatgcagagtgatttgggagagcttcccgtcgacgcacgatttcctcctcgcgttccaaagtcatttcccttcaacacaagcgtggtgtacaagaagacgctcttcgtcgaattcaccgatcacctgttcaatatcgccaaacccagaccaccatggatgggtcttttggggcctaccatacaagcggaggtgtatgacacagttgttatcactctcaagaacatggcttctcatccggtaagtcttcacgcagtgggcgtgtcctactggaaagcttcagaaggagccgagtatgatgatcagacatcccagagggagaaagaagacgacaaggtatttccaggtgggtctcatacctatgtgtggcaagtgctcaaagagaatggccctatggcaagcgatccgctctgtttgacttacagctacctttcacacgttgacctcgtcaaggacctcaactccgggttgattggagccttgttggtatgcagggaaggatctcttgccaaagagaagacacagaccctccacaagtttatccttctctttgctgtgttcgatgagggcaaaagttggcatagcgaaacgaagaattccctcatgcaggatcgcgacgcagccagcgccagagcttggcccaagatgcacactgtgaacggatatgtcaataggtcacttcctggcttgattgggtgtcatcggaaaagtgtctactggcacgtgatcggaatggggacaacaccagaggtccactccatatttctcgaaggccataccttccttgttcgaaaccacagacaggcatccttggagatctctcccattacctttctcactgcccaaacgctccttatggacttgggtcagttccttctcttctgccatatcagctcacaccagcatgatggtatggaagcttatgtgaaagtcgacagttgtcctgaggagccacagttgcgcatgaagaataatgaagaagccgaggattacgacgacgatctcaccgattctgagatggacgtggtgaggtttgatgacgacaactctccctccttcattcaaatccggagcgtggcgaagaaacaccccaagacttgggtccactatatagcggcggaagaggaggattgggattacgctcctcttgtattggcaccagatgaccgctcatacaaaagccagtacctcaacaacggaccgcagagaattggccggaagtataagaaagtgcgatttatggcctatacagacgaaacctttaagacaagggaggccatccagcatgagagtgggattttgggacctcttctttacggcgaagttggtgataccctcctcatcatcttcaagaatcaagcttctcgcccctataacatttacccacacgggatcactgacgttaggcctttgtatagcagaagacttcccaaaggcgtgaagcatctcaaagacttccccattttgccaggcgagatctttaagtacaaatggaccgtcacagtggaagatggaccgactaaatcagaccctcgatgccttacgcggtactattcctccttcgtgaatatggagagagatttggcaagcggactcataggaccactcctcatctgttacaaggaatctgtagaccagaggggtaaccagattatgagtgataaacgcaatgtgatcctttttagcgtcttcgacgagaaccggtcctggtacttgaccgagaatatacaaaggttccttcccaaccccgcaggcgttcagttggaagaccctgagtttcaggccagcaatattatgcactcaatcaacggctatgtgtttgatagtctccagctttctgtttgcctccatgaagtagcctattggtacatcttgtcaattggtgctcaaacagacttcctctccgtcttcttctccggctacacctttaagcacaagatggtgtatgaggacactctcacactctttccattttctggagaaaccgtgttcatgagcatggagaatccaggcctttggatcttgggttgccacaacagtgattttcgcaatcggggaatgactgctctcctcaaagtcagcagctgtgataagaacacaggcgactattacgaagattcttacgaggacataagtgcctacttgttgtccaagaataacgccattgagcccagatcattctcccagaatcctcccgtgcttaaaaggcatcagcgcgaaatcaccagaactactcttcagtctgatcaagaggagattgactatgacgacaccataagcgtggaaatgaagaaggaggatttcgatatctatgacgaagatgagaaccagtctccgcggagctttcagaagaagacgcgacactacttcattgcagcagtcgaaaggctttgggactacggtatgtcatcatcccctcatgtgttgcgcaatagagctcagagtggaagtgttccacagttcaagaaagtcgtctttcaagagtttacagatggcagcttcacacagcctctctatcggggcgagcttaacgaacatttgggactccttggtccctatatccgagccgaagtggaggacaacattatggttacctttaggaatcaagcctctcgcccctacagcttctactcctccctcatcagttatgaggaggatcagagacaaggcgctgaaccacggaagaactttgtgaaaccgaatgagacgaagacctacttctggaaagtacagcaccacatggcccccacaaaagacgaattcgattgcaaagcatgggcgtatttttcagacgttgacttggagaaagatgtacattcaggacttattggtcctttgttggtgtgtcacactaacactctcaatccagcccatggcaggcaggtgacagtccaggaattcgctcttttctttaccatctttgatgagaccaagtcctggtacttcacggaaaacatggagcgcaattgcagagccccctgtaacatacagatggaggaccctacctttaaggaaaattatcggttccacgcaatcaacggatacattatggatacactccctggccttgtgatggctcaggaccaacgaatcaggtggtacctcctcagcatgggttctaatgagaacatacactccattcacttttcaggacatgtgttcactgtccggaagaaagaagagtataagatggccctctacaatttgtatccaggcgtgtttgagaccgttgaaatgcttccctctaaagctggcatctggagagtagagtgcttgatcggagaacatcttcacgcaggtatgagcaccttgttcctcgtgtacagcaacaaatgtcagaccccacttggcatggccagtggacacattcgcgactttcagatcacagcatctggccagtatggacaatgggccccaaagttggctcgcctccattactccggtagcataaatgcgtggtccactaaagaacctttcagctggattaaggtcgatcttcttgcccccatgatcatccacggcattaagacacagggagcgaggcagaaaccgtcctccctctacatctcacagttcattattatgtatagtttggacggcaagaagtggcaaacttatagaggtaacagtactggaacactcatggtgttcttcggcaacgttgatagctctggcatcaaacacaacatctttaatcctcccataatagctcggtacatcagattgcatccgacccactacagcattaggagtacactccgaatggagcttatgggttgcgacttgaattcctgttcaatgccactcggaatggagtctaaagccatctctgatgcacagataaccgccagtagctactttacgaacatgtttgctacgtggtcaccctctaaggcaaggcttcatttgcaaggccggtctaatgcctggagacctcaggtgaacaacccgaaagaatggctccaggtggactttcagaagaccatgaaagtaacaggtgtcactactcagggagttaagtccttggataccagcatgtatgtgaaggagttccttatttcctcatcacaagatggccaccagtggaccctcttctttcagaatggtaaggtcaaagtgtttcagggcaatcaagacagcttcacacccgtggtgaacagtcttgatcctccactcttgacacgataccttcgaatccatccacagtcttgggttcaccagattgcattgcgcatggaagtacttggatgcgaggctcaggacctctac

SEQ ID NO: 548 - protein, 1457 aa, synthetic construct
  REGION 1..1457: note = Variant of human B-domain deleted Factor VIII
MQIELSTCFFLCLLRFCFSATRRYYLGAVELSWDYMQSDLGELPVDARFPPRVPKSFPFNTSVVYKKTLFVEFTDHLFNIAKPRPPWMGLLGPTIQAEVYDTVVITLKNMASHPVSLHAVGVSYWKASEGAEYDDQTSQREKEDDKVFPGGSHTYVWQVLKENGPMASDPLCLTYSYLSHVDLVKDLNSGLIGALLVCREGSLAKEKTQTLHKFILLFAVFDEGKSWHSETKNSLMQDRDAASARAWPKMHTVNGYVNRSLPGLIGCHRKSVYWHVIGMGTTPEVHSIFLEGHTFLVRNHRQASLEISPITFLTAQTLLMDLGQFLLFCHISSHQHDGMEAYVKVDSCPEEPQLRMKNNEEAEDYDDDLTDSEMDVVRFDDDNSPSFIQIRSVAKKHPKTWVHYIAAEEEDWDYAPLVLAPDDRSYKSQYLNNGPQRIGRKYKKVRFMAYTDETFKTREAIQHESGILGPLLYGEVGDTLLIIFKNQASRPYNIYPHGITDVRPLYSRRLPKGVKHLKDFPILPGEIFKYKWTVTVEDGPTKSDPRCLTRYYSSFVNMERDLASGLIGPLLICYKESVDQRGNQIMSDKRNVILFSVFDENRSWYLTENIQRFLPNPAGVQLEDPEFQASNIMHSINGYVFDSLQLSVCLHEVAYWYILSIGAQTDFLSVFFSGYTFKHKMVYEDTLTLFPFSGETVFMSMENPGLWILGCHNSDFRNRGMTALLKVSSCDKNTGDYYEDSYEDISAYLLSKNNAIEPRSFSQNPPVLKRHQREITRTTLQSDQEEIDYDDTISVEMKKEDFDIYDEDENQSPRSFQKKTRHYFIAAVERLWDYGMSSSPHVLRNRAQSGSVPQFKKVVFQEFTDGSFTQPLYRGELNEHLGLLGPYIRAEVEDNIMVTFRNQASRPYSFYSSLISYEEDQRQGAEPRKNFVKPNETKTYFWKVQHHMAPTKDEFDCKAWAYFSDVDLEKDVHSGLIGPLLVCHTNTLNPAHGRQVTVQEFALFFTIFDETKSWYFTENMERNCRAPCNIQMEDPTFKENYRFHAINGYIMDTLPGLVMAQDQRIRWYLLSMGSNENIHSIHFSGHVFTVRKKEEYKMALYNLYPGVFETVEMLPSKAGIWRVECLIGEHLHAGMSTLFLVYSNKCQTPLGMASGHIRDFQITASGQYGQWAPKLARLHYSGSINAWSTKEPFSWIKVDLLAPMIIHGIKTQGARQKPSSLYISQFIIMYSLDGKKWQTYRGNSTGTLMVFFGNVDSSGIKHNIFNPPIIARYIRLHPTHYSIRSTLRMELMGCDLNSCSMPLGMESKAISDAQITASSYFTNMFATWSPSKARLHLQGRSNAWRPQVNNPKEWLQVDFQKTMKVTGVTTQGVKSLDTSMYVKEFLISSSQDGHQWTLFFQNGKVKVFQGNQDSFTPVVNSLDPPLLTRYLRIHPQSWVHQIALRMEVLGCEAQDLY

SEQ ID NO: 549 - DNA, 4371 bp, synthetic construct
  misc_feature 1..4371: note = Variant of human B-domain deleted Factor VIII
  source 1..4371: mol_type = other DNA
atgcagattgaactgtctacctgcttcttcctctgtttgctgaggttctgctttagcgccactagacggtactaccttggcgctgtggagctgtcctgggactatatgcagagtgatttgggagagcttcccgtcgacgcacgatttcctcctcgcgttccaaagtcatttcccttcaacacaagcgtggtgtacaagaagacgctcttcgtcgaattcaccgatcacctgttcaatatcgccaaacccagaccaccatggatgggtcttttggggcctaccatacaagcggaggtgtatgacacagttgttatcactctcaagaacatggcttctcatccggtaagtcttcacgcagtgggcgtgtcctactggaaagcttcagaaggagccgagtatgatgatcagacatcccagagggagaaagaagacgacaaggtatttccaggtgggtctcatacctatgtgtggcaagtgctcaaagagaatggccctatggcaagcgatccgctctgtttgacttacagctacctttcacacgttgacctcgtcaaggacctcaactccgggttgattggagccttgttggtatgcagggaaggatctcttgccaaagagaagacacagaccctccacaagtttatccttctctttgctgtgttcgatgagggcaaaagttggcatagcgaaacgaagaattccctcatgcaggatcgcgacgcagccagcgccagagcttggcccaagatgcacactgtgaacggatatgtcaataggtcacttcctggcttgattgggtgtcatcggaaaagtgtctactggcacgtgatcggaatggggacaacaccagaggtccactccatatttctcgaaggccataccttccttgttcgaaaccacagacaggcatccttggagatctctcccattacctttctcactgcccaaacgctccttatggacttgggtcagttccttctcttctgccatatcagctcacaccagcatgatggtatggaagcttatgtgaaagtcgacagttgtcctgaggagccacagttgcgcatgaagaataatgaagaagccgaggattacgacgacgatctcaccgattctgagatggacgtggtgaggtttgatgacgacaactctccctccttcattcaaatccggagcgtggcgaagaaacaccccaagacttgggtccactatatagcggcggaagaggaggattgggattacgctcctcttgtattggcaccagatgaccgctcatacaaaagccagtacctcaacaacggaccgcagagaattggccggaagtataagaaagtgcgatttatggcctatacagacgaaacctttaagacaagggaggccatccagcatgagagtgggattttgggacctcttctttacggcgaagttggtgataccctcctcatcatcttcaagaatcaagcttctcgcccctataacatttacccacacgggatcactgacgttaggcctttgtatagcagaagacttcccaaaggcgtgaagcatctcaaagacttccccattttgccaggcgagatctttaagtacaaatggaccgtcacagtggaagatggaccgactaaatcagaccctcgatgccttacgcggtactattcctccttcgtgaatatggagagagatttggcaagcggactcataggaccactcctcatctgttacaaggaatctgtagaccagaggggtaaccagattatgagtgataaacgcaatgtgatcctttttagcgtcttcgacgagaaccggtcctggtacttgaccgagaatatacaaaggttccttcccaaccccgcaggcgttcagttggaagaccctgagtttcaggccagcaatattatgcactcaatcaacggctatgtgtttgatagtctccagctttctgtttgcctccatgaagtagcctattggtacatcttgtcaattggtgctcaaacagacttcctctccgtcttcttctccggctacacctttaagcacaagatggtgtatgaggacactctcacactctttccattttctggagaaaccgtgttcatgagcatggagaatccaggcctttggatcttgggttgccacaacagtgattttcgcaatcggggaatgactgctctcctcaaagtcagcagctgtgataagaacacaggcgactattacgaagattcttacgaggacataagtgcctacttgttgtccaagaataacgccattaagcccagatcattctcccagaatcctcccgtgcttaaaaggcatcagcgcgaaatcaccagaactactcttcagtctgatcaagaggagattgactatgacgacaccataagcgtggaaatgaagaaggaggatttcgatatctatgacgaagatgagaaccagtctccgcggagctttcagaagaagacgcgacactacttcattgcagcagtcgaaaggctttgggactacggtatgtcatcatcccctcatgtgttgcgcaatagagctcagagtggaagtgttccacagttcaagaaagtcgtctttcaagagtttacagatggcagcttcacacagcctctctatcggggcgagcttaacgaacatttgggactccttggtccctatatccgagccgaagtggaggacaacattatggttacctttaggaatcaagcctctcgcccctacagcttctactcctccctcatcagttatgaggaggatcagagacaaggcgctgaaccacggaagaactttgtgaaaccgaatgagacgaagacctacttctggaaagtacagcaccacatggcccccacaaaagacgaattcgattgcaaagcatgggcgtatttttcagacgttgacttggagaaagatgtacattcaggacttattggtcctttgttggtgtgtcacactaacactctcaatccagcccatggcaggcaggtgacagtccaggaattcgctcttttctttaccatctttgatgagaccaagtcctggtacttcacggaaaacatggagcgcaattgcagagccccctgtaacatacagatggaggaccctacctttaaggaaaattatcggttccacgcaatcaacggatacattatggatacactccctggccttgtgatggctcaggaccaacgaatcaggtggtacctcctcagcatgggttctaatgagaacatacactccattcacttttcaggacatgtgttcactgtccggaagaaagaagagtataagatggccctctacaatttgtatccaggcgtgtttgagaccgttgaaatgcttccctctaaagctggcatctggagagtagagtgcttgatcggagaacatcttcacgcaggtatgagcaccttgttcctcgtgtacagcaacaaatgtcagaccccacttggcatggccagtggacacattcgcgactttcagatcacagcatctggccagtatggacaatgggccccaaagttggctcgcctccattactccggtagcataaatgcgtggtccactaaagaacctttcagctggattaaggtcgatcttcttgcccccatgatcatccacggcattaagacacagggagcgaggcagaaattctcctccctctacatctcacagttcattattatgtatagtttggacggcaagaagtggcaaacttatagaggtaacagtactggaacactcatggtgttcttcggcaacgttgatagctctggcatcaaacacaacatctttaatcctcccataatagctcggtacatcagattgcatccgacccactacagcattaggagtacactccgaatggagcttatgggttgcgacttgaattcctgttcaatgccactcggaatggagtctaaagccatctctgatgcacagataaccgccagtagctactttacgaacatgtttgctacgtggtcaccctctaaggcaaggcttcatttgcaaggccggtctaatgcctggagacctcaggtgaacaacccgaaagaatggctccaggtggactttcagaagaccatgaaagtaacaggtgtcactactcagggagttaagtccttggataccagcatgtatgtgaaggagttccttatttcctcatcacaagatggccaccagtggaccctcttctttcagaatggtaaggtcaaagtgtttcagggcaatcaagacagcttcacacccgtggtgaacagtcttgatcctccactcttgacacgataccttcgaatccatccacagtcttgggttcaccagattgcattgcgcatggaagtacttggatgcgaggctcaggacctctac

SEQ ID NO: 550 - protein, 1457 aa, synthetic construct
  REGION 1..1457: note = Variant of human B-domain deleted Factor VIII
MQIELSTCFFLCLLRFCFSATRRYYLGAVELSWDYMQSDLGELPVDARFPPRVPKSFPFNTSVVYKKTLFVEFTDHLFNIAKPRPPWMGLLGPTIQAEVYDTVVITLKNMASHPVSLHAVGVSYWKASEGAEYDDQTSQREKEDDKVFPGGSHTYVWQVLKENGPMASDPLCLTYSYLSHVDLVKDLNSGLIGALLVCREGSLAKEKTQTLHKFILLFAVFDEGKSWHSETKNSLMQDRDAASARAWPKMHTVNGYVNRSLPGLIGCHRKSVYWHVIGMGTTPEVHSIFLEGHTFLVRNHRQASLEISPITFLTAQTLLMDLGQFLLFCHISSHQHDGMEAYVKVDSCPEEPQLRMKNNEEAEDYDDDLTDSEMDVVRFDDDNSPSFIQIRSVAKKHPKTWVHYIAAEEEDWDYAPLVLAPDDRSYKSQYLNNGPQRIGRKYKKVRFMAYTDETFKTREAIQHESGILGPLLYGEVGDTLLIIFKNQASRPYNIYPHGITDVRPLYSRRLPKGVKHLKDFPILPGEIFKYKWTVTVEDGPTKSDPRCLTRYYSSFVNMERDLASGLIGPLLICYKESVDQRGNQIMSDKRNVILFSVFDENRSWYLTENIQRFLPNPAGVQLEDPEFQASNIMHSINGYVFDSLQLSVCLHEVAYWYILSIGAQTDFLSVFFSGYTFKHKMVYEDTLTLFPFSGETVFMSMENPGLWILGCHNSDFRNRGMTALLKVSSCDKNTGDYYEDSYEDISAYLLSKNNAIKPRSFSQNPPVLKRHQREITRTTLQSDQEEIDYDDTISVEMKKEDFDIYDEDENQSPRSFQKKTRHYFIAAVERLWDYGMSSSPHVLRNRAQSGSVPQFKKVVFQEFTDGSFTQPLYRGELNEHLGLLGPYIRAEVEDNIMVTFRNQASRPYSFYSSLISYEEDQRQGAEPRKNFVKPNETKTYFWKVQHHMAPTKDEFDCKAWAYFSDVDLEKDVHSGLIGPLLVCHTNTLNPAHGRQVTVQEFALFFTIFDETKSWYFTENMERNCRAPCNIQMEDPTFKENYRFHAINGYIMDTLPGLVMAQDQRIRWYLLSMGSNENIHSIHFSGHVFTVRKKEEYKMALYNLYPGVFETVEMLPSKAGIWRVECLIGEHLHAGMSTLFLVYSNKCQTPLGMASGHIRDFQITASGQYGQWAPKLARLHYSGSINAWSTKEPFSWIKVDLLAPMIIHGIKTQGARQKFSSLYISQFIIMYSLDGKKWQTYRGNSTGTLMVFFGNVDSSGIKHNIFNPPIIARYIRLHPTHYSIRSTLRMELMGCDLNSCSMPLGMESKAISDAQITASSYFTNMFATWSPSKARLHLQGRSNAWRPQVNNPKEWLQVDFQKTMKVTGVTTQGVKSLDTSMYVKEFLISSSQDGHQWTLFFQNGKVKVFQGNQDSFTPVVNSLDPPLLTRYLRIHPQSWVHQIALRMEVLGCEAQDLY

SEQ ID NO: 551 - DNA, 4371 bp, synthetic construct
  misc_feature 1..4371: note = Variant of human B-domain deleted Factor VIII
  source 1..4371: mol_type = other DNA
atgcagattgaactgtctacctgcttcttcctctgtttgctgaggttctgctttagcgccactagacggtactaccttggcgctgtggagctgtcctgggactatatgcagagtgatttgggagagcttcccgtcgacgcacgatttcctcctcgcgttccaaagtcatttcccttcaacacaagcgtggtgtacaagaagacgctcttcgtcgaattcaccgatcacctgttcaatatcgccaaacccagaccaccatggatgggtcttttggggcctaccatacaagcggaggtgtatgacacagttgttatcactctcaagaacatggcttctcatccggtaagtcttcacgcagtgggcgtgtcctactggaaagcttcagaaggagccgagtatgatgatcagacatcccagagggagaaagaagacgacaaggtatttccaggtgggtctcatacctatgtgtggcaagtgctcaaagagaatggccctatggcaagcgatccgctctgtttgacttacagctacctttcacacgttgacctcgtcaaggacctcaactccgggttgattggagccttgttggtatgcagggaaggatctcttgccaaagagaagacacagaccctccacaagtttatccttctctttgctgtgttcgatgagggcaaaagttggcatagcgaaacgaagaattccctcatgcaggatcgcgacgcagccagcgccagagcttggcccaagatgcacactgtgaacggatatgtcaataggtcacttcctggcttgattgggtgtcatcggaaaagtgtctactggcacgtgatcggaatggggacaacaccagaggtccactccatatttctcgaaggccataccttccttgttcgaaaccacagacaggcatccttggagatctctcccattacctttctcactgcccaaacgctccttatggacttgggtcagttccttctcttctgccatatcagctcacaccagcatgatggtatggaagcttatgtgaaagtcgacagttgtcctgaggagccacagttgcgcatgaagaataatgaagaagccgaggattacgacgacgatctcaccgattctgagatggacgtggtgaggtttgatgacgacaactctccctccttcattcaaatccggagcgtggcgaagaaacaccccaagacttgggtccactatatagcggcggaagaggaggattgggattacgctcctcttgtattggcaccagatgaccgctcatacaaaagccagtacctcaacaacggaccgcagagaattggccggaagtataagaaagtgcgatttatggcctatacagacgaaacctttaagacaagggaggccatccagcatgagagtgggattttgggacctcttctttacggcgaagttggtgataccctcctcatcatcttcaagaatcaagcttctcgcccctataacatttacccacacgggatcactgacgttaggcctttgtatagcagaagacttcccaaaggcgtgaagcatctcaaagacttccccattttgccaggcgagatctttaagtacaaatggaccgtcacagtggaagatggaccgactaaatcagaccctcgatgccttacgcggtactattcctccttcgtgaatatggagagagatttggcaagcggactcataggaccactcctcatctgttacaaggaatctgtagaccagaggggtaaccagattatgagtgataaacgcaatgtgatcctttttagcgtcttcgacgagaaccggtcctggtacttgaccgagaatatacaaaggttccttcccaaccccgcaggcgttcagttggaagaccctgagtttcaggccagcaatattatgcactcaatcaacggctatgtgtttgatagtctccagctttctgtttgcctccatgaagtagcctattggtacatcttgtcaattggtgctcaaacagacttcctctccgtcttcttctccggctacacctttaagcacaagatggtgtatgaggacactctcacactctttccattttctggagaaaccgtgttcatgagcatggagaatccaggcctttggatcttgggttgccacaacagtgattttcgcaatcggggaatgactgctctcctcaaagtcagcagctgtgataagaacacaggcgactattacgaagattcttacgaggacataagtgcctacttgttgtccaagaataacgccattgagcccagatcattctcccagaatcctcccgtgcttaaaaggcatcagcgcgaaatcaccagaactactcttcagtctgatcaagaggagattgactatgacgacaccataagcgtggaaatgaagaaggaggatttcgatatctatgacgaagatgagaaccagtctccgcggagctttcagaagaagacgcgacactacttcattgcagcagtcgaaaggctttgggactacggtatgtcatcatcccctcatgtgttgcgcaatagagctcagagtggaagtgttccacagttcaagaaagtcgtctttcaagagtttacagatggcagcttcacacagcctctctatcggggcgagcttaacgaacatttgggactccttggtccctatatccgagccgaagtggaggacaacattatggttacctttaggaatcaagcctctcgcccctacagcttctactcctccctcatcagttatgaggaggatcagagacaaggcgctgaaccacggaagaactttgtgaaaccgaatgagacgaagacctacttctggaaagtacagcaccacatggcccccacaaaagacgaattcgattgcaaagcatgggcgtatttttcagacgttgacttggagaaagatgtacattcaggacttattggtcctttgttggtgtgtcacactaacactctcaatccagcccatggcaggcaggtgacagtccaggaattcgctcttttctttaccatctttgatgagaccaagtcctggtacttcacggaaaacatggagcgcaattgcagagccccctgtaacatacagatggaggaccctacctttaaggaaaattatcggttccacgcaatcaacggatacattatggatacactccctggccttgtgatggctcaggaccaacgaatcaggtggtacctcctcagcatgggttctaatgagaacatacactccattcacttttcaggacatgtgttcactgtccggaagaaagaagagtataagatggccctctacaatttgtatccaggcgtgtttgagaccgttgaaatgcttccctctaaagctggcatctggagagtagagtgcttgatcggagaacatcttcacgcaggtatgagcaccttgttcctcgtgtacagcaacaaatgtcagaccccacttggcatggccagtggacacattcgcgactttcagatcacagcatctggccagtatggacaatgggccccaaagttggctcgcctccattactccggtagcataaatgcgtggtccactaaagaacctttcagctggattaaggtcgatcttcttgcccccatgatcatccacggcattaagacacagggagcgaggcagaaattctcctccctctacatctcacagttcattattatgtatagtttggacggcaagaagtggcaaacttatagaggtaacagtactggaacactcatggtgttcttcggcaacgttgatagctctggcatcaaacacaacatctttaatcctcccataatagctcggtacatcagattgcatccgacccactacagcattaggagtacactccgaatggagcttatgggttgcgacttgaattcctgttcaatgccactcggaatggagtctaaagccatctctgatgcacagataaccgccagtagctactttacgaacatgtttgctacgtggtcaccctctaaggcaaggcttcatttgcaaggccggtctaatgcctggagacctcaggtgaacaacccgaaagaatggctccaggtggactttcagaagaccatgaaagtaacaggtgtcactactcagggatcgaagtccttggataccagcatgtatgtgaaggagttccttatttcctcatcacaagatggccaccagtggaccctcttctttcagaatggtaaggtcaaagtgtttcagggcaatcaagacagcttcacacccgtggtgaacagtcttgatcctccactcttgacacgataccttcgaatccatccacagtcttgggttcaccagattgcattgcgcatggaagtacttggatgcgaggctcaggacctctac

SEQ ID NO: 552 - protein, 1457 aa, synthetic construct
  REGION 1..1457: note = Variant of human B-domain deleted Factor VIII
MQIELSTCFFLCLLRFCFSATRRYYLGAVELSWDYMQSDLGELPVDARFPPRVPKSFPFNTSVVYKKTLFVEFTDHLFNIAKPRPPWMGLLGPTIQAEVYDTVVITLKNMASHPVSLHAVGVSYWKASEGAEYDDQTSQREKEDDKVFPGGSHTYVWQVLKENGPMASDPLCLTYSYLSHVDLVKDLNSGLIGALLVCREGSLAKEKTQTLHKFILLFAVFDEGKSWHSETKNSLMQDRDAASARAWPKMHTVNGYVNRSLPGLIGCHRKSVYWHVIGMGTTPEVHSIFLEGHTFLVRNHRQASLEISPITFLTAQTLLMDLGQFLLFCHISSHQHDGMEAYVKVDSCPEEPQLRMKNNEEAEDYDDDLTDSEMDVVRFDDDNSPSFIQIRSVAKKHPKTWVHYIAAEEEDWDYAPLVLAPDDRSYKSQYLNNGPQRIGRKYKKVRFMAYTDETFKTREAIQHESGILGPLLYGEVGDTLLIIFKNQASRPYNIYPHGITDVRPLYSRRLPKGVKHLKDFPILPGEIFKYKWTVTVEDGPTKSDPRCLTRYYSSFVNMERDLASGLIGPLLICYKESVDQRGNQIMSDKRNVILFSVFDENRSWYLTENIQRFLPNPAGVQLEDPEFQASNIMHSINGYVFDSLQLSVCLHEVAYWYILSIGAQTDFLSVFFSGYTFKHKMVYEDTLTLFPFSGETVFMSMENPGLWILGCHNSDFRNRGMTALLKVSSCDKNTGDYYEDSYEDISAYLLSKNNAIEPRSFSQNPPVLKRHQREITRTTLQSDQEEIDYDDTISVEMKKEDFDIYDEDENQSPRSFQKKTRHYFIAAVERLWDYGMSSSPHVLRNRAQSGSVPQFKKVVFQEFTDGSFTQPLYRGELNEHLGLLGPYIRAEVEDNIMVTFRNQASRPYSFYSSLISYEEDQRQGAEPRKNFVKPNETKTYFWKVQHHMAPTKDEFDCKAWAYFSDVDLEKDVHSGLIGPLLVCHTNTLNPAHGRQVTVQEFALFFTIFDETKSWYFTENMERNCRAPCNIQMEDPTFKENYRFHAINGYIMDTLPGLVMAQDQRIRWYLLSMGSNENIHSIHFSGHVFTVRKKEEYKMALYNLYPGVFETVEMLPSKAGIWRVECLIGEHLHAGMSTLFLVYSNKCQTPLGMASGHIRDFQITASGQYGQWAPKLARLHYSGSINAWSTKEPFSWIKVDLLAPMIIHGIKTQGARQKFSSLYISQFIIMYSLDGKKWQTYRGNSTGTLMVFFGNVDSSGIKHNIFNPPIIARYIRLHPTHYSIRSTLRMELMGCDLNSCSMPLGMESKAISDAQITASSYFTNMFATWSPSKARLHLQGRSNAWRPQVNNPKEWLQVDFQKTMKVTGVTTQGSKSLDTSMYVKEFLISSSQDGHQWTLFFQNGKVKVFQGNQDSFTPVVNSLDPPLLTRYLRIHPQSWVHQIALRMEVLGCEAQDLY

SEQ ID NO: 553 - DNA, 4371 bp, synthetic construct
  misc_feature 1..4371: note = Variant of human B-domain deleted Factor VIII
  source 1..4371: mol_type = other DNA
atgcagattgaactgtctacctgcttcttcctctgtttgctgaggttctgctttagcgccactagacggtactaccttggcgctgtggagctgtcctgggactatatgcagagtgatttgggagagcttcccgtcgacgcacgatttcctcctcgcgttccaaagtcatttcccttcaacacaagcgtggtgtacaagaagacgctcttcgtcgaattcaccgatcacctgttcaatatcgccaaacccagaccaccatggatgggtcttttggggcctaccatacaagcggaggtgtatgacacagttgttatcactctcaagaacatggcttctcatccggtaagtcttcacgcagtgggcgtgtcctactggaaagcttcagaaggagccgagtatgatgatcagacatcccagagggagaaagaagacgacaaggtatttccaggtgggtctcatacctatgtgtggcaagtgctcaaagagaatggccctatggcaagcgatccgctctgtttgacttacagctacctttcacacgttgacctcgtcaaggacctcaactccgggttgattggagccttgttggtatgcagggaaggatctcttgccaaagagaagacacagaccctccacaagtttatccttctctttgctgtgttcgatgagggcaaaagttggcatagcgaaacgaagaattccctcatgcaggatcgcgacgcagccagcgccagagcttggcccaagatgcacactgtgaacggatatgtcaataggtcacttcctggcttgattgggtgtcatcggaaaagtgtctactggcacgtgatcggaatggggacaacaccagaggtccactccatatttctcgaaggccataccttccttgttcgaaaccacagacaggcatccttggagatctctcccattacctttctcactgcccaaacgctccttatggacttgggtcagttccttctcttctgccatatcagctcacaccagcatgatggtatggaagcttatgtgaaagtcgacagttgtcctgaggagccacagttgcgcatgaagaataatgaagaagccgaggattacgacgacgatctcaccgattctgagatggacgtggtgaggtttgatgacgacaactctccctccttcattcaaatccggagcgtggcgaagaaacaccccaagacttgggtccactatatagcggcggaagaggaggattgggattacgctcctcttgtattggcaccagatgaccgctcatacaaaagccagtacctcaacaacggaccgcagagaattggccggaagtataagaaagtgcgatttatggcctatacagacgaaacctttaagacaagggaggccatccagcatgagagtgggattttgggacctcttctttacggcgaagttggtgataccctcctcatcatcttcaagaatcaagcttctcgcccctataacatttacccacacgggatcactgacgttaggcctttgtatagcagaagacttcccaaaggcgtgaagcatctcaaagacttccccattttgccaggcgagatctttaagtacaaatggaccgtcacagtggaagatggaccgactaaatcagaccctcgatgccttacgcggtactattcctccttcgtgaatatggagagagatttggcaagcggactcataggaccactcctcatctgttacaaggaatctgtagaccagaggggtaaccagattatgagtgataaacgcaatgtgatcctttttagcgtcttcgacgagaaccggtcctggtacttgaccgagaatatacaaaggttccttcccaaccccgcaggcgttcagttggaagaccctgagtttcaggccagcaatattatgcactcaatcaacggctatgtgtttgatagtctccagctttctgtttgcctccatgaagtagcctattggtacatcttgtcaattggtgctcaaacagacttcctctccgtcttcttctccggctacacctttaagcacaagatggtgtatgaggacactctcacactctttccattttctggagaaaccgtgttcatgagcatggagaatccaggcctttggatcttgggttgccacaacagtgattttcgcaatcggggaatgactgctctcctcaaagtcagcagctgtgataagaacacaggcgactattacgaagattcttacgaggacataagtgcctacttgttgtccaagaataacgccattgagcccagatcattctcccagaatcctcccgtgcttaaaaggcatcagcgcgaaatcaccagaactactcttcagtctgatcaagaggagattgactatgacgacaccataagcgtggaaatgaagaaggaggatttcgatatctatgacgaagatgagaaccagtctccgcggagctttcagaagaagacgcgacactacttcattgcagcagtcgaaaggctttgggactacggtatgtcatcatcccctcatgtgttgcgcaatagagctcagagtggaagtgttccacagttcaagaaagtcgtctttcaagagtttacagatggcagcttcacacagcctctctatcggggcgagcttaacgaacatttgggactccttggtccctatatccgagccgaagtggaggacaacattatggttacctttaggaatcaagcctctcgcccctacagcttctactcctccctcatcagttatgaggaggatcagagacaaggcgctgaaccacggaagaactttgtgaaaccgaatgagacgaagacctacttctggaaagtacagcaccacatggcccccacaaaagacgaattcgattgcaaagcatgggcgtatttttcagacgttgacttggagaaagatgtacattcaggacttattggtcctttgttggtgtgtcacactaacactctcaatccagcccatggcaggcaggtgacagtccaggaattcgctcttttctttaccatctttgatgagaccaagtcctggtacttcacggaaaacatggagcgcaattgcagagccccctgtaacatacagatggaggaccctacctttaaggaaaattatcggttccacgcaatcaacggatacattatggatacactccctggccttgtgatggctcaggaccaacgaatcaggtggtacctcctcagcatgggttctaatgagaacatacactccattcacttttcaggacatgtgttcactgtccggaagaaagaagagtataagatggccctctacaatttgtatccaggcgtgtttgagaccgttgaaatgcttccctctaaagctggcatctggagagtagagtgcttgatcggagaacatcttcacgcaggtatgagcaccttgttcctcgtgtacagcaacaaatgtcagaccccacttggcatggccagtggacacattcgcgactttcagatcacagcatctggccagtatggacaatgggccccaaagttggctcgcctccattactccggtagcataaatgcgtggtccactaaagaacctttcagctggattaaggtcgatcttcttgcccccatgatcatccacggcattaagacacagggagcgaggcagaaattctcctccctctacatctcacagttcattattatgtatagtttggacggcaagaagtggcaaacttatagaggtaacagtactggaacactcatggtgttcttcggcaacgttgatagctctggcatcaaacacaacatctttaatcctcccataatagctcggtacatcagattgcatccgacccactacagcattaggagtacactccgaatggagcttatgggttgcgacttgaattcctgttcaatgccactcggaatggagtctaaagccatctctgatgcacagataaccgccagtagctactttacgaacatgtttgctacgtggtcaccctctaaggcaaggcttcatttgcaaggccggtctaatgcctggagacctcaggtgaacaacccgaaagaatggctccaggtggactttcagaagaccatgaaagtaacaggtgtcactactcagggagttaagtccttggataccagcatgtatgtgaaggagttccttatttcctcatcacaagatggccaccagtggaccctcttctttcagaatggtaaggtcaaagtgtttcagggcaatcaagacagcttcacacccgtggtgaacagtcttgatcctccactcttgacacgataccttcgaatccatccacagtcttgggttgggcagattgcattgcgcatggaagtacttggatgcgaggctcaggacctctac

SEQ ID NO: 554 - protein, 1457 aa, synthetic construct
  REGION 1..1457: note = Variant of human B-domain deleted Factor VIII
MQIELSTCFFLCLLRFCFSATRRYYLGAVELSWDYMQSDLGELPVDARFPPRVPKSFPFNTSVVYKKTLFVEFTDHLFNIAKPRPPWMGLLGPTIQAEVYDTVVITLKNMASHPVSLHAVGVSYWKASEGAEYDDQTSQREKEDDKVFPGGSHTYVWQVLKENGPMASDPLCLTYSYLSHVDLVKDLNSGLIGALLVCREGSLAKEKTQTLHKFILLFAVFDEGKSWHSETKNSLMQDRDAASARAWPKMHTVNGYVNRSLPGLIGCHRKSVYWHVIGMGTTPEVHSIFLEGHTFLVRNHRQASLEISPITFLTAQTLLMDLGQFLLFCHISSHQHDGMEAYVKVDSCPEEPQLRMKNNEEAEDYDDDLTDSEMDVVRFDDDNSPSFIQIRSVAKKHPKTWVHYIAAEEEDWDYAPLVLAPDDRSYKSQYLNNGPQRIGRKYKKVRFMAYTDETFKTREAIQHESGILGPLLYGEVGDTLLIIFKNQASRPYNIYPHGITDVRPLYSRRLPKGVKHLKDFPILPGEIFKYKWTVTVEDGPTKSDPRCLTRYYSSFVNMERDLASGLIGPLLICYKESVDQRGNQIMSDKRNVILFSVFDENRSWYLTENIQRFLPNPAGVQLEDPEFQASNIMHSINGYVFDSLQLSVCLHEVAYWYILSIGAQTDFLSVFFSGYTFKHKMVYEDTLTLFPFSGETVFMSMENPGLWILGCHNSDFRNRGMTALLKVSSCDKNTGDYYEDSYEDISAYLLSKNNAIEPRSFSQNPPVLKRHQREITRTTLQSDQEEIDYDDTISVEMKKEDFDIYDEDENQSPRSFQKKTRHYFIAAVERLWDYGMSSSPHVLRNRAQSGSVPQFKKVVFQEFTDGSFTQPLYRGELNEHLGLLGPYIRAEVEDNIMVTFRNQASRPYSFYSSLISYEEDQRQGAEPRKNFVKPNETKTYFWKVQHHMAPTKDEFDCKAWAYFSDVDLEKDVHSGLIGPLLVCHTNTLNPAHGRQVTVQEFALFFTIFDETKSWYFTENMERNCRAPCNIQMEDPTFKENYRFHAINGYIMDTLPGLVMAQDQRIRWYLLSMGSNENIHSIHFSGHVFTVRKKEEYKMALYNLYPGVFETVEMLPSKAGIWRVECLIGEHLHAGMSTLFLVYSNKCQTPLGMASGHIRDFQITASGQYGQWAPKLARLHYSGSINAWSTKEPFSWIKVDLLAPMIIHGIKTQGARQKFSSLYISQFIIMYSLDGKKWQTYRGNSTGTLMVFFGNVDSSGIKHNIFNPPIIARYIRLHPTHYSIRSTLRMELMGCDLNSCSMPLGMESKAISDAQITASSYFTNMFATWSPSKARLHLQGRSNAWRPQVNNPKEWLQVDFQKTMKVTGVTTQGVKSLDTSMYVKEFLISSSQDGHQWTLFFQNGKVKVFQGNQDSFTPVVNSLDPPLLTRYLRIHPQSWVGQIALRMEVLGCEAQDLY

SEQ ID NO: 555 - DNA, 4371 bp, synthetic construct
  misc_feature 1..4371: note = Variant of human B-domain deleted Factor VIII
  source 1..4371: mol_type = other DNA
atgcagattgaactgtctacctgcttcttcctctgtttgctgaggttctgctttagcgccactagacggtactaccttggcgctgtggagctgtcctgggactatatgcagagtgatttgggagagcttcccgtcgacgcacgatttcctcctcgcgttccaaagtcatttcccttcaacacaagcgtggtgtacaagaagacgctcttcgtcgaattcaccgatcacctgttcaatatcgccaaacccagaccaccatggatgggtcttttggggcctaccatacaagcggaggtgtatgacacagttgttatcactctcaagaacatggcttctcatccggtaagtcttcacgcagtgggcgtgtcctactggaaagcttcagaaggagccgagtatgatgatcagacatcccagagggagaaagaagacgacaaggtatttccaggtgggtctcatacctatgtgtggcaagtgctcaaagagaatggccctatggcaagcgatccgctctgtttgacttacagctacctttcacacgttgacctcgtcaaggacctcaactccgggttgattggagccttgttggtatgcagggaaggatctcttgccaaagagaagacacagaccctccacaagtttatccttctctttgctgtgttcgatgagggcaaaagttggcatagcgaaacgaagaattccctcatgcaggatcgcgacgcagccagcgccagagcttggcccaagatgcacactgtgaacggatatgtcaataggtcacttcctggcttgattgggtgtcatcggaaaagtgtctactggcacgtgatcggaatggggacaacaccagaggtccactccatatttctcgaaggccataccttccttgttcgaaaccacagacaggcatccttggagatctctcccattacctttctcactgcccaaacgctccttatggacttgggtcagttccttctcttctgccatatcagctcacaccagcatgatggtatggaagcttatgtgaaagtcgacagttgtcctgaggagccacagttgcgcatgaagaataatgaagaagccgaggattacgacgacgatctcaccgattctgagatggacgtggtgaggtttgatgacgacaactctccctccttcattcaaatccggagcgtggcgaagaaacaccccaagacttgggtccactatatagcggcggaagaggaggattgggattacgctcctcttgtattggcaccagatgaccgctcatacaaaagccagtacctcaacaacggaccgcagagaattggccggaagtataagaaagtgcgatttatggcctatacagacgaaacctttaagacaagggaggccatccagcatgagagtgggattttgggacctcttctttacggcgaagttggtgataccctcctcatcatcttcaagaatcaagcttctcgcccctataacatttacccacacgggatcactgacgttaggcctttgtatagcagaagacttcccaaaggcgtgaagcatctcaaagacttccccattttgccaggcgagatctttaagtacaaatggaccgtcacagtggaagatggaccgactaaatcagaccctcgatgccttacgcggtactattcctccttcgtgaatatggagagagatttggcaagcggactcataggaccactcctcatctgttacaaggaatctgtagaccagaggggtaaccagattatgagtgataaacgcaatgtgatcctttttagcgtcttcgacgagaaccggtcctggtacttgaccgagaatatacaaaggttccttcccaaccccgcaggcgttcagttggaagaccctgagtttcaggccagcaatattatgcactcaatcaacggctatgtgtttgatagtctccagctttctgtttgcctccatgaagtagcctattggtacatcttgtcaattggtgctcaaacagacttcctctccgtcttcttctccggctacacctttaagcacaagatggtgtatgaggacactctcacactctttccattttctggagaaaccgtgttcatgagcatggagaatccaggcctttggatcttgggttgccacaacagtgattttcgcaatcggggaatgactgctctcctcaaagtcagcagctgtgataagaacacaggcgactattacgaagattcttacgaggacataagtgcctacttgttgtccaagaataacgccattgagcccagatcattctcccagaatcctcccgtgcttaaaaggcatcagcgcgaaatcaccagaactactcttcagtctgatcaagaggagattgactatgacgacaccataagcgtggaaatgaagaaggaggatttcgatatctatgacgaagatgagaaccagtctccgcggagctttcagaagaagacgcgacactacttcattgcagcagtcgaaaggctttgggactacggtatgtcatcatcccctcatgtgttgcgcaatagagctcagagtggaagtgttccacagttcaagaaagtcgtctttcaagagtttacagatggcagcttcacacagcctctctatcggggcgagcttaacgaacatttgggactccttggtccctatatccgagccgaagtggaggacaacattatggttacctttaggaatcaagcctctcgcccctacagcttctactcctccctcatcagttatgaggaggatcagagacaaggcgctgaaccacggaagaactttgtgaaaccgaatgagacgaagacctacttctggaaagtacagcaccacatggcccccacaaaagacgaattcgattgcaaagcatgggcgtatttttcagacgttgacttggagaaagatgtacattcaggacttattggtcctttgttggtgtgtcacactaacactctcaatccagcccatggcaggcaggtgacagtccaggaattcgctcttttctttaccatctttgatgagaccaagtcctggtacttcacggaaaacatggagcgcaattgcagagccccctgtaacatacagatggaggaccctacctttaaggaaaattatcggttccacgcaatcaacggatacattatggatacactccctggccttgtgatggctcaggaccaacgaatcaggtggtacctcctcagcatgggttctaatgagaacatacactccattcacttttcaggacatgtgttcactgtccggaagaaagaagagtataagatggccctctacaatttgtatccaggcgtgtttgagaccgttgaaatgcttccctctaaagctggcatctggagagtagagtgcttgatcggagaacatcttcacgcaggtatgagcaccttgttcctcgtgtacagcaacaaatgtcagaccccacttggcatggccagtggacacattcgcgactttcagatcacagcatctggccagtatggacaatgggccccaaagttggctcgcctccattactccggtagcataaatgcgtggtccactaaagaacctattagctggattaaggtcgatcttcttgcccccatgatcatccacggcattaagacacagggagcgaggcagaaattctcctccctctacatctcacagttcattattatgtatagtttggacggcaagaagtggcaaacttatagaggtaacagtactggaacactcatggtgttcttcggcaacgttgatagctctggcatcaaacacaacatctttaatcctcccataatagctcggtacatcagattgcatccgacccactacagcattaggagtacactccgaatggagcttatgggttgcgacttgaattcctgttcaatgccactcggaatggagtctaaagccatctctgatgcacagataaccgccagtagctactttacgaacatgtttgctacgtggtcaccctctaaggcaaggcttcatttgcaaggccggtctaatgcctggagacctcaggtgaacaacccgaaagaatggctccaggtggactttcagaagaccatgaaagtaacaggtgtcactactcagggagttaagtccttggataccagcatgtatgtgaaggagttccttatttcctcatcacaagatggccaccagtggaccctcttctttcagaatggtaaggtcaaagtgtttcagggcaatcaagacagcttcacacccgtggtgaacagtcttgatcctccactcttgacacgataccttcgaatccatccacagtcttgggttcaccagattgcattgcgcatggaagtacttggatgcgaggctcaggacctctac

SEQ ID NO: 556 - protein, 1457 aa, synthetic construct
  REGION 1..1457: note = Variant of human B-domain deleted Factor VIII
MQIELSTCFFLCLLRFCFSATRRYYLGAVELSWDYMQSDLGELPVDARFPPRVPKSFPFNTSVVYKKTLFVEFTDHLFNIAKPRPPWMGLLGPTIQAEVYDTVVITLKNMASHPVSLHAVGVSYWKASEGAEYDDQTSQREKEDDKVFPGGSHTYVWQVLKENGPMASDPLCLTYSYLSHVDLVKDLNSGLIGALLVCREGSLAKEKTQTLHKFILLFAVFDEGKSWHSETKNSLMQDRDAASARAWPKMHTVNGYVNRSLPGLIGCHRKSVYWHVIGMGTTPEVHSIFLEGHTFLVRNHRQASLEISPITFLTAQTLLMDLGQFLLFCHISSHQHDGMEAYVKVDSCPEEPQLRMKNNEEAEDYDDDLTDSEMDVVRFDDDNSPSFIQIRSVAKKHPKTWVHYIAAEEEDWDYAPLVLAPDDRSYKSQYLNNGPQRIGRKYKKVRFMAYTDETFKTREAIQHESGILGPLLYGEVGDTLLIIFKNQASRPYNIYPHGITDVRPLYSRRLPKGVKHLKDFPILPGEIFKYKWTVTVEDGPTKSDPRCLTRYYSSFVNMERDLASGLIGPLLICYKESVDQRGNQIMSDKRNVILFSVFDENRSWYLTENIQRFLPNPAGVQLEDPEFQASNIMHSINGYVFDSLQLSVCLHEVAYWYILSIGAQTDFLSVFFSGYTFKHKMVYEDTLTLFPFSGETVFMSMENPGLWILGCHNSDFRNRGMTALLKVSSCDKNTGDYYEDSYEDISAYLLSKNNAIEPRSFSQNPPVLKRHQREITRTTLQSDQEEIDYDDTISVEMKKEDFDIYDEDENQSPRSFQKKTRHYFIAAVERLWDYGMSSSPHVLRNRAQSGSVPQFKKVVFQEFTDGSFTQPLYRGELNEHLGLLGPYIRAEVEDNIMVTFRNQASRPYSFYSSLISYEEDQRQGAEPRKNFVKPNETKTYFWKVQHHMAPTKDEFDCKAWAYFSDVDLEKDVHSGLIGPLLVCHTNTLNPAHGRQVTVQEFALFFTIFDETKSWYFTENMERNCRAPCNIQMEDPTFKENYRFHAINGYIMDTLPGLVMAQDQRIRWYLLSMGSNENIHSIHFSGHVFTVRKKEEYKMALYNLYPGVFETVEMLPSKAGIWRVECLIGEHLHAGMSTLFLVYSNKCQTPLGMASGHIRDFQITASGQYGQWAPKLARLHYSGSINAWSTKEPISWIKVDLLAPMIIHGIKTQGARQKFSSLYISQFIIMYSLDGKKWQTYRGNSTGTLMVFFGNVDSSGIKHNIFNPPIIARYIRLHPTHYSIRSTLRMELMGCDLNSCSMPLGMESKAISDAQITASSYFTNMFATWSPSKARLHLQGRSNAWRPQVNNPKEWLQVDFQKTMKVTGVTTQGVKSLDTSMYVKEFLISSSQDGHQWTLFFQNGKVKVFQGNQDSFTPVVNSLDPPLLTRYLRIHPQSWVHQIALRMEVLGCEAQDLY

SEQ ID NO: 557 - DNA, 4371 bp, synthetic construct
  misc_feature 1..4371: note = Variant of human B-domain deleted Factor VIII
  source 1..4371: mol_type = other DNA
atgcagattgaactgtctacctgcttcttcctctgtttgctgaggttctgctttagcgccactagacggtactaccttggcgctgtggagctgtcctgggactatatgcagagtgatttgggagagcttcccgtcgacgcacgatttcctcctcgcgttccaaagtcatttcccttcaacacaagcgtggtgtacaagaagacgctcttcgtcgaattcaccgatcacctgttcaatatcgccaaacccagaccaccatggatgggtcttttggggcctaccatacaagcggaggtgtatgacacagttgttatcactctcaagaacatggcttctcatccggtaagtcttcacgcagtgggcgtgtcctactggaaagcttcagaaggagccgagtatgatgatcagacatcccagagggagaaagaagacgacaaggtatttccaggtgggtctcatacctatgtgtggcaagtgctcaaagagaatggccctatggcaagcgatccgctctgtttgacttacagctacctttcacacgttgacctcgtcaaggacctcaactccgggttgattggagccttgttggtatgcagggaaggatctcttgccaaagagaagacacagaccctccacaagtttatccttctctttgctgtgttcgatgagggcaaaagttggcatagcgaaacgaagaattccctcatgcaggatcgcgacgcagccagcgccagagcttggcccaagatgcacactgtgaacggatatgtcaataggtcacttcctggcttgattgggtgtcatcggaaaagtgtctactggcacgtgatcggaatggggacaacaccagaggtccactccatatttctcgaaggccataccttccttgttcgaaaccacagacaggcatccttggagatctctcccattacctttctcactgcccaaacgctccttatggacttgggtcagttccttctcttctgccatatcagctcacaccagcatgatggtatggaagcttatgtgaaagtcgacagttgtcctgaggagccacagttgcgcatgaagaataatgaagaagccgaggattacgacgacgatctcaccgattctgagatggacgtggtgaggtttgatgacgacaactctccctccttcattcaaatccggagcgtggcgaagaaacaccccaagacttgggtccactatatagcggcggaagaggaggattgggattacgctcctcttgtattggcaccagatgaccgctcatacaaaagccagtacctcaacaacggaccgcagagaattggccggaagtataagaaagtgcgatttatggcctatacagacgaaacctttaagacaagggaggccatccagcatgagagtgggattttgggacctcttctttacggcgaagttggtgataccctcctcatcatcttcaagaatcaagcttctcgcccctataacatttacccacacgggatcactgacgttaggcctttgtatagcagaagacttcccaaaggcgtgaagcatctcaaagacttccccattttgccaggcgagatctttaagtacaaatggaccgtcacagtggaagatggaccgactaaatcagaccctcgatgccttacgcggtactattcctccttcgtgaatatggagagagatttggcaagcggactcataggaccactcctcatctgttacaaggaatctgtagaccagaggggtaaccagattatgagtgataaacgcaatgtgatcctttttagcgtcttcgacgagaaccggtcctggtacttgaccgagaatatacaaaggttccttcccaaccccgcaggcgttcagttggaagaccctgagtttcaggccagcaatattatgcactcaatcaacggctatgtgtttgatagtctccagctttctgtttgcctccatgaagtagcctattggtacatcttgtcaattggtgctcaaacagacttcctctccgtcttcttctccggctacacctttaagcacaagatggtgtatgaggacactctcacactctttccattttctggagaaaccgtgttcatgagcatggagaatccaggcctttggatcttgggttgccacaacagtgattttcgcaatcggggaatgactgctctcctcaaagtcagcagctgtgataagaacacaggcgactattacgaagattcttacgaggacataagtgcctacttgttgtccaagaataacgccattgagcccagatcattctcccagaatcctcccgtgcttaaaaggcatcagcgcgaaatcaccagaactactcttcagtctgatcaagaggagattgactatgacgacaccataagcgtggaaatgaagaaggaggatttcgatatctatgacgaagatgagaaccagtctccgcggagctttcagaagaagacgcgacactacttcattgcagcagtcgaaaggctttgggactacggtatgtcatcatcccctcatgtgttgcgcaatagagctcagagtggaagtgttccacagttcaagaaagtcgtctttcaagagtttacagatggcagcttcacacagcctctctatcggggcgagcttaacgaacatttgggactccttggtccctatatccgagccgaagtggaggacaacattatggttacctttaggaatcaagcctctcgcccctacagcttctactcctccctcatcagttatgaggaggatcagagacaaggcgctgaaccacggaagaactttgtgaaaccgaatgagacgaagacctacttctggaaagtacagcaccacatggcccccacaaaagacgaattcgattgcaaagcatgggcgtatttttcagacgttgacttggagaaagatgtacattcaggacttattggtcctttgttggtgtgtcacactaacactctcaatccagcccatggcaggcaggtgacagtccaggaattcgctcttttctttaccatctttgatgagaccaagtcctggtacttcacggaaaacatggagcgcaattgcagagccccctgtaacatacagatggaggaccctacctttaaggaaaattatcggttccacgcaatcaacggatacattatggatacactccctggccttgtgatggctcaggaccaacgaatcaggtggtacctcctcagcatgggttctaatgagaacatacactccattcacttttcaggacatgtgttcactgtccggaagaaagaagagtataagatggccctctacaatttgtatccaggcgtgtttgagaccgttgaaatgcttccctctaaagctggcatctggagagtagagtgcttgatcggagaacatcttcacgcaggtatgagcaccttgttcctcgtgtacagcaacaaatgtcagaccccacttggcatggccagtggacacattcgcgactttcagatcacagcatctggccagtatggacaatgggccccaaagttggctcgcctccattactccggtagcataaatgcgtggtccactaaagaacctttcagctggattaaggtcgatcttcttgcccccatgatcatccacggcattaagacacagggagcgaggcagaaattctcctccctctacatctcacagttcattattatgtatagtttggacggcaagaagtggcaaacttatagaggtaacagtactggaacactcatggtgttcttcggcaacgttgatagctctggcatcaaacacaacatctttaatcctcccataatagctcggtacatcagattgcatccgacccactacagcattaggagtacactccgaatggagcttatgggttgcgacttgaattcctgttcaatgccactcggaatggagtctaaagccatctctgatgcacagataaccgccagtagctactttacgaacatgtttgctacgtggtcaccctctaaggcaaggcttcatttgcaaggccggtctaatgcctggagacctcaggtgaacaacccgaaagaatggctccaggtggactttcagaagaccatgaaagtaacaggtgtcactactcagggagttaagtccttggataccagcatgtatgtgaaggagttccttatttcctcatcacaagatggccaccagtggaccctcttctttcagaatggtaaggtcaaagtgtttcagggcaatcaagacagcttcacacccgtggtgaacagtcttgatcctccactcttgacacgataccttcgaatccatccacagtcttggacgcaccagattgcattgcgcatggaagtacttggatgcgaggctcaggacctctac

SEQ ID NO: 558 - protein, 1457 aa, synthetic construct
  REGION 1..1457: note = Variant of human B-domain deleted Factor VIII
MQIELSTCFFLCLLRFCFSATRRYYLGAVELSWDYMQSDLGELPVDARFPPRVPKSFPFNTSVVYKKTLFVEFTDHLFNIAKPRPPWMGLLGPTIQAEVYDTVVITLKNMASHPVSLHAVGVSYWKASEGAEYDDQTSQREKEDDKVFPGGSHTYVWQVLKENGPMASDPLCLTYSYLSHVDLVKDLNSGLIGALLVCREGSLAKEKTQTLHKFILLFAVFDEGKSWHSETKNSLMQDRDAASARAWPKMHTVNGYVNRSLPGLIGCHRKSVYWHVIGMGTTPEVHSIFLEGHTFLVRNHRQASLEISPITFLTAQTLLMDLGQFLLFCHISSHQHDGMEAYVKVDSCPEEPQLRMKNNEEAEDYDDDLTDSEMDVVRFDDDNSPSFIQIRSVAKKHPKTWVHYIAAEEEDWDYAPLVLAPDDRSYKSQYLNNGPQRIGRKYKKVRFMAYTDETFKTREAIQHESGILGPLLYGEVGDTLLIIFKNQASRPYNIYPHGITDVRPLYSRRLPKGVKHLKDFPILPGEIFKYKWTVTVEDGPTKSDPRCLTRYYSSFVNMERDLASGLIGPLLICYKESVDQRGNQIMSDKRNVILFSVFDENRSWYLTENIQRFLPNPAGVQLEDPEFQASNIMHSINGYVFDSLQLSVCLHEVAYWYILSIGAQTDFLSVFFSGYTFKHKMVYEDTLTLFPFSGETVFMSMENPGLWILGCHNSDFRNRGMTALLKVSSCDKNTGDYYEDSYEDISAYLLSKNNAIEPRSFSQNPPVLKRHQREITRTTLQSDQEEIDYDDTISVEMKKEDFDIYDEDENQSPRSFQKKTRHYFIAAVERLWDYGMSSSPHVLRNRAQSGSVPQFKKVVFQEFTDGSFTQPLYRGELNEHLGLLGPYIRAEVEDNIMVTFRNQASRPYSFYSSLISYEEDQRQGAEPRKNFVKPNETKTYFWKVQHHMAPTKDEFDCKAWAYFSDVDLEKDVHSGLIGPLLVCHTNTLNPAHGRQVTVQEFALFFTIFDETKSWYFTENMERNCRAPCNIQMEDPTFKENYRFHAINGYIMDTLPGLVMAQDQRIRWYLLSMGSNENIHSIHFSGHVFTVRKKEEYKMALYNLYPGVFETVEMLPSKAGIWRVECLIGEHLHAGMSTLFLVYSNKCQTPLGMASGHIRDFQITASGQYGQWAPKLARLHYSGSINAWSTKEPFSWIKVDLLAPMIIHGIKTQGARQKFSSLYISQFIIMYSLDGKKWQTYRGNSTGTLMVFFGNVDSSGIKHNIFNPPIIARYIRLHPTHYSIRSTLRMELMGCDLNSCSMPLGMESKAISDAQITASSYFTNMFATWSPSKARLHLQGRSNAWRPQVNNPKEWLQVDFQKTMKVTGVTTQGVKSLDTSMYVKEFLISSSQDGHQWTLFFQNGKVKVFQGNQDSFTPVVNSLDPPLLTRYLRIHPQSWTHQIALRMEVLGCEAQDLY

SEQ ID NO: 559 - DNA, 4371 bp, synthetic construct
  misc_feature 1..4371: note = Variant of human B-domain deleted Factor VIII
  source 1..4371: mol_type = other DNA
atgcagattgaactgtctacctgcttcttcctctgtttgctgaggttctgctttagcgccactagacggtactaccttggcgctgtggagctgtcctgggactatatgcagagtgatttgggagagcttcccgtcgacgcacgatttcctcctcgcgttccaaagtcatttcccttcaacacaagcgtggtgtacaagaagacgctcttcgtcgaattcaccgatcacctgttcaatatcgccaaacccagaccaccatggatgggtcttttggggcctaccatacaagcggaggtgtatgacacagttgttatcactctcaagaacatggcttctcatccggtaagtcttcacgcagtgggcgtgtcctactggaaagcttcagaaggagccgagtatgatgatcagacatcccagagggagaaagaagacgacaaggtatttccaggtgggtctcatacctatgtgtggcaagtgctcaaagagaatggccctatggcaagcgatccgctctgtttgacttacagctacctttcacacgttgacctcgtcaaggacctcaactccgggttgattggagccttgttggtatgcagggaaggatctcttgccaaagagaagacacagaccctccacaagtttatccttctctttgctgtgttcgatgagggcaaaagttggcatagcgaaacgaagaattccctcatgcaggatcgcgacgcagccagcgccagagcttggcccaagatgcacactgtgaacggatatgtcaataggtcacttcctggcttgattgggtgtcatcggaaaagtgtctactggcacgtgatcggaatggggacaacaccagaggtccactccatatttctcgaaggccataccttccttgttcgaaaccacagacaggcatccttggagatctctcccattacctttctcactgcccaaacgctccttatggacttgggtcagttccttctcttctgccatatcagctcacaccagcatgatggtatggaagcttatgtgaaagtcgacagttgtcctgaggagccacagttgcgcatgaagaataatgaagaagccgaggattacgacgacgatctcaccgattctgagatggacgtggtgaggtttgatgacgacaactctccctccttcattcaaatccggagcgtggcgaagaaacaccccaagacttgggtccactatatagcggcggaagaggaggattgggattacgctcctcttgtattggcaccagatgaccgctcatacaaaagccagtacctcaacaacggaccgcagagaattggccggaagtataagaaagtgcgatttatggcctatacagacgaaacctttaagacaagggaggccatccagcatgagagtgggattttgggacctcttctttacggcgaagttggtgataccctcctcatcatcttcaagaatcaagcttctcgcccctataacatttacccacacgggatcactgacgttaggcctttgtatagcagaagacttcccaaaggcgtgaagcatctcaaagacttccccattttgccaggcgagatctttaagtacaaatggaccgtcacagtggaagatggaccgactaaatcagaccctcgatgccttacgcggtactattcctccttcgtgaatatggagagagatttggcaagcggactcataggaccactcctcatctgttacaaggaatctgtagaccagaggggtaaccagattatgagtgataaacgcaatgtgatcctttttagcgtcttcgacgagaaccggtcctggtacttgaccgagaatatacaaaggttccttcccaaccccgcaggcgttcagttggaagaccctgagtttcaggccagcaatattatgcactcaatcaacggctatgtgtttgatagtctccagctttctgtttgcctccatgaagtagcctattggtacatcttgtcaattggtgctcaaacagacttcctctccgtcttcttctccggctacacctttaagcacaagatggtgtatgaggacactctcacactctttccattttctggagaaaccgtgttcatgagcatggagaatccaggcctttggatcttgggttgccacaacagtgattttcgcaatcggggaatgactgctctcctcaaagtcagcagctgtgataagaacacaggcgactattacgaagattcttacgaggacataagtgcctacttggattccaagaataacgccattgagcccagatcattctcccagaatcctcccgtgcttaaaaggcatcagcgcgaaatcaccagaactactcttcagtctgatcaagaggagattgactatgacgacaccataagcgtggaaatgaagaaggaggatttcgatatctatgacgaagatgagaaccagtctccgcggagctttcagaagaagacgcgacactacttcattgcagcagtcgaaaggctttgggactacggtatgtcatcatcccctcatgtgttgcgcaatagagctcagagtggaagtgttccacagttcaagaaagtcgtctttcaagagtttacagatggcagcttcacacagcctctctatcggggcgagcttaacgaacatttgggactccttggtccctatatccgagccgaagtggaggacaacattatggttacctttaggaatcaagcctctcgcccctacagcttctactcctccctcatcagttatgaggaggatcagagacaaggcgctgaaccacggaagaactttgtgaaaccgaatgagacgaagacctacttctggaaagtacagcaccacatggcccccacaaaagacgaattcgattgcaaagcatgggcgtatttttcagacgttgacttggagaaagatgtacattcaggacttattggtcctttgttggtgtgtcacactaacactctcaatccagcccatggcaggcaggtgacagtccaggaattcgctcttttctttaccatctttgatgagaccaagtcctggtacttcacggaaaacatggagcgcaattgcagagccccctgtaacatacagatggaggaccctacctttaaggaaaattatcggttccacgcaatcaacggatacattatggatacactccctggccttgtgatggctcaggaccaacgaatcaggtggtacctcctcagcatgggttctaatgagaacatacactccattcacttttcaggacatgtgttcactgtccggaagaaagaagagtataagatggccctctacaatttgtatccaggcgtgtttgagaccgttgaaatgcttccctctaaagctggcatctggagagtagagtgcttgatcggagaacatcttcacgcaggtatgagcaccttgttcctcgtgtacagcaacaaatgtcagaccccacttggcatggccagtggacacattcgcgactttcagatcacagcatctggccagtatggacaatgggccccaaagttggctcgcctccattactccggtagcataaatgcgtggtccactaaagaacctttcagctggattaaggtcgatcttcttgcccccatgatcatccacggcattaagacacagggagcgaggcagaaattctcctccctctacatctcacagttcattattatgtatagtttggacggcaagaagtggcaaacttatagaggtaacagtactggaacactcatggtgttcttcggcaacgttgatagctctggcatcaaacacaacatctttaatcctcccataatagctcggtacatcagattgcatccgacccactacagcattaggagtacactccgaatggagcttatgggttgcgacttgaattcctgttcaatgccactcggaatggagtctaaagccatctctgatgcacagataaccgccagtagctactttacgaacatgtttgctacgtggtcaccctctaaggcaaggcttcatttgcaaggccggtctaatgcctggagacctcaggtgaacaacccgaaagaatggctccaggtggactttcagaagaccatgaaagtaacaggtgtcactactcagggagttaagtccttggataccagcatgtatgtgaaggagttccttatttcctcatcacaagatggccaccagtggaccctcttctttcagaatggtaaggtcaaagtgtttcagggcaatcaagacagcttcacacccgtggtgaacagtcttgatcctccactcttgacacgataccttcgaatccatccacagtcttgggttcaccagattgcattgcgcatggaagtacttggatgcgaggctcaggacctctac

SEQ ID NO: 560 - protein, 1457 aa, synthetic construct
  REGION 1..1457: note = Variant of human B-domain deleted Factor VIII
MQIELSTCFFLCLLRFCFSATRRYYLGAVELSWDYMQSDLGELPVDARFPPRVPKSFPFNTSVVYKKTLFVEFTDHLFNIAKPRPPWMGLLGPTIQAEVYDTVVITLKNMASHPVSLHAVGVSYWKASEGAEYDDQTSQREKEDDKVFPGGSHTYVWQVLKENGPMASDPLCLTYSYLSHVDLVKDLNSGLIGALLVCREGSLAKEKTQTLHKFILLFAVFDEGKSWHSETKNSLMQDRDAASARAWPKMHTVNGYVNRSLPGLIGCHRKSVYWHVIGMGTTPEVHSIFLEGHTFLVRNHRQASLEISPITFLTAQTLLMDLGQFLLFCHISSHQHDGMEAYVKVDSCPEEPQLRMKNNEEAEDYDDDLTDSEMDVVRFDDDNSPSFIQIRSVAKKHPKTWVHYIAAEEEDWDYAPLVLAPDDRSYKSQYLNNGPQRIGRKYKKVRFMAYTDETFKTREAIQHESGILGPLLYGEVGDTLLIIFKNQASRPYNIYPHGITDVRPLYSRRLPKGVKHLKDFPILPGEIFKYKWTVTVEDGPTKSDPRCLTRYYSSFVNMERDLASGLIGPLLICYKESVDQRGNQIMSDKRNVILFSVFDENRSWYLTENIQRFLPNPAGVQLEDPEFQASNIMHSINGYVFDSLQLSVCLHEVAYWYILSIGAQTDFLSVFFSGYTFKHKMVYEDTLTLFPFSGETVFMSMENPGLWILGCHNSDFRNRGMTALLKVSSCDKNTGDYYEDSYEDISAYLDSKNNAIEPRSFSQNPPVLKRHQREITRTTLQSDQEEIDYDDTISVEMKKEDFDIYDEDENQSPRSFQKKTRHYFIAAVERLWDYGMSSSPHVLRNRAQSGSVPQFKKVVFQEFTDGSFTQPLYRGELNEHLGLLGPYIRAEVEDNIMVTFRNQASRPYSFYSSLISYEEDQRQGAEPRKNFVKPNETKTYFWKVQHHMAPTKDEFDCKAWAYFSDVDLEKDVHSGLIGPLLVCHTNTLNPAHGRQVTVQEFALFFTIFDETKSWYFTENMERNCRAPCNIQMEDPTFKENYRFHAINGYIMDTLPGLVMAQDQRIRWYLLSMGSNENIHSIHFSGHVFTVRKKEEYKMALYNLYPGVFETVEMLPSKAGIWRVECLIGEHLHAGMSTLFLVYSNKCQTPLGMASGHIRDFQITASGQYGQWAPKLARLHYSGSINAWSTKEPFSWIKVDLLAPMIIHGIKTQGARQKFSSLYISQFIIMYSLDGKKWQTYRGNSTGTLMVFFGNVDSSGIKHNIFNPPIIARYIRLHPTHYSIRSTLRMELMGCDLNSCSMPLGMESKAISDAQITASSYFTNMFATWSPSKARLHLQGRSNAWRPQVNNPKEWLQVDFQKTMKVTGVTTQGVKSLDTSMYVKEFLISSSQDGHQWTLFFQNGKVKVFQGNQDSFTPVVNSLDPPLLTRYLRIHPQSWVHQIALRMEVLGCEAQDLY

SEQ ID NO: 561 - DNA, 4371 bp, synthetic construct
  misc_feature 1..4371: note = Variant of human B-domain deleted Factor VIII
  source 1..4371: mol_type = other DNA
atgcagattgaactgtctacctgcttcttcctctgtttgctgaggttctgctttagcgccactagacggtactaccttggcgctgtggagctgtcctgggactatatgcagagtgatttgggagagcttcccgtcgacgcacgatttcctcctcgcgttccaaagtcatttcccttcaacacaagcgtggtgtacaagaagacgctcttcgtcgaattcaccgatcacctgttcaatatcgccaaacccagaccaccatggatgggtcttttggggcctaccatacaagcggaggtgtatgacacagttgttatcactctcaagaacatggcttctcatccggtaagtcttcacgcagtgggcgtgtcctactggaaagcttcagaaggagccgagtatgatgatcagacatcccagagggagaaagaagacgacaaggtatttccaggtgggtctcatacctatgtgtggcaagtgctcaaagagaatggccctatggcaagcgatccgctctgtttgacttacagctacctttcacacgttgacctcgtcaaggacctcaactccgggttgattggagccttgttggtatgcagggaaggatctcttgccaaagagaagacacagaccctccacaagtttatccttctctttgctgtgttcgatgagggcaaaagttggcatagcgaaacgaagaattccctcatgcaggatcgcgacgcagccagcgccagagcttggcccaagatgcacactgtgaacggatatgtcaataggtcacttcctggcttgattgggtgtcatcggaaaagtgtctactggcacgtgatcggaatggggacaacaccagaggtccactccatatttctcgaaggccataccttccttgttcgaaaccacagacaggcatccttggagatctctcccattacctttctcactgcccaaacgctccttatggacttgggtcagttccttctcttctgccatatcagctcacaccagcatgatggtatggaagcttatgtgaaagtcgacagttgtcctgaggagccacagttgcgcatgaagaataatgaagaagccgaggattacgacgacgatctcaccgattctgagatggacgtggtgaggtttgatgacgacaactctccctccttcattcaagggcggagcgtggcgaagaaacaccccaagacttgggtccactatatagcggcggaagaggaggattgggattacgctcctcttgtattggcaccagatgaccgctcatacaaaagccagtacctcaacaacggaccgcagagaattggccggaagtataagaaagtgcgatttatggcctatacagacgaaacctttaagacaagggaggccatccagcatgagagtgggattttgggacctcttctttacggcgaagttggtgataccctcctcatcatcttcaagaatcaagcttctcgcccctataacatttacccacacgggatcactgacgttaggcctttgtatagcagaagacttcccaaaggcgtgaagcatctcaaagacttccccattttgccaggcgagatctttaagtacaaatggaccgtcacagtggaagatggaccgactaaatcagaccctcgatgccttacgcggtactattcctccttcgtgaatatggagagagatttggcaagcggactcataggaccactcctcatctgttacaaggaatctgtagaccagaggggtaaccagattatgagtgataaacgcaatgtgatcctttttagcgtcttcgacgagaaccggtcctggtacttgaccgagaatatacaaaggttccttcccaaccccgcaggcgttcagttggaagaccctgagtttcaggccagcaatattatgcactcaatcaacggctatgtgtttgatagtctccagctttctgtttgcctccatgaagtagcctattggtacatcttgtcaattggtgctcaaacagacttcctctccgtcttcttctccggctacacctttaagcacaagatggtgtatgaggacactctcacactctttccattttctggagaaaccgtgttcatgagcatggagaatccaggcctttggatcttgggttgccacaacagtgattttcgcaatcggggaatgactgctctcctcaaagtcagcagctgtgataagaacacaggcgactattacgaagattcttacgaggacataagtgcctacttgttgtccaagaataacgccattgagcccagatcattctcccagaatcctcccgtgcttaaaaggcatcagcgcgaaatcaccagaactactcttcagtctgatcaagaggagattgactatgacgacaccataagcgtggaaatgaagaaggaggatttcgatatctatgacgaagatgagaaccagtctccgcggagctttcagaagaagacgcgacactacttcattgcagcagtcgaaaggctttgggactacggtatgtcatcatcccctcatgtgttgcgcaatagagctcagagtggaagtgttccacagttcaagaaagtcgtctttcaagagtttacagatggcagcttcacacagcctctctatcggggcgagcttaacgaacatttgggactccttggtccctatatccgagccgaagtggaggacaacattatggttacctttaggaatcaagcctctcgcccctacagcttctactcctccctcatcagttatgaggaggatcagagacaaggcgctgaaccacggaagaactttgtgaaaccgaatgagacgaagacctacttctggaaagtacagcaccacatggcccccacaaaagacgaattcgattgcaaagcatgggcgtatttttcagacgttgacttggagaaagatgtacattcaggacttattggtcctttgttggtgtgtcacactaacactctcaatccagcccatggcaggcaggtgacagtccaggaattcgctcttttctttaccatctttgatgagaccaagtcctggtacttcacggaaaacatggagcgcaattgcagagccccctgtaacatacagatggaggaccctacctttaaggaaaattatcggttccacgcaatcaacggatacattatggatacactccctggccttgtgatggctcaggaccaacgaatcaggtggtacctcctcagcatgggttctaatgagaacatacactccattcacttttcaggacatgtgttcactgtccggaagaaagaagagtataagatggccctctacaatttgtatccaggcgtgtttgagaccgttgaaatgcttccctctaaagctggcatctggagagtagagtgcttgatcggagaacatcttcacgcaggtatgagcaccttgttcctcgtgtacagcaacaaatgtcagaccccacttggcatggccagtggacacattcgcgactttcagatcacagcatctggccagtatggacaatgggccccaaagttggctcgcctccattactccggtagcataaatgcgtggtccactaaagaacctttcagctggattaaggtcgatcttcttgcccccatgatcatccacggcattaagacacagggagcgaggcagaaattctcctccctctacatctcacagttcattattatgtatagtttggacggcaagaagtggcaaacttatagaggtaacagtactggaacactcatggtgttcttcggcaacgttgatagctctggcatcaaacacaacatctttaatcctcccataatagctcggtacatcagattgcatccgacccactacagcattaggagtacactccgaatggagcttatgggttgcgacttgaattcctgttcaatgccactcggaatggagtctaaagccatctctgatgcacagataaccgccagtagctactttacgaacatgtttgctacgtggtcaccctctaaggcaaggcttcatttgcaaggccggtctaatgcctggagacctcaggtgaacaacccgaaagaatggctccaggtggactttcagaagaccatgaaagtaacaggtgtcactactcagggagttaagtccttggataccagcatgtatgtgaaggagttccttatttcctcatcacaagatggccaccagtggaccctcttctttcagaatggtaaggtcaaagtgtttcagggcaatcaagacagcttcacacccgtggtgaacagtcttgatcctccactcttgacacgataccttcgaatccatccacagtcttgggttcaccagattgcattgcgcatggaagtacttggatgcgaggctcaggacctctac

SEQ ID NO: 562 - protein, 1457 aa, synthetic construct
  REGION 1..1457: note = Variant of human B-domain deleted Factor VIII
MQIELSTCFFLCLLRFCFSATRRYYLGAVELSWDYMQSDLGELPVDARFPPRVPKSFPFNTSVVYKKTLFVEFTDHLFNIAKPRPPWMGLLGPTIQAEVYDTVVITLKNMASHPVSLHAVGVSYWKASEGAEYDDQTSQREKEDDKVFPGGSHTYVWQVLKENGPMASDPLCLTYSYLSHVDLVKDLNSGLIGALLVCREGSLAKEKTQTLHKFILLFAVFDEGKSWHSETKNSLMQDRDAASARAWPKMHTVNGYVNRSLPGLIGCHRKSVYWHVIGMGTTPEVHSIFLEGHTFLVRNHRQASLEISPITFLTAQTLLMDLGQFLLFCHISSHQHDGMEAYVKVDSCPEEPQLRMKNNEEAEDYDDDLTDSEMDVVRFDDDNSPSFIQGRSVAKKHPKTWVHYIAAEEEDWDYAPLVLAPDDRSYKSQYLNNGPQRIGRKYKKVRFMAYTDETFKTREAIQHESGILGPLLYGEVGDTLLIIFKNQASRPYNIYPHGITDVRPLYSRRLPKGVKHLKDFPILPGEIFKYKWTVTVEDGPTKSDPRCLTRYYSSFVNMERDLASGLIGPLLICYKESVDQRGNQIMSDKRNVILFSVFDENRSWYLTENIQRFLPNPAGVQLEDPEFQASNIMHSINGYVFDSLQLSVCLHEVAYWYILSIGAQTDFLSVFFSGYTFKHKMVYEDTLTLFPFSGETVFMSMENPGLWILGCHNSDFRNRGMTALLKVSSCDKNTGDYYEDSYEDISAYLLSKNNAIEPRSFSQNPPVLKRHQREITRTTLQSDQEEIDYDDTISVEMKKEDFDIYDEDENQSPRSFQKKTRHYFIAAVERLWDYGMSSSPHVLRNRAQSGSVPQFKKVVFQEFTDGSFTQPLYRGELNEHLGLLGPYIRAEVEDNIMVTFRNQASRPYSFYSSLISYEEDQRQGAEPRKNFVKPNETKTYFWKVQHHMAPTKDEFDCKAWAYFSDVDLEKDVHSGLIGPLLVCHTNTLNPAHGRQVTVQEFALFFTIFDETKSWYFTENMERNCRAPCNIQMEDPTFKENYRFHAINGYIMDTLPGLVMAQDQRIRWYLLSMGSNENIHSIHFSGHVFTVRKKEEYKMALYNLYPGVFETVEMLPSKAGIWRVECLIGEHLHAGMSTLFLVYSNKCQTPLGMASGHIRDFQITASGQYGQWAPKLARLHYSGSINAWSTKEPFSWIKVDLLAPMIIHGIKTQGARQKFSSLYISQFIIMYSLDGKKWQTYRGNSTGTLMVFFGNVDSSGIKHNIFNPPIIARYIRLHPTHYSIRSTLRMELMGCDLNSCSMPLGMESKAISDAQITASSYFTNMFATWSPSKARLHLQGRSNAWRPQVNNPKEWLQVDFQKTMKVTGVTTQGVKSLDTSMYVKEFLISSSQDGHQWTLFFQNGKVKVFQGNQDSFTPVVNSLDPPLLTRYLRIHPQSWVHQIALRMEVLGCEAQDLY

SEQ ID NO: 563 - DNA, 4371 bp, synthetic construct
  misc_feature 1..4371: note = Variant of human B-domain deleted Factor VIII
  source 1..4371: mol_type = other DNA
atgcagattgaactgtctacctgcttcttcctctgtttgctgaggttctgctttagcgccactagacggtactaccttggcgctgtggagctgtcctgggactatatgcagagtgatttgggagagcttcccgtcgacgcacgatttcctcctcgcgttccaaagtcatttcccttcaacacaagcgtggtgtacaagaagacgctcttcgtcgaattcaccgatcacctgttcaatatcgccaaacccagaccaccatggatgggtcttttggggcctaccatacaagcggaggtgtatgacacagttgttatcactctcaagaacatggcttctcatccggtaagtcttcacgcagtgggcgtgtcctactggaaagcttcagaaggagccgagtatgatgatcagacatcccagagggagaaagaagacgacaaggtatttccaggtgggtctcatacctatgtgtggcaagtgctcaaagagaatggccctatggcaagcgatccgctctgtttgacttacagctacctttcacacgttgacctcgtcaaggacctcaactccgggttgattggagccttgttggtatgcagggaaggatctcttgccaaagagaagacacagaccctccacaagtttatccttctctttgctgtgttcgatgagggcaaaagttggcatagcgaaacgaagaattccctcatgcaggatcgcgacgcagccagcgccagagcttggcccaagatgcacactgtgaacggatatgtcaataggtcacttcctggcttgattgggtgtcatcggaaaagtgtctactggcacgtgatcggaatggggacaacaccagaggtccactccatatttctcgaaggccataccttccttgttcgaaaccacagacaggcatccttggagatctctcccattacctttctcactgcccaaacgctccttatggacttgggtcagttccttctcttctgccatatcagctcacaccagcatgatggtatggaagcttatgtgaaagtcgacagttgtcctgaggagccacagttgcgcatgaagaataatgaagaagccgaggattacgacgacgatctcaccgattctgagatggacgtggtgaggtttgatgacgacaactctccctccttcattcaaatccggagcgtggcgaagaaacaccccaagacttgggtccactatatagcggcggaagaggaggattgggattacgctcctcttgtattggcaccagatgaccgctcatacaaaagccagtacctcaacaacggaccgcagagaattggccggaagtataagaaagtgcgatttatggcctatacagacgaaacctttaagacaagggaggccatccagcatgagagtgggattttgggacctcttctttacggcgaagttggtgataccctcctcatcatcttcaagaatcaagcttctcgcccctataacatttacccacacgggatcactgacgttaggcctttgtatagcagaagacttcccaaaggcgtgaagcatctcaaagacttccccattttgccaggcgagatctttaagtacaaatggaccgtcacagtggaagatggaccgactaaatcagaccctcgatgccttacgcggtactattcctccttcgtgaatatggagagagatttggcaagcggactcataggaccactcctcatctgttacaaggaatctgtagaccagaggggtaaccagattatgagtgataaacgcaatgtgatcctttttagcgtcttcgacgagaaccggtcctggtacttgaccgagaatatacaaaggttccttcccaaccccgcaggcgttcagttggaagaccctgagtttcaggccagcaatattatgcactcaatcaacggctatgtgtttgatagtctccagctttctgtttgcctccatgaagtagcctattggtacatcttgtcaattggtgctcaaacagacttcctctccgtcttcttctccggctacacctttaagcacaagatggtgtatgaggacactctcacactctttccattttctggagaaaccgtgttcatgagcatggagaatccaggcctttggatcttgggttgccacaacagtgattttcgcaatcggggaatgactgctctcctcaaagtcagcagctgtgataagaacacaggcgactattacgaagattcttacgaggacataagtgcctacttgttgtccaagaataacgccggggagcccagatcattctcccagaatcctcccgtgcttaaaaggcatcagcgcgaaatcaccagaactactcttcagtctgatcaagaggagattgactatgacgacaccataagcgtggaaatgaagaaggaggatttcgatatctatgacgaagatgagaaccagtctccgcggagctttcagaagaagacgcgacactacttcattgcagcagtcgaaaggctttgggactacggtatgtcatcatcccctcatgtgttgcgcaatagagctcagagtggaagtgttccacagttcaagaaagtcgtctttcaagagtttacagatggcagcttcacacagcctctctatcggggcgagcttaacgaacatttgggactccttggtccctatatccgagccgaagtggaggacaacattatggttacctttaggaatcaagcctctcgcccctacagcttctactcctccctcatcagttatgaggaggatcagagacaaggcgctgaaccacggaagaactttgtgaaaccgaatgagacgaagacctacttctggaaagtacagcaccacatggcccccacaaaagacgaattcgattgcaaagcatgggcgtatttttcagacgttgacttggagaaagatgtacattcaggacttattggtcctttgttggtgtgtcacactaacactctcaatccagcccatggcaggcaggtgacagtccaggaattcgctcttttctttaccatctttgatgagaccaagtcctggtacttcacggaaaacatggagcgcaattgcagagccccctgtaacatacagatggaggaccctacctttaaggaaaattatcggttccacgcaatcaacggatacattatggatacactccctggccttgtgatggctcaggaccaacgaatcaggtggtacctcctcagcatgggttctaatgagaacatacactccattcacttttcaggacatgtgttcactgtccggaagaaagaagagtataagatggccctctacaatttgtatccaggcgtgtttgagaccgttgaaatgcttccctctaaagctggcatctggagagtagagtgcttgatcggagaacatcttcacgcaggtatgagcaccttgttcctcgtgtacagcaacaaatgtcagaccccacttggcatggccagtggacacattcgcgactttcagatcacagcatctggccagtatggacaatgggccccaaagttggctcgcctccattactccggtagcataaatgcgtggtccactaaagaacctttcagctggattaaggtcgatcttcttgcccccatgatcatccacggcattaagacacagggagcgaggcagaaattctcctccctctacatctcacagttcattattatgtatagtttggacggcaagaagtggcaaacttatagaggtaacagtactggaacactcatggtgttcttcggcaacgttgatagctctggcatcaaacacaacatctttaatcctcccataatagctcggtacatcagattgcatccgacccactacagcattaggagtacactccgaatggagcttatgggttgcgacttgaattcctgttcaatgccactcggaatggagtctaaagccatctctgatgcacagataaccgccagtagctactttacgaacatgtttgctacgtggtcaccctctaaggcaaggcttcatttgcaaggccggtctaatgcctggagacctcaggtgaacaacccgaaagaatggctccaggtggactttcagaagaccatgaaagtaacaggtgtcactactcagggagttaagtccttggataccagcatgtatgtgaaggagttccttatttcctcatcacaagatggccaccagtggaccctcttctttcagaatggtaaggtcaaagtgtttcagggcaatcaagacagcttcacacccgtggtgaacagtcttgatcctccactcttgacacgataccttcgaatccatccacagtcttgggttcaccagattgcattgcgcatggaagtacttggatgcgaggctcaggacctctac

SEQ ID NO: 564 - protein, 1457 aa, synthetic construct
  REGION 1..1457: note = Variant of human B-domain deleted Factor VIII
MQIELSTCFFLCLLRFCFSATRRYYLGAVELSWDYMQSDLGELPVDARFPPRVPKSFPFNTSVVYKKTLFVEFTDHLFNIAKPRPPWMGLLGPTIQAEVYDTVVITLKNMASHPVSLHAVGVSYWKASEGAEYDDQTSQREKEDDKVFPGGSHTYVWQVLKENGPMASDPLCLTYSYLSHVDLVKDLNSGLIGALLVCREGSLAKEKTQTLHKFILLFAVFDEGKSWHSETKNSLMQDRDAASARAWPKMHTVNGYVNRSLPGLIGCHRKSVYWHVIGMGTTPEVHSIFLEGHTFLVRNHRQASLEISPITFLTAQTLLMDLGQFLLFCHISSHQHDGMEAYVKVDSCPEEPQLRMKNNEEAEDYDDDLTDSEMDVVRFDDDNSPSFIQIRSVAKKHPKTWVHYIAAEEEDWDYAPLVLAPDDRSYKSQYLNNGPQRIGRKYKKVRFMAYTDETFKTREAIQHESGILGPLLYGEVGDTLLIIFKNQASRPYNIYPHGITDVRPLYSRRLPKGVKHLKDFPILPGEIFKYKWTVTVEDGPTKSDPRCLTRYYSSFVNMERDLASGLIGPLLICYKESVDQRGNQIMSDKRNVILFSVFDENRSWYLTENIQRFLPNPAGVQLEDPEFQASNIMHSINGYVFDSLQLSVCLHEVAYWYILSIGAQTDFLSVFFSGYTFKHKMVYEDTLTLFPFSGETVFMSMENPGLWILGCHNSDFRNRGMTALLKVSSCDKNTGDYYEDSYEDISAYLLSKNNAGEPRSFSQNPPVLKRHQREITRTTLQSDQEEIDYDDTISVEMKKEDFDIYDEDENQSPRSFQKKTRHYFIAAVERLWDYGMSSSPHVLRNRAQSGSVPQFKKVVFQEFTDGSFTQPLYRGELNEHLGLLGPYIRAEVEDNIMVTFRNQASRPYSFYSSLISYEEDQRQGAEPRKNFVKPNETKTYFWKVQHHMAPTKDEFDCKAWAYFSDVDLEKDVHSGLIGPLLVCHTNTLNPAHGRQVTVQEFALFFTIFDETKSWYFTENMERNCRAPCNIQMEDPTFKENYRFHAINGYIMDTLPGLVMAQDQRIRWYLLSMGSNENIHSIHFSGHVFTVRKKEEYKMALYNLYPGVFETVEMLPSKAGIWRVECLIGEHLHAGMSTLFLVYSNKCQTPLGMASGHIRDFQITASGQYGQWAPKLARLHYSGSINAWSTKEPFSWIKVDLLAPMIIHGIKTQGARQKFSSLYISQFIIMYSLDGKKWQTYRGNSTGTLMVFFGNVDSSGIKHNIFNPPIIARYIRLHPTHYSIRSTLRMELMGCDLNSCSMPLGMESKAISDAQITASSYFTNMFATWSPSKARLHLQGRSNAWRPQVNNPKEWLQVDFQKTMKVTGVTTQGVKSLDTSMYVKEFLISSSQDGHQWTLFFQNGKVKVFQGNQDSFTPVVNSLDPPLLTRYLRIHPQSWVHQIALRMEVLGCEAQDLY

SEQ ID NO: 565 - DNA, 4371 bp, synthetic construct
  misc_feature 1..4371: note = Variant of human B-domain deleted Factor VIII
  source 1..4371: mol_type = other DNA
atgcagattgaactgtctacctgcttcttcctctgtttgctgaggttctgctttagcgccactagacggtactaccttggcgctgtggagctgtcctgggactatatgcagagtgatttgggagagcttcccgtcgacgcacgatttcctcctcgcgttccaaagtcatttcccttcaacacaagcgtggtgtacaagaagacgctcttcgtcgaattcaccgatcacctgttcaatatcgccaaacccagaccaccatggatgggtcttttggggcctaccatacaagcggaggtgtatgacacagttgttatcactctcaagaacatggcttctcatccggtaagtcttcacgcagtgggcgtgtcctactggaaagcttcagaaggagccgagtatgatgatcagacatcccagagggagaaagaagacgacaaggtatttccaggtgggtctcatacctatgtgtggcaagtgctcaaagagaatggccctatggcaagcgatccgctctgtttgacttacagctacctttcacacgttgacctcgtcaaggacctcaactccgggttgattggagccttgttggtatgcagggaaggatctcttgccaaagagaagacacagaccctccacaagtttatccttctctttgctgtgttcgatgagggcaaaagttggcatagcgaaacgaagaattccctcatgcaggatcgcgacgcagccagcgccagagcttggcccaagatgcacactgtgaacggatatgtcaataggtcacttcctggcttgattgggtgtcatcggaaaagtgtctactggcacgtgatcggaatggggacaacaccagaggtccactccatatttctcgaaggccataccttccttgttcgaaaccacagacaggcatccttggagatctctcccattacctttctcactgcccaaacgctccttatggacttgggtcagttccttctcttctgccatatcagctcacaccagcatgatggtatggaagcttatgtgaaagtcgacagttgtcctgaggagccacagttgcgcatgaagaataatgaagaagccgaggattacgacgacgatctcaccgattctgagatggacgtggtgaggtttgatgacgacaactctccctccttcattcaaatccggagcgtggcgaagaaacaccccaagacttgggtccactatatagcggcggaagaggaggattgggattacgctcctcttgtattggcaccagatgaccgctcatacaaaagccagtacctcaacaacggaccgcagagaattggccggaagtataagaaagtgcgatttatggcctatacagacgaaacctttaagacaagggaggccatccagcatgagagtgggattttgggacctcttctttacggcgaagttggtgataccctcctcatcatcttcaagaatcaagcttctcgcccctataacatttacccacacgggatcactgacgttaggcctttgtatagcagaagacttcccaaaggcgtgaagcatctcaaagacttccccattttgccaggcgagatctttaagtacaaatggaccgtcacagtggaagatggaccgactaaatcagaccctcgatgccttacgcggtactattcctccttcgtgaatatggagagagatttggcaagcggactcataggaccactcctcatctgttacaaggaatctgtagaccagaggggtaaccagattatgagtgataaacgcaatgtgatcctttttagcgtcttcgacgagaaccggtcctggtacttgaccgagaatatacaaaggttccttcccaaccccgcaggcgttcagttggaagaccctgagtttcaggccagcaatattatgcactcaatcaacggctatgtgtttgatagtctccagctttctgtttgcctccatgaagtagcctattggtacatcttgtcaattggtgctcaaacagacttcctctccgtcttcttctccggctacacctttaagcacaagatggtgtatgaggacactctcacactctttccattttctggagaaaccgtgttcatgagcatggagaatccaggcctttggatcttgggttgccacaacagtgattttcgcaatcggggaatgactgctctcctcaaagtcagcagctgtgataagaacacaggcgactattacgaagattcttacgaggacataagtgcctacttgttgtccaagaataacgccattgagcccagatcattctcccagaatcctcccgtgcttaaaaggcatcagcgcgaaatcaccagaactactcttcagtctgatcaagaggagattgactatgacgacaccataagcgtggaaatgaagaaggaggatttcgatatctatgacgaagatgagaaccagtctccgcggagctttcagaagaagacgcgacactacttcattgcagcagtcgaaaggctttgggactacggtatgtcatcatcccctcatgtgttgcgcaatagagctcagagtggaagtgttccacagttcaagaaagtcgtctttcaagagtttacagatggcagcttcacacagcctctctatcggggcgagcttaacgaacatttgggactccttggtccctatatccgagccgaagtggaggacaacattatggttacctttaggaatcaagcctctcgcccctacagcttctactcctccctcatcagttatgaggaggatcagagacaaggcgctgaaccacggaagaactttgtgaaaccgaatgagacgaagacctacttctggaaagtacagcaccacatggcccccacaaaagacgaattcgattgcaaagcatgggcgtatttttcagacgttgacttggagaaagatgtacattcaggacttattggtcctttgttggtgtgtcacactaacactctcaatccagcccatggcaggcaggtgacagtccaggaattcgctcttttctttaccatctttgatgagaccaagtcctggtacttcacggaaaacatggagcgcaattgcagagccccctgtaacatacagatggaggaccctacctttaaggaaaattatcggttccacgcaatcaacggatacattatggatacactccctggccttgtgatggctcaggaccaacgaatcaggtggtacctcctcagcatgggttctaatgagaacatacactccattcacttttcaggacatgtgttcactgtccggaagaaagaagagtataagatggccctctacaatttgtatccaggcgtgtttgagaccgttgaaatgcttccctctaaagctggcatctggagagtagagtgcttgatcggagaacatcttcacgcaggtatgagcaccttgttcctcgtgtacagcaacaaatgtcagaccccacttggcatggccagtggacacattcgcgactttcagatcacagcatctggccagtatggacaatgggccccaaagttggctcgcctccattactccggtagcataaatgcgtggtccactaaagaacctttcagctggattaaggtcgatcttcttgcccccatgatcatccacggcattaagacacagggagcgaggcagaaattctccgagctctacatctcacagttcattattatgtatagtttggacggcaagaagtggcaaacttatagaggtaacagtactggaacactcatggtgttcttcggcaacgttgatagctctggcatcaaacacaacatctttaatcctcccataatagctcggtacatcagattgcatccgacccactacagcattaggagtacactccgaatggagcttatgggttgcgacttgaattcctgttcaatgccactcggaatggagtctaaagccatctctgatgcacagataaccgccagtagctactttacgaacatgtttgctacgtggtcaccctctaaggcaaggcttcatttgcaaggccggtctaatgcctggagacctcaggtgaacaacccgaaagaatggctccaggtggactttcagaagaccatgaaagtaacaggtgtcactactcagggagttaagtccttggataccagcatgtatgtgaaggagttccttatttcctcatcacaagatggccaccagtggaccctcttctttcagaatggtaaggtcaaagtgtttcagggcaatcaagacagcttcacacccgtggtgaacagtcttgatcctccactcttgacacgataccttcgaatccatccacagtcttgggttcaccagattgcattgcgcatggaagtacttggatgcgaggctcaggacctctac

SEQ ID NO: 566 - protein, 1457 aa, synthetic construct
  REGION 1..1457: note = Variant of human B-domain deleted Factor VIII
MQIELSTCFFLCLLRFCFSATRRYYLGAVELSWDYMQSDLGELPVDARFPPRVPKSFPFNTSVVYKKTLFVEFTDHLFNIAKPRPPWMGLLGPTIQAEVYDTVVITLKNMASHPVSLHAVGVSYWKASEGAEYDDQTSQREKEDDKVFPGGSHTYVWQVLKENGPMASDPLCLTYSYLSHVDLVKDLNSGLIGALLVCREGSLAKEKTQTLHKFILLFAVFDEGKSWHSETKNSLMQDRDAASARAWPKMHTVNGYVNRSLPGLIGCHRKSVYWHVIGMGTTPEVHSIFLEGHTFLVRNHRQASLEISPITFLTAQTLLMDLGQFLLFCHISSHQHDGMEAYVKVDSCPEEPQLRMKNNEEAEDYDDDLTDSEMDVVRFDDDNSPSFIQIRSVAKKHPKTWVHYIAAEEEDWDYAPLVLAPDDRSYKSQYLNNGPQRIGRKYKKVRFMAYTDETFKTREAIQHESGILGPLLYGEVGDTLLIIFKNQASRPYNIYPHGITDVRPLYSRRLPKGVKHLKDFPILPGEIFKYKWTVTVEDGPTKSDPRCLTRYYSSFVNMERDLASGLIGPLLICYKESVDQRGNQIMSDKRNVILFSVFDENRSWYLTENIQRFLPNPAGVQLEDPEFQASNIMHSINGYVFDSLQLSVCLHEVAYWYILSIGAQTDFLSVFFSGYTFKHKMVYEDTLTLFPFSGETVFMSMENPGLWILGCHNSDFRNRGMTALLKVSSCDKNTGDYYEDSYEDISAYLLSKNNAIEPRSFSQNPPVLKRHQREITRTTLQSDQEEIDYDDTISVEMKKEDFDIYDEDENQSPRSFQKKTRHYFIAAVERLWDYGMSSSPHVLRNRAQSGSVPQFKKVVFQEFTDGSFTQPLYRGELNEHLGLLGPYIRAEVEDNIMVTFRNQASRPYSFYSSLISYEEDQRQGAEPRKNFVKPNETKTYFWKVQHHMAPTKDEFDCKAWAYFSDVDLEKDVHSGLIGPLLVCHTNTLNPAHGRQVTVQEFALFFTIFDETKSWYFTENMERNCRAPCNIQMEDPTFKENYRFHAINGYIMDTLPGLVMAQDQRIRWYLLSMGSNENIHSIHFSGHVFTVRKKEEYKMALYNLYPGVFETVEMLPSKAGIWRVECLIGEHLHAGMSTLFLVYSNKCQTPLGMASGHIRDFQITASGQYGQWAPKLARLHYSGSINAWSTKEPFSWIKVDLLAPMIIHGIKTQGARQKFSELYISQFIIMYSLDGKKWQTYRGNSTGTLMVFFGNVDSSGIKHNIFNPPIIARYIRLHPTHYSIRSTLRMELMGCDLNSCSMPLGMESKAISDAQITASSYFTNMFATWSPSKARLHLQGRSNAWRPQVNNPKEWLQVDFQKTMKVTGVTTQGVKSLDTSMYVKEFLISSSQDGHQWTLFFQNGKVKVFQGNQDSFTPVVNSLDPPLLTRYLRIHPQSWVHQIALRMEVLGCEAQDLY

SEQ ID NO: 567 - DNA, 4371 bp, synthetic construct
  misc_feature 1..4371: note = Variant of human B-domain deleted Factor VIII
  source 1..4371: mol_type = other DNA
atgcagattgaactgtctacctgcttcttcctctgtttgctgaggttctgctttagcgccactagacggtactaccttggcgctgtggagctgtcctgggactatatgcagagtgatttgggagagcttcccgtcgacgcacgatttcctcctcgcgttccaaagtcatttcccttcaacacaagcgtggtgtacaagaagacgctcttcgtcgaattcaccgatcacctgttcaatatcgccaaacccagaccaccatggatgggtcttttggggcctaccatacaagcggaggtgtatgacacagttgttatcactctcaagaacatggcttctcatccggtaagtcttcacgcagtgggcgtgtcctactggaaagcttcagaaggagccgagtatgatgatcagacatcccagagggagaaagaagacgacaaggtatttccaggtgggtctcatacctatgtgtggcaagtgctcaaagagaatggccctatggcaagcgatccgctctgtttgacttacagctacctttcacacgttgacctcgtcaaggacctcaactccgggttgattggagccttgttggtatgcagggaaggatctcttgccaaagagaagacacagaccctccacaagtttatccttctctttgctgtgttcgatgagggcaaaagttggcatagcgaaacgaagaattccctcatgcaggatcgcgacgcagccagcgccagagcttggcccaagatgcacactgtgaacggatatgtcaataggtcacttcctggcttgattgggtgtcatcggaaaagtgtctactggcacgtgatcggaatggggacaacaccagaggtccactccatatttctcgaaggccataccttccttgttcgaaaccacagacaggcatccttggagatctctcccattacctttctcactgcccaaacgctccttatggacttgggtcagttccttctcttctgccatatcagctcacaccagcatgatggtatggaagcttatgtgaaagtcgacagttgtcctgaggagccacagttgcgcatgaagaataatgaagaagccgaggattacgacgacgatctcaccgattctgagatggacgtggtgaggtttgatgacgacaactctccctccttcattcaaatccggagcgtggcgaagaaacaccccaagacttgggtccactatatagcggcggaagaggaggattgggattacgctcctcttgtattggcaccagatgaccgctcatacaaaagccagtacctcaacaacggaccgcagagaattggccggaagtataagaaagtgcgatttatggcctatacagacgaaacctttaagacaagggaggccatccagcatgagagtgggattttgggacctcttctttacggcgaagttggtgataccctcctcatcatcttcaagaatcaagcttctcgcccctataacatttacccacacgggatcactgacgttaggcctttgtatagcagaagacttcccaaaggcgtgaagcatctcaaagacttccccattttgccaggcgagatctttaagtacaaatggaccgtcacagtggaagatggaccgactaaatcagaccctcgatgccttacgcggtactattcctccttcgtgaatatggagagagatttggcaagcggactcataggaccactcctcatctgttacaaggaatctgtagaccagaggggtaaccagattatgagtgataaacgcaatgtgatcctttttagcgtcttcgacgagaaccggtcctggtacttgaccgagaatatacaaaggttccttcccaaccccgcaggcgttcagttggaagaccctgagtttcaggccagcaatattatgcactcaatcaacggctatgtgtttgatagtctccagctttctgtttgcctccatgaagtagcctattggtacatcttgtcaattggtgctcaaacagacttcctctccgtcttcttctccggctacacctttaagcacaagatggtgtatgaggacactctcacactctttccattttctggagaaaccgtgttcatgagcatggagaatccaggcctttggatcttgggttgccacaacagtgattttcgcaatcggggaatgactgctctcctcaaagtcagcagctgtgataagaacacaggcgactattacgaagattcttacgaggacataagtgcctacttgttgtccaagaataacgccattgagcccagatcattctcccagaatcctcccgtgcttaaaaggcatcagcgcgaaatcaccagaactactcttcagtctgatcaagaggagattgactatgacgacaccataagcgtggaaatgaagaaggaggatttcgatatctatgacgaagatgagaaccagtctccgcggagctttcagaagaagacgcgacactacttcattgcagcagtcgaaaggctttgggactacggtatgtcatcatcccctcatgtgttgcgcaatagagctcagagtggaagtgttccacagttcaagaaagtcgtctttcaagagtttacagatggcagcttcacacagcctctctatcggggcgagcttaacgaacatttgggactccttggtccctatatccgagccgaagtggaggacaacattatggttacctttaggaatcaagcctctcgcccctacagcttctactcctccctcatcagttatgaggaggatcagagacaaggcgctgaaccacggaagaactttgtgaaaccgaatgagacgaagacctacttctggaaagtacagcaccacatggcccccacaaaagacgaattcgattgcaaagcatgggcgtatttttcagacgttgacttggagaaagatgtacattcaggacttattggtcctttgttggtgtgtcacactaacactctcaatccagcccatggcaggcaggtgacagtccaggaattcgctcttttctttaccatctttgatgagaccaagtcctggtacttcacggaaaacatggagcgcaattgcagagccccctgtaacatacagatggaggaccctacctttaaggaaaattatcggttccacgcaatcaacggatacattatggatacactccctggccttgtgatggctcaggaccaacgaatcaggtggtacctcctcagcatgggttctaatgagaacatacactccattcacttttcaggacatgtgttcactgtccggaagaaagaagagtataagatggccctctacaatttgtatccaggcgtgtttgagaccgttgaaatgcttccctctaaagctggcatctggagagtagagtgcttgatcggagaacatcttcacgcaggtatgagcaccttgttcctcgtgtacagcaacaaatgtcagaccccacttggcatggccagtggacacattcgcgactttcagatcacagcatctggccagtatggacaatgggccccaaagttggctcgcctccattactccggtagcataaatgcgtggtccactaaagaacctttcagctggattaaggtcgatcttcttgcccccatgatcatccacggcattaagacacagggagcgaggcagaaattctcctccctctacatctcacagttcattattatgtatagtttggacggcaagaagtggcaaacttatagaggtaacagtactggaacactcatggtgttcttcggcaacgttgatagctctggcatcaaacacaacatctttaatcctcccataatagctcggtacatcagattgcatccgacccactacagcattaggagtacactccgaatggagcttatgggttgcgacttgaattcctgttcaatgccactcggaatggagtctaaagccatctctgatgcacagataaccgccagtagctactttacgaacatgtttgctacgtggtcaccctctaaggcaaggcttcatttgcaaggccggtctaatgcctggagacctcaggtgaacaacccgaaagaatggctccaggtggactttcagaagaccatgaaagtaacaggtgtcactactcagggagttaagtccttggattgtagcatgtatgtgaaggagttccttatttcctcatcacaagatggccaccagtggaccctcttctttcagaatggtaaggtcaaagtgtttcagggcaatcaagacagcttcacacccgtggtgaacagtcttgatcctccactcttgacacgataccttcgaatccatccacagtcttgggttcaccagattgcattgcgcatggaagtacttggatgcgaggctcaggacctctac

SEQ ID NO: 568 - protein, 1457 aa, synthetic construct
  REGION 1..1457: note = Variant of human B-domain deleted Factor VIII
MQIELSTCFFLCLLRFCFSATRRYYLGAVELSWDYMQSDLGELPVDARFPPRVPKSFPFNTSVVYKKTLFVEFTDHLFNIAKPRPPWMGLLGPTIQAEVYDTVVITLKNMASHPVSLHAVGVSYWKASEGAEYDDQTSQREKEDDKVFPGGSHTYVWQVLKENGPMASDPLCLTYSYLSHVDLVKDLNSGLIGALLVCREGSLAKEKTQTLHKFILLFAVFDEGKSWHSETKNSLMQDRDAASARAWPKMHTVNGYVNRSLPGLIGCHRKSVYWHVIGMGTTPEVHSIFLEGHTFLVRNHRQASLEISPITFLTAQTLLMDLGQFLLFCHISSHQHDGMEAYVKVDSCPEEPQLRMKNNEEAEDYDDDLTDSEMDVVRFDDDNSPSFIQIRSVAKKHPKTWVHYIAAEEEDWDYAPLVLAPDDRSYKSQYLNNGPQRIGRKYKKVRFMAYTDETFKTREAIQHESGILGPLLYGEVGDTLLIIFKNQASRPYNIYPHGITDVRPLYSRRLPKGVKHLKDFPILPGEIFKYKWTVTVEDGPTKSDPRCLTRYYSSFVNMERDLASGLIGPLLICYKESVDQRGNQIMSDKRNVILFSVFDENRSWYLTENIQRFLPNPAGVQLEDPEFQASNIMHSINGYVFDSLQLSVCLHEVAYWYILSIGAQTDFLSVFFSGYTFKHKMVYEDTLTLFPFSGETVFMSMENPGLWILGCHNSDFRNRGMTALLKVSSCDKNTGDYYEDSYEDISAYLLSKNNAIEPRSFSQNPPVLKRHQREITRTTLQSDQEEIDYDDTISVEMKKEDFDIYDEDENQSPRSFQKKTRHYFIAAVERLWDYGMSSSPHVLRNRAQSGSVPQFKKVVFQEFTDGSFTQPLYRGELNEHLGLLGPYIRAEVEDNIMVTFRNQASRPYSFYSSLISYEEDQRQGAEPRKNFVKPNETKTYFWKVQHHMAPTKDEFDCKAWAYFSDVDLEKDVHSGLIGPLLVCHTNTLNPAHGRQVTVQEFALFFTIFDETKSWYFTENMERNCRAPCNIQMEDPTFKENYRFHAINGYIMDTLPGLVMAQDQRIRWYLLSMGSNENIHSIHFSGHVFTVRKKEEYKMALYNLYPGVFETVEMLPSKAGIWRVECLIGEHLHAGMSTLFLVYSNKCQTPLGMASGHIRDFQITASGQYGQWAPKLARLHYSGSINAWSTKEPFSWIKVDLLAPMIIHGIKTQGARQKFSSLYISQFIIMYSLDGKKWQTYRGNSTGTLMVFFGNVDSSGIKHNIFNPPIIARYIRLHPTHYSIRSTLRMELMGCDLNSCSMPLGMESKAISDAQITASSYFTNMFATWSPSKARLHLQGRSNAWRPQVNNPKEWLQVDFQKTMKVTGVTTQGVKSLDCSMYVKEFLISSSQDGHQWTLFFQNGKVKVFQGNQDSFTPVVNSLDPPLLTRYLRIHPQSWVHQIALRMEVLGCEAQDLY

SEQ ID NO: 569 - DNA, 4371 bp, synthetic construct
  misc_feature 1..4371: note = Variant of human B-domain deleted Factor VIII
  source 1..4371: mol_type = other DNA
atgcagattgaactgtctacctgcttcttcctctgtttgctgaggttctgctttagcgccactagacggtactaccttggcgctgtggagctgtcctgggactatatgcagagtgatttgggagagcttcccgtcgacgcacgatttcctcctcgcgttccaaagtcatttcccttcaacacaagcgtggtgtacaagaagacgctcttcgtcgaattcaccgatcacctgttcaatatcgccaaacccagaccaccatggatgggtcttttggggcctaccatacaagcggaggtgtatgacacagttgttatcactctcaagaacatggcttctcatccggtaagtcttcacgcagtgggcgtgtcctactggaaagcttcagaaggagccgagtatgatgatcagacatcccagagggagaaagaagacgacaaggtatttccaggtgggtctcatacctatgtgtggcaagtgctcaaagagaatggccctatggcaagcgatccgctctgtttgacttacagctacctttcacacgttgacctcgtcaaggacctcaactccgggttgattggagccttgttggtatgcagggaaggatctcttgccaaagagaagacacagaccctccacaagtttatccttctctttgctgtgttcgatgagggcaaaagttggcatagcgaaacgaagaattccctcatgcaggatcgcgacgcagccagcgccagagcttggcccaagatgcacactgtgaacggatatgtcaataggtcacttcctggcttgattgggtgtcatcggaaaagtgtctactggcacgtgatcggaatggggacaacaccagaggtccactccatatttctcgaaggccataccttccttgttcgaaaccacagacaggcatccttggagatctctcccattacctttctcactgcccaaacgctccttatggacttgggtcagttccttctcttctgccatatcagctcacaccagcatgatggtatggaagcttatgtgaaagtcgacagttgtcctgaggagccacagttgcgcatgaagaataatgaagaagccgaggattacgacgacgatctcaccgattctgagatggacgtggtgaggtttgatgacgacaactctccctccttcattcaaatccggagcgtggcgaagaaacaccccaagacttgggtccactatatagcggcggaagaggaggattgggattacgctcctcttgtattggcaccagatgaccgctcatacaaaagccagtacctcaacaacggaccgcagagaattggccggaagtataagaaagtgcgatttatggcctatacagacgaaacctttaagacaagggaggccatccagcatgagagtgggattttgggacctcttctttacggcgaagttggtgataccctcctcatcatcttcaagaatcaagcttctcgcccctataacatttacccacacgggatcactgacgttaggcctttgtatagcagaagacttcccaaaggcgtgaagcatctcaaagacttccccattttgccaggcgagatctttaagtacaaatggaccgtcacagtggaagatggaccgactaaatcagaccctcgatgccttacgcggtactattcctccttcgtgaatatggagagagatttggcaagcggactcataggaccactcctcatctgttacaaggaatctgtagaccagaggggtaaccagattatgagtgataaacgcaatgtgatcctttttagcgtcttcgacgagaaccggtcctggtacttgaccgagaatatacaaaggttccttcccaaccccgggggcgttcagttggaagaccctgagtttcaggccagcaatattatgcactcaatcaacggctatgtgtttgatagtctccagctttctgtttgcctccatgaagtagcctattggtacatcttgtcaattggtgctcaaacagacttcctctccgtcttcttctccggctacacctttaagcacaagatggtgtatgaggacactctcacactctttccattttctggagaaaccgtgttcatgagcatggagaatccaggcctttggatcttgggttgccacaacagtgattttcgcaatcggggaatgactgctctcctcaaagtcagcagctgtgataagaacacaggcgactattacgaagattcttacgaggacataagtgcctacttgttgtccaagaataacgccattgagcccagatcattctcccagaatcctcccgtgcttaaaaggcatcagcgcgaaatcaccagaactactcttcagtctgatcaagaggagattgactatgacgacaccataagcgtggaaatgaagaaggaggatttcgatatctatgacgaagatgagaaccagtctccgcggagctttcagaagaagacgcgacactacttcattgcagcagtcgaaaggctttgggactacggtatgtcatcatcccctcatgtgttgcgcaatagagctcagagtggaagtgttccacagttcaagaaagtcgtctttcaagagtttacagatggcagcttcacacagcctctctatcggggcgagcttaacgaacatttgggactccttggtccctatatccgagccgaagtggaggacaacattatggttacctttaggaatcaagcctctcgcccctacagcttctactcctccctcatcagttatgaggaggatcagagacaaggcgctgaaccacggaagaactttgtgaaaccgaatgagacgaagacctacttctggaaagtacagcaccacatggcccccacaaaagacgaattcgattgcaaagcatgggcgtatttttcagacgttgacttggagaaagatgtacattcaggacttattggtcctttgttggtgtgtcacactaacactctcaatccagcccatggcaggcaggtgacagtccaggaattcgctcttttctttaccatctttgatgagaccaagtcctggtacttcacggaaaacatggagcgcaattgcagagccccctgtaacatacagatggaggaccctacctttaaggaaaattatcggttccacgcaatcaacggatacattatggatacactccctggccttgtgatggctcaggaccaacgaatcaggtggtacctcctcagcatgggttctaatgagaacatacactccattcacttttcaggacatgtgttcactgtccggaagaaagaagagtataagatggccctctacaatttgtatccaggcgtgtttgagaccgttgaaatgcttccctctaaagctggcatctggagagtagagtgcttgatcggagaacatcttcacgcaggtatgagcaccttgttcctcgtgtacagcaacaaatgtcagaccccacttggcatggccagtggacacattcgcgactttcagatcacagcatctggccagtatggacaatgggccccaaagttggctcgcctccattactccggtagcataaatgcgtggtccactaaagaacctttcagctggattaaggtcgatcttcttgcccccatgatcatccacggcattaagacacagggagcgaggcagaaattctcctccctctacatctcacagttcattattatgtatagtttggacggcaagaagtggcaaacttatagaggtaacagtactggaacactcatggtgttcttcggcaacgttgatagctctggcatcaaacacaacatctttaatcctcccataatagctcggtacatcagattgcatccgacccactacagcattaggagtacactccgaatggagcttatgggttgcgacttgaattcctgttcaatgccactcggaatggagtctaaagccatctctgatgcacagataaccgccagtagctactttacgaacatgtttgctacgtggtcaccctctaaggcaaggcttcatttgcaaggccggtctaatgcctggagacctcaggtgaacaacccgaaagaatggctccaggtggactttcagaagaccatgaaagtaacaggtgtcactactcagggagttaagtccttggataccagcatgtatgtgaaggagttccttatttcctcatcacaagatggccaccagtggaccctcttctttcagaatggtaaggtcaaagtgtttcagggcaatcaagacagcttcacacccgtggtgaacagtcttgatcctccactcttgacacgataccttcgaatccatccacagtcttgggttcaccagattgcattgcgcatggaagtacttggatgcgaggctcaggacctctac

SEQ ID NO: 570 - protein, 1457 aa, synthetic construct
  REGION 1..1457: note = Variant of human B-domain deleted Factor VIII
MQIELSTCFFLCLLRFCFSATRRYYLGAVELSWDYMQSDLGELPVDARFPPRVPKSFPFNTSVVYKKTLFVEFTDHLFNIAKPRPPWMGLLGPTIQAEVYDTVVITLKNMASHPVSLHAVGVSYWKASEGAEYDDQTSQREKEDDKVFPGGSHTYVWQVLKENGPMASDPLCLTYSYLSHVDLVKDLNSGLIGALLVCREGSLAKEKTQTLHKFILLFAVFDEGKSWHSETKNSLMQDRDAASARAWPKMHTVNGYVNRSLPGLIGCHRKSVYWHVIGMGTTPEVHSIFLEGHTFLVRNHRQASLEISPITFLTAQTLLMDLGQFLLFCHISSHQHDGMEAYVKVDSCPEEPQLRMKNNEEAEDYDDDLTDSEMDVVRFDDDNSPSFIQIRSVAKKHPKTWVHYIAAEEEDWDYAPLVLAPDDRSYKSQYLNNGPQRIGRKYKKVRFMAYTDETFKTREAIQHESGILGPLLYGEVGDTLLIIFKNQASRPYNIYPHGITDVRPLYSRRLPKGVKHLKDFPILPGEIFKYKWTVTVEDGPTKSDPRCLTRYYSSFVNMERDLASGLIGPLLICYKESVDQRGNQIMSDKRNVILFSVFDENRSWYLTENIQRFLPNPGGVQLEDPEFQASNIMHSINGYVFDSLQLSVCLHEVAYWYILSIGAQTDFLSVFFSGYTFKHKMVYEDTLTLFPFSGETVFMSMENPGLWILGCHNSDFRNRGMTALLKVSSCDKNTGDYYEDSYEDISAYLLSKNNAIEPRSFSQNPPVLKRHQREITRTTLQSDQEEIDYDDTISVEMKKEDFDIYDEDENQSPRSFQKKTRHYFIAAVERLWDYGMSSSPHVLRNRAQSGSVPQFKKVVFQEFTDGSFTQPLYRGELNEHLGLLGPYIRAEVEDNIMVTFRNQASRPYSFYSSLISYEEDQRQGAEPRKNFVKPNETKTYFWKVQHHMAPTKDEFDCKAWAYFSDVDLEKDVHSGLIGPLLVCHTNTLNPAHGRQVTVQEFALFFTIFDETKSWYFTENMERNCRAPCNIQMEDPTFKENYRFHAINGYIMDTLPGLVMAQDQRIRWYLLSMGSNENIHSIHFSGHVFTVRKKEEYKMALYNLYPGVFETVEMLPSKAGIWRVECLIGEHLHAGMSTLFLVYSNKCQTPLGMASGHIRDFQITASGQYGQWAPKLARLHYSGSINAWSTKEPFSWIKVDLLAPMIIHGIKTQGARQKFSSLYISQFIIMYSLDGKKWQTYRGNSTGTLMVFFGNVDSSGIKHNIFNPPIIARYIRLHPTHYSIRSTLRMELMGCDLNSCSMPLGMESKAISDAQITASSYFTNMFATWSPSKARLHLQGRSNAWRPQVNNPKEWLQVDFQKTMKVTGVTTQGVKSLDTSMYVKEFLISSSQDGHQWTLFFQNGKVKVFQGNQDSFTPVVNSLDPPLLTRYLRIHPQSWVHQIALRMEVLGCEAQDLY

SEQ ID NO: 571 - DNA, 4371 bp, synthetic construct
  misc_feature 1..4371: note = Variant of human B-domain deleted Factor VIII
  source 1..4371: mol_type = other DNA
atgcagattgaactgtctacctgcttcttcctctgtttgctgaggttctgctttagcgccactagacggtactaccttggcgctgtggagctgtcctgggactatatgcagagtgatttgggagagcttcccgtcgacgcacgatttcctcctcgcgttccaaagtcatttcccttcaacacaagcgttgtgtacaagaagacgctcttcgtcgaattcaccgatcacctgttcaatatcgccaaacccagaccaccatggatgggtcttttggggcctaccatacaagcggaggtgtatgacacagttgttatcactctcaagaacatggcttctcatccggtaagtcttcacgcagtgggcgtgtcctactggaaagcttcagaaggagccgagtatgatgatcagacatcccagagggagaaagaagacgacaaggtatttccaggtgggtctcatacctatgtgtggcaagtgctcaaagagaatggccctatggcaagcgatccgctctgtttgacttacagctacctttcacacgttgacctcgtcaaggacctcaactccgggttgattggagccttgttggtatgcagggaaggatctcttgccaaagagaagacacagaccctccacaagtttatccttctctttgctgtgttcgatgagggcaaaagttggcatagcgaaacgaagaattccctcatgcaggatcgcgacgcagccagcgccagagcttggcccaagatgcacactgtgaacggatatgtcaataggtcacttcctggcttgattgggtgtcatcggaaaagtgtctactggcacgtgatcggaatggggacaacaccagaggtccactccatatttctcgaaggccataccttccttgttcgaaaccacagacaggcatccttggagatctctcccattacctttctcactgcccaaacgctccttatggacttgggtcagttccttctcttctgccatatcagctcacaccagcatgatggtatggaagcttatgtgaaagtccgcagttgtccggaggagccacagttgcgcatgaagaataatgaagaagccgaggattacgacgacgatctcaccgattctgagatggacgtggtgaggtttgatgacgacaactctccctccttcattcaaatccggagcgtggcgaagaaacaccccaagacttgggtccactatatagcggcggaagaggaggattgggattacgctcctcttgtattggcaccagatgaccgctcatacaaaagccagtacctcaacaacggaccgcagagaattggccggaagtataagaaagtgcgatttatggcctatacagacgaaacctttaagacaagggaggccatccagcatgagagtgggattttgggacctcttctttacggcgaagttggtgataccctcctcatcatcttcaagaatcaagcttctcgcccctataacatttacccacacgggatcactgacgttaggcctttgtatagcagaagacttcccaaaggcgtgaagcatctcaaagacttccccattttgccaggcgagatctttaagtacaaatggaccgtcacagtggaagatggaccgactaaatcagaccctcgatgccttacgcggtactattcctccttcgtgaatatggagagagatttggcaagcggactcataggaccactcctcatctgttacaaggaatctgtagaccagaggggtaaccagattatgagtgataaacgcaatgtgatcctttttagcgtcttcgacgagaaccggtcctggtacttgaccgagaatatacaaaggttccttcccaaccccgcaggcgttcagttggaagaccctgagtttcaggccagcaatattatgcactcaatcaacggctatgtgtttgatagtctccagctttctgtttgcctccatgaagtagcctattggtacatcttgtcaattggtgctcaaacagacttcctctccgtcttcttctccggctacacctttaagcacaagatggtgtatgaggacactctcacactctttccattttctggagaaaccgtgttcatgagcatggagaatccaggcctttggatcttgggttgccacaacagtgattttcgcaatcggggaatgactgctctcctcaaagtcagcagctgtgataagaacacaggcgactattacgaagattcttacgaggacataagtgcctacttgttgtccaagaataacgccattgagcccagatcattctcccagaatcctcccgtgcttaaaaggcatcagcgcgaaatcaccagaactactcttcagtctgatcaagaggagattgactatgacgacaccataagcgtggaaatgaagaaggaggatttcgatatctatgacgaagatgagaaccagtctccgcggagctttcagaagaagacgcgacactacttcattgcagcagtcgaaaggctttgggactacggtatgtcatcatcccctcatgtgttgcgcaatagagctcagagtggaagtgttccacagttcaagaaagtcgtctttcaagagtttacagatggcagcttcacacagcctctctatcggggcgagcttaacgaacatttgggactccttggtccctatatccgagccgaagtggaggacaacattatggttacctttaggaatcaagcctctcgcccctacagcttctactcctccctcatcagttatgaggaggatcagagacaaggcgctgaaccacggaagaactttgtgaaaccgaatgagacgaagacctacttctggaaagtacagcaccacatggcccccacaaaagacgaattcgattgcaaagcatgggcgtatttttcagacgttgacttggagaaagatgtacattcaggacttattggtcctttgttggtgtgtcacactaacactctcaatccagcccatggcaggcaggtgacagtccaggaattcgctcttttctttaccatctttgatgagaccaagtcctggtacttcacggaaaacatggagcgcaattgcagagccccctgtaacatacagatggaggaccctacctttaaggaaaattatcggttccacgcaatcaacggatacattatggatacactccctggccttgtgatggctcaggaccaacgaatcaggtggtacctcctcagcatgggttctaatgagaacatacactccattcacttttcaggacatgtgttcactgtccggaagaaagaagagtataagatggccctctacaatttgtatccaggcgtgtttgagaccgttgaaatgcttccctctaaagctggcatctggagagtagagtgcttgatcggagaacatcttcacgcaggtatgagcaccttgttcctcgtgtacagcaacaaatgtcagaccccacttggcatggccagtggacacattcgcgactttcagatcacagcatctggccagtatggacaatgggccccaaagttggctcgcctccattactccggtagcataaatgcgtggtccactaaagaacctttcagctggattaaggtcgatcttcttgcccccatgatcatccacggcattaagacacagggagcgaggcagaaattctcctccctctacatctcacagttcattattatgtatagtttggacggcaagaagtggcaaacttatagaggtaacagtactggaacactcatggtgttcttcggcaacgttgatagctctggcatcaaacacaacatctttaatcctcccataatagctcggtacatcagattgcatccgacccactacagcattaggagtacactccgaatggagcttatgggttgcgacttgaattcctgttcaatgccactcggaatggagtctaaagccatctctgatgcacagataaccgccagtagctactttacgaacatgtttgctacgtggtcaccctctaaggcaaggcttcatttgcaaggccggtctaatgcctggagacctcaggtgaacaacccgaaagaatggctccaggtggactttcagaagaccatgaaagtaacaggtgtcactactcagggagttaagtccttggataccagcatgtatgtgaaggagttccttatttcctcatcacaagatggccaccagtggaccctcttctttcagaatggtaaggtcaaagtgtttcagggcaatcaagacagcttcacacccgtggtgaacagtcttgatcctccactcttgacacgataccttcgaatccatccacagtcttgggttcaccagattgcattgcgcatggaagtacttggatgcgaggctcaggacctctac

SEQ ID NO: 572 - protein, 1457 aa, synthetic construct
  REGION 1..1457: note = Variant of human B-domain deleted Factor VIII
MQIELSTCFFLCLLRFCFSATRRYYLGAVELSWDYMQSDLGELPVDARFPPRVPKSFPFNTSVVYKKTLFVEFTDHLFNIAKPRPPWMGLLGPTIQAEVYDTVVITLKNMASHPVSLHAVGVSYWKASEGAEYDDQTSQREKEDDKVFPGGSHTYVWQVLKENGPMASDPLCLTYSYLSHVDLVKDLNSGLIGALLVCREGSLAKEKTQTLHKFILLFAVFDEGKSWHSETKNSLMQDRDAASARAWPKMHTVNGYVNRSLPGLIGCHRKSVYWHVIGMGTTPEVHSIFLEGHTFLVRNHRQASLEISPITFLTAQTLLMDLGQFLLFCHISSHQHDGMEAYVKVRSCPEEPQLRMKNNEEAEDYDDDLTDSEMDVVRFDDDNSPSFIQIRSVAKKHPKTWVHYIAAEEEDWDYAPLVLAPDDRSYKSQYLNNGPQRIGRKYKKVRFMAYTDETFKTREAIQHESGILGPLLYGEVGDTLLIIFKNQASRPYNIYPHGITDVRPLYSRRLPKGVKHLKDFPILPGEIFKYKWTVTVEDGPTKSDPRCLTRYYSSFVNMERDLASGLIGPLLICYKESVDQRGNQIMSDKRNVILFSVFDENRSWYLTENIQRFLPNPAGVQLEDPEFQASNIMHSINGYVFDSLQLSVCLHEVAYWYILSIGAQTDFLSVFFSGYTFKHKMVYEDTLTLFPFSGETVFMSMENPGLWILGCHNSDFRNRGMTALLKVSSCDKNTGDYYEDSYEDISAYLLSKNNAIEPRSFSQNPPVLKRHQREITRTTLQSDQEEIDYDDTISVEMKKEDFDIYDEDENQSPRSFQKKTRHYFIAAVERLWDYGMSSSPHVLRNRAQSGSVPQFKKVVFQEFTDGSFTQPLYRGELNEHLGLLGPYIRAEVEDNIMVTFRNQASRPYSFYSSLISYEEDQRQGAEPRKNFVKPNETKTYFWKVQHHMAPTKDEFDCKAWAYFSDVDLEKDVHSGLIGPLLVCHTNTLNPAHGRQVTVQEFALFFTIFDETKSWYFTENMERNCRAPCNIQMEDPTFKENYRFHAINGYIMDTLPGLVMAQDQRIRWYLLSMGSNENIHSIHFSGHVFTVRKKEEYKMALYNLYPGVFETVEMLPSKAGIWRVECLIGEHLHAGMSTLFLVYSNKCQTPLGMASGHIRDFQITASGQYGQWAPKLARLHYSGSINAWSTKEPFSWIKVDLLAPMIIHGIKTQGARQKFSSLYISQFIIMYSLDGKKWQTYRGNSTGTLMVFFGNVDSSGIKHNIFNPPIIARYIRLHPTHYSIRSTLRMELMGCDLNSCSMPLGMESKAISDAQITASSYFTNMFATWSPSKARLHLQGRSNAWRPQVNNPKEWLQVDFQKTMKVTGVTTQGVKSLDTSMYVKEFLISSSQDGHQWTLFFQNGKVKVFQGNQDSFTPVVNSLDPPLLTRYLRIHPQSWVHQIALRMEVLGCEAQDLY

SEQ ID NO: 573 - DNA, 4371 bp, synthetic construct
  misc_feature 1..4371: note = Variant of human B-domain deleted Factor VIII
  source 1..4371: mol_type = other DNA
atgcagattgaactgtctacctgcttcttcctctgtttgctgaggttctgctttagcgccactagacggtactaccttggcgctgtggagctgtcctgggactatatgcagagtgatttgggagagcttcccgtcgacgcacgatttcctcctcgcgttccaaagtcatttcccttcaacacaagccaagtgtacaagaagacgctcttcgtcgaattcaccgatcacctgttcaatatcgccaaacccagaccaccatggatgggtcttttggggcctaccatacaagcggaggtgtatgacacagttgttatcactctcaagaacatggcttctcatccggtaagtcttcacgcagtgggcgtgtcctactggaaagcttcagaaggagccgagtatgatgatcagacatcccagagggagaaagaagacgacaaggtatttccaggtgggtctcatacctatgtgtggcaagtgctcaaagagaatggccctatggcaagcgatccgctctgtttgacttacagctacctttcacacgttgacctcgtcaaggacctcaactccgggttgattggagccttgttggtatgcagggaaggatctcttgccaaagagaagacacagaccctccacaagtttatccttctctttgctgtgttcgatgagggcaaaagttggcatagcgaaacgaagaattccctcatgcaggatcgcgacgcagccagcgccagagcttggcccaagatgcacactgtgaacggatatgtcaataggtcacttcctggcttgattgggtgtcatcggaaaagtgtctactggcacgtgatcggaatggggacaacaccagaggtccactccatatttctcgaaggccataccttccttgttcgaaaccacagacaggcatccttggagatctctcccattacctttctcactgcccaaacgctccttatggacttgggtcagttccttctcttctgccatatcagctcacaccagcatgatggtatggaagcttatgtgaaagtcgacagttgtccggaggagccacagttgcgcatgaagaataatgaagaagccgaggattacgacgacgatctcaccgattctgagatggacgtggtgaggtttgatgacgacaactctccctccttcattcaaatccggagcgtggcgaagaaacaccccaagacttgggtccactatatagcggcggaagaggaggattgggattacgctcctcttgtattggcaccagatgaccgctcatacaaaagccagtacctcaacaacggaccgcagagaattggccggaagtataagaaagtgcgatttatggcctatacagacgaaacctttaagacaagggaggccatccagcatgagagtgggattttgggacctcttctttacggcgaagttggtgataccctcctcatcatcttcaagaatcaagcttctcgcccctataacatttacccacacgggatcactgacgttaggcctttgtatagcagaagacttcccaaaggcgtgaagcatctcaaagacttccccattttgccaggcgagatctttaagtacaaatggaccgtcacagtggaagatggaccgactaaatcagaccctcgatgccttacgcggtactattcctccttcgtgaatatggagagagatttggcaagcggactcataggaccactcctcatctgttacaaggaatctgtagaccagaggggtaaccagattatgagtgataaacgcaatgtgatcctttttagcgtcttcgacgagaaccggtcctggtacttgaccgagaatatacaaaggttccttcccaaccccgcaggcgttcagttggaagaccctgagtttcaggccagcaatattatgcactcaatcaacggctatgtgtttgatagtctccagctttctgtttgcctccatgaagtagcctattggtacatcttgtcaattggtgctcaaacagacttcctctccgtcttcttctccggctacacctttaagcacaagatggtgtatgaggacactctcacactctttccattttctggagaaaccgtgttcatgagcatggagaatccaggcctttggatcttgggttgccacaacagtgattttcgcaatcggggaatgactgctctcctcaaagtcagcagctgtgataagaacacaggcgactattacgaagattcttacgaggacataagtgcctacttgttgtccaagaataacgccattgagcccagatcattctcccagaatcctcccgtgcttaaaaggcatcagcgcgaaatcaccagaactactcttcagtctgatcaagaggagattgactatgacgacaccataagcgtggaaatgaagaaggaggatttcgatatctatgacgaagatgagaaccagtctccgcggagctttcagaagaagacgcgacactacttcattgcagcagtcgaaaggctttgggactacggtatgtcatcatcccctcatgtgttgcgcaatagagctcagagtggaagtgttccacagttcaagaaagtcgtctttcaagagtttacagatggcagcttcacacagcctctctatcggggcgagcttaacgaacatttgggactccttggtccctatatccgagccgaagtggaggacaacattatggttacctttaggaatcaagcctctcgcccctacagcttctactcctccctcatcagttatgaggaggatcagagacaaggcgctgaaccacggaagaactttgtgaaaccgaatgagacgaagacctacttctggaaagtacagcaccacatggcccccacaaaagacgaattcgattgcaaagcatgggcgtatttttcagacgttgacttggagaaagatgtacattcaggacttattggtcctttgttggtgtgtcacactaacactctcaatccagcccatggcaggcaggtgacagtccaagaattcgctcttttctttaccatctttgatgagaccaagtcctggtacttcacggaaaacatggagcgcaattgcagagccccctgtaacatacagatggaggaccctacctttaaggaaaattatcggttccacgcaatcaacggatacattatggatacactccctggccttgtgatggctcaggaccaacgaatcaggtggtacctcctcagcatgggttctaatgagaacatacactccattcacttttcaggacatgtgttcactgtccggaagaaagaagagtataagatggccctctacaatttgtatccaggcgtgtttgagaccgttgaaatgcttccctctaaagctggcatctggagagtagagtgcttgatcggagaacatcttcacgcaggtatgagcaccttgttcctcgtgtacagcaacaaatgtcagaccccacttggcatggccagtggacacattcgcgactttcagatcacagcatctggccagtatggacaatgggccccaaagttggctcgcctccattactccggtagcataaatgcgtggtccactaaagaacctttcagctggattaaggtcgatcttcttgcccccatgatcatccacggcattaagacacagggagcgaggcagaaattctcctccctctacatctcacagttcattattatgtatagtttggacggcaagaagtggcaaacttatagaggtaacagtactggaacagatatggtgttcttcggcaacgttgatagctctggcatcaaacacaacatctttaatcctcccataatagctcggtacatcagattgcatccgacccactacagcattaggagtacactccgaatggagcttatgggttgcgacttgaattcctgttcaatgccactcggaatggagtctaaagccatctctgatgcacagataaccgccagtagctactttacgaacatgtttgctacgtggtcaccctctaaggcaaggcttcatttgcaaggccggtctaatgcctggagacctcaggtgaacaacccgaaagaatggctccaggtggactttcagaagaccatgaaagtaacaggtgtcactactcagggagttaagtccttggataccagcatgtatgtgaaggagttccttatttcctcatcacaagatggccaccagtggaccctcttctttcagaatggtaaggtcaaagtgtttcagggcaatcaagacagcttcacacccgtggtgaacagtcttgatcctccactcttgacacgataccttcgaatccatccacagtcttgggttcaccagattgcattgcgcatggaagtacttggatgcgaggctcaggacctctac

SEQ ID NO: 574 - protein, 1457 aa, synthetic construct
  REGION 1..1457: note = Variant of human B-domain deleted Factor VIII
MQIELSTCFFLCLLRFCFSATRRYYLGAVELSWDYMQSDLGELPVDARFPPRVPKSFPFNTSQVYKKTLFVEFTDHLFNIAKPRPPWMGLLGPTIQAEVYDTVVITLKNMASHPVSLHAVGVSYWKASEGAEYDDQTSQREKEDDKVFPGGSHTYVWQVLKENGPMASDPLCLTYSYLSHVDLVKDLNSGLIGALLVCREGSLAKEKTQTLHKFILLFAVFDEGKSWHSETKNSLMQDRDAASARAWPKMHTVNGYVNRSLPGLIGCHRKSVYWHVIGMGTTPEVHSIFLEGHTFLVRNHRQASLEISPITFLTAQTLLMDLGQFLLFCHISSHQHDGMEAYVKVDSCPEEPQLRMKNNEEAEDYDDDLTDSEMDVVRFDDDNSPSFIQIRSVAKKHPKTWVHYIAAEEEDWDYAPLVLAPDDRSYKSQYLNNGPQRIGRKYKKVRFMAYTDETFKTREAIQHESGILGPLLYGEVGDTLLIIFKNQASRPYNIYPHGITDVRPLYSRRLPKGVKHLKDFPILPGEIFKYKWTVTVEDGPTKSDPRCLTRYYSSFVNMERDLASGLIGPLLICYKESVDQRGNQIMSDKRNVILFSVFDENRSWYLTENIQRFLPNPAGVQLEDPEFQASNIMHSINGYVFDSLQLSVCLHEVAYWYILSIGAQTDFLSVFFSGYTFKHKMVYEDTLTLFPFSGETVFMSMENPGLWILGCHNSDFRNRGMTALLKVSSCDKNTGDYYEDSYEDISAYLLSKNNAIEPRSFSQNPPVLKRHQREITRTTLQSDQEEIDYDDTISVEMKKEDFDIYDEDENQSPRSFQKKTRHYFIAAVERLWDYGMSSSPHVLRNRAQSGSVPQFKKVVFQEFTDGSFTQPLYRGELNEHLGLLGPYIRAEVEDNIMVTFRNQASRPYSFYSSLISYEEDQRQGAEPRKNFVKPNETKTYFWKVQHHMAPTKDEFDCKAWAYFSDVDLEKDVHSGLIGPLLVCHTNTLNPAHGRQVTVQEFALFFTIFDETKSWYFTENMERNCRAPCNIQMEDPTFKENYRFHAINGYIMDTLPGLVMAQDQRIRWYLLSMGSNENIHSIHFSGHVFTVRKKEEYKMALYNLYPGVFETVEMLPSKAGIWRVECLIGEHLHAGMSTLFLVYSNKCQTPLGMASGHIRDFQITASGQYGQWAPKLARLHYSGSINAWSTKEPFSWIKVDLLAPMIIHGIKTQGARQKFSSLYISQFIIMYSLDGKKWQTYRGNSTGTDMVFFGNVDSSGIKHNIFNPPIIARYIRLHPTHYSIRSTLRMELMGCDLNSCSMPLGMESKAISDAQITASSYFTNMFATWSPSKARLHLQGRSNAWRPQVNNPKEWLQVDFQKTMKVTGVTTQGVKSLDTSMYVKEFLISSSQDGHQWTLFFQNGKVKVFQGNQDSFTPVVNSLDPPLLTRYLRIHPQSWVHQIALRMEVLGCEAQDLY

SEQ ID NO: 575 - DNA, 4371 bp, synthetic construct
  misc_feature 1..4371: note = Variant of human B-domain deleted Factor VIII
  source 1..4371: mol_type = other DNA
atgcagattgaactgtctacctgcttcttcctctgtttgctgaggttctgctttagcgccactagacggtactaccttggcgctgtggagctgtcctgggactatatgcagagtgatttgggagagcttcccgtcgacgcacgatttcctcctcgcgttccaaagtcatttcccttcaacacaagcgtggtgtacaagaagacgctcttcgtcgaattcaccgatcacctgttcaatatcgccaaacccagaccaccatggatgggtcttttggggcctaccatacaagcggaggtgtatgacacagttgttatcactctcaagaacatggcttctcatccggtaagtcttcacgcagtgggcgtgtcctactggaaagcttcagaaggagccgagtatgatgatcagacatcccagagggagaaagaagacgacaaggtatttccaggtgggtctcatacctatgtgtggcaagtgctcaaagagaatggccctatggcaagcgatccgctctgtttgacttacagctacctttcacacgttgacctcgtcaaggacctcaactccgggttgattggagccttgttggtatgcagggaaggatctcttgccaaagagaagacacagaccctccacaagtttatccttctctttgctgtgttcgatgagggcaaaagttggcatagcgaaacgaagaattccctcatgcaggatcgcgacgcagccagcgccagagcttggcccaagatgcacactgtgaacggatatgtcaataggtcacttcctggcttgattgggtgtcatcggaaaagtgtctactggcacgtgatcggaatggggacaacaccagaggtccactccatatttctcgaaggccataccttccttgttcgaaaccacagacaggcatccttggagatctctcccattacctttctcactgcccaaacgctccttatggacttgggtcagttccttctcttctgccatatcagctcacaccagcatgatggtatggaagcttatgtgaaagtcgacagttgtggtgaggagccacagttgcgcatgaagaataatgaagaagccgaggattacgacgacgatctcaccgattctgagatggacgtggtgaggtttgatgacgacaactctccctccttcattcaaatccggagcgtggcgaagaaacaccccaagacttgggtccactatatagcggcggaagaggaggattgggattacgctcctcttgtattggcaccagatgaccgctcatacaaaagccagtacctcaacaacggaccgcagagaattggccggaagtataagaaagtgcgatttatggcctatacagacgaaacctttaagacaagggaggccatccagcatgagagtgggattttgggacctcttctttacggcgaagttggtgataccctcctcatcatcttcaagaatcaagcttctcgcccctataacatttacccacacgggatcactgacgttaggcctttgtatagcagaagacttcccaaaggcgtgaagcatctcaaagacttccccattttgccaggcgagatctttaagtacaaatggaccgtcacagtggaagatggaccgactaaatcagaccctcgatgccttacgcggtactattcctccttcgtgaatatggagagagatttggcaagcggactcataggaccactcctcatctgttacaaggaatctgtagaccagaggggtaaccagattatgagtgataaacgcaatgtgatcctttttagcgtcttcgacgagaaccggtcctggtacttgaccgagaatatacaaaggttccttcccaaccccgcaggcgttcagttggaagaccctgagtttcaggccagcaatattatgcactcaatcaacggctatgtgtttgatagtctccagctttctgtttgcctccatgaagtagcctattggtacatcttgtcaattggtgctcaaacagacttcctctccgtcttcttctccggctacacctttaagcacaagatggtgtatgaggacactctcacactctttccattttctggagaaaccgtgttcatgagcatggagaatccaggcctttggatcttgggttgccacaacagtgattttcgcaatcggggaatgactgctctcctcaaagtcagcagctgtgataagaacacaggcgactattacgaagattcttacgaggacataagtgcctacttgttgtccaagaataacgccattgagcccagatcattctcccagaatcctcccgtgcttaaaaggcatcagcgcgaaatcaccagaactactcttcagtctgatcaagaggagattgactatgacgacaccataagcgtggaaatgaagaaggaggatttcgatatctatgacgaagatgagaaccagtctccgcggagctttcagaagaagacgcgacactacttcattgcagcagtcgaaaggctttgggactacggtatgtcatcatcccctcatgtgttgcgcaatagagctcagagtggaagtgttccacagttcaagaaagtcgtctttcaagagtttacagatggcagcttcacacagcctctctatcggggcgagcttaacgaacatttgggactccttggtccctatatccgagccgaagtggaggacaacattatggttacctttaggaatcaagcctctcgcccctacagcttctactcctccctcatcagttatgaggaggatcagagacaaggcgctgaaccacggaagaactttgtgaaaccgaatgagacgaagacctacttctggaaagtacagcaccacatggcccccacaaaagacgaattcgattgcaaagcatgggcgtatttttcagacgttgacttggagaaagatgtacattcaggacttattggtcctttgttggtgtgtcacactaacactctcaatccagcccatggcaggcaggtgacagtccaggaattcgctcttttctttaccatctttgatgagaccaagtcctggtacttcacggaaaacatggagcgcaattgcagagccccctgtaacatacagatggaggaccctacctttaaggaaaattatcggttccacgcaatcaacggatacattatggatacactccctggccttgtgatggctcaggaccaacgaatcaggtggtacctcctcagcatgggttctaatgagaacatacactccattcacttttcaggacatgtgttcactgtccggaagaaagaagagtataagatggccctctacaatttgtatccaggcgtgtttgagaccgttgaaatgcttccctctaaagctggcatctggagagtagagtgcttgatcggagaacatcttcacgcaggtatgagcaccttgttcctcgtgtacagcaacaaatgtcagaccccacttggcatggccagtggacacattcgcgactttcagatcacagcatctggccagtatggacaatgggccccaaagttggctcgcctccattactccggtagcataaatgcgtggtccactaaagaacctttcagctggattaaggtcgatcttcttgcccccatgatcatccacggcattaagacacagggagcgaggcagaaattctcctccctctacatctcacagttcattattatgtatagtttggacggcaagaagtggcaaacttatagaggtaacagtactggaacactcatggtgttcttcggcaacgttgatagctctggcatcaaacacaacatctttaatcctcccataatagctcggtacatcagattgcatccgacccactacagcattaggagtacactccgaatggagcttatgggttgcgacttgaattcctgttcaatgccactcggaatggagtctaaagccatctctgatgcacagataaccgccagtagctactttacgaacatgtttgctacgtggtcaccctctaaggcaaggcttcatttgcaaggccggtctaatgcctggagacctcaggtgaacaacccgaaagaatggctccaggtggactttcagaagaccatgaaagtaacaggtgtcactactcagggagttaagtccttggataccagcatgtatgtgaaggagttccttatttcctcatcacaagatggccaccagtggaccctcttctttcagaatggtaaggtcaaagtgtttcagggcaatcaagacagcttcacacccgtggtgaacagtcttgatcctccactcttgacacgataccttcgaatccatccacagtcttgggttcaccagattgcattgcgcatggaagtacttggatgcgaggctcaggacctctac

SEQ ID NO: 576 - protein, 1457 aa, synthetic construct
  REGION 1..1457: note = Variant of human B-domain deleted Factor VIII
MQIELSTCFFLCLLRFCFSATRRYYLGAVELSWDYMQSDLGELPVDARFPPRVPKSFPFNTSVVYKKTLFVEFTDHLFNIAKPRPPWMGLLGPTIQAEVYDTVVITLKNMASHPVSLHAVGVSYWKASEGAEYDDQTSQREKEDDKVFPGGSHTYVWQVLKENGPMASDPLCLTYSYLSHVDLVKDLNSGLIGALLVCREGSLAKEKTQTLHKFILLFAVFDEGKSWHSETKNSLMQDRDAASARAWPKMHTVNGYVNRSLPGLIGCHRKSVYWHVIGMGTTPEVHSIFLEGHTFLVRNHRQASLEISPITFLTAQTLLMDLGQFLLFCHISSHQHDGMEAYVKVDSCGEEPQLRMKNNEEAEDYDDDLTDSEMDVVRFDDDNSPSFIQIRSVAKKHPKTWVHYIAAEEEDWDYAPLVLAPDDRSYKSQYLNNGPQRIGRKYKKVRFMAYTDETFKTREAIQHESGILGPLLYGEVGDTLLIIFKNQASRPYNIYPHGITDVRPLYSRRLPKGVKHLKDFPILPGEIFKYKWTVTVEDGPTKSDPRCLTRYYSSFVNMERDLASGLIGPLLICYKESVDQRGNQIMSDKRNVILFSVFDENRSWYLTENIQRFLPNPAGVQLEDPEFQASNIMHSINGYVFDSLQLSVCLHEVAYWYILSIGAQTDFLSVFFSGYTFKHKMVYEDTLTLFPFSGETVFMSMENPGLWILGCHNSDFRNRGMTALLKVSSCDKNTGDYYEDSYEDISAYLLSKNNAIEPRSFSQNPPVLKRHQREITRTTLQSDQEEIDYDDTISVEMKKEDFDIYDEDENQSPRSFQKKTRHYFIAAVERLWDYGMSSSPHVLRNRAQSGSVPQFKKVVFQEFTDGSFTQPLYRGELNEHLGLLGPYIRAEVEDNIMVTFRNQASRPYSFYSSLISYEEDQRQGAEPRKNFVKPNETKTYFWKVQHHMAPTKDEFDCKAWAYFSDVDLEKDVHSGLIGPLLVCHTNTLNPAHGRQVTVQEFALFFTIFDETKSWYFTENMERNCRAPCNIQMEDPTFKENYRFHAINGYIMDTLPGLVMAQDQRIRWYLLSMGSNENIHSIHFSGHVFTVRKKEEYKMALYNLYPGVFETVEMLPSKAGIWRVECLIGEHLHAGMSTLFLVYSNKCQTPLGMASGHIRDFQITASGQYGQWAPKLARLHYSGSINAWSTKEPFSWIKVDLLAPMIIHGIKTQGARQKFSSLYISQFIIMYSLDGKKWQTYRGNSTGTLMVFFGNVDSSGIKHNIFNPPIIARYIRLHPTHYSIRSTLRMELMGCDLNSCSMPLGMESKAISDAQITASSYFTNMFATWSPSKARLHLQGRSNAWRPQVNNPKEWLQVDFQKTMKVTGVTTQGVKSLDTSMYVKEFLISSSQDGHQWTLFFQNGKVKVFQGNQDSFTPVVNSLDPPLLTRYLRIHPQSWVHQIALRMEVLGCEAQDLY

SEQ ID NO: 577 - DNA, 4371 bp, synthetic construct
  misc_feature 1..4371: note = Variant of human B-domain deleted Factor VIII
  source 1..4371: mol_type = other DNA
atgcagattgaactgtctacctgcttcttcctctgtttgctgaggttctgctttagcgccactagacggtactaccttggcgctgtggagctgtcctgggactatatgcagagtgatttgggagagcttcccgtcgacgcacgatttcctcctcgcgttccaaagtcatttcccttcaacacaagcgttgtgtacaagaagacgctcttcgtcgaattcaccgatcacctgttcaatatcgccaaacccagaccaccatggatgggtcttttggggcctaccatacaagcggaggtgtatgacacagttgttatcactctcaagaacatggcttctcatccggtaagtcttcacgcagtgggcgtgtcctactggaaagcttcagaaggagccgagtatgatgatcagacatcccagagggagaaagaagacgacaaggtatttccaggtgggtctcatacctatgtgtggcaagtgctcaaagagaatggccctatggcaagcgatccgctgtgtttgacttacagctacctttcacacgttgacctcgtcaaggacctcaactccgggttgattggagccttgttggtatgcagggaaggatctcttgccaaagagaagacacagaccctccacaagtttatccttctctttgctgtgttcgatgagggcaaaagttggcatagcgaaacgaagaattccctcatgcaggatcgcgacgcagccagcgccagagcttggcccaagatgcacactgtgaacggatatgtcaataggtcacttcctggcttgattgggtgtcatcggaaaagtgtctactggcacgtgatcggaatggggacaacaccagaggtccactccatatttctcgaaggccataccttccttgttcgaaaccacagacaggcatccttggggatctctcccattacctttctcactgcccaaacgctccttatggacttgggtcagttccttctcttctgccatatcagctcacaccagcatgatggtatggaagcttatgtgaaagtcgacagttgtccggaggagccacagttgtgcatgaagaataatgaagaagccgaggattacgacgacgatctcaccgattctgagatggacgtggtgaggtttgatgacgacaactctccctccttcattcaaatccggagcgtggcgaagaaacaccccaagacttgggtccactatatagcggcggaagaggaggattgggattacgctcctcttgtattggcaccagatgaccgctcatacaaaagccagtacctcaacaacggaccgcagagaattggccggaagtataagaaagtgcgatttatggcctatacagacgaaacctttaagacaagggaggccatccagcatgagagtgggattttgggacctcttctttacggcgaagttggtgataccctcctcatcatcttcaagaatcaagcttctcgcccctataacatttacccacacgggatcactgacgttaggcctttgtatagcagaagacttcccaaaggcgtgaagcatctcaaagacttccccattttgccaggcgagatctttaagtacaaatggaccgtcacagtggaagatggaccgactaaatcagaccctcgatgccttacgcggtactattcctccttcgtgaatatggagagagatttggcaagcggactcataggaccactcctcatctgttacaaggaatctgtagaccagaggggtaaccagattatgagtgataaacgcaatgtgatcctttttagcgtcttcgacgagaaccggtcctggtacttgaccgagaatatacaaaggttccttcccaaccccgcaggcgttcagttggaagaccctgagtttcaggccagcaatattatgcactcaatcaacggctatgtgtttgatagtctccagctttctgtttgcctccatgaagtagcctattggtacatcttgtcaattggtgctcaaacagacttcctctccgtcttcttctccggctacacctttaagcacaagatggtgtatgaggacactctcacactctttccattttctggagaaaccgtgttcatgagcatggagaatccaggcctttggatcttgggttgccacaacagtgattttcgcaatcggggaatgactgctctcctcaaagtcagcagctgtgataagaacacaggcgactattacgaagattcttacgaggacataagtgcctacttgttgtccaagaataacgccattgagcccagatcattctcccagaatcctcccgtgcttaaaaggcatcagcgcgaaatcaccagaactactcttcagtctgatcaagaggagattgactatgacgacaccataagcgtggaaatgaagaaggaggatttcgatatctatgacgaagatgagaaccagtctccgcggagctttcagaagaagacgcgacactacttcattgcagcagtcgaaaggctttgggactacggtatgtcatcatcccctcatgtgttgcgcaatagagctcagagtggaagtgttccacagttcaagaaagtcgtctttcaagagtttacagatggcagcttcacacagcctctctatcggggcgagcttaacgaacatttgggactccttggtccctatatccgagccgaagtggaggacaacattatggttacctttaggaatcaagcctctcgcccctacagcttctactcctccctcatcagttatgaggaggatcagagacaaggcgctgaaccacggaagaactttgtgaaaccgaatgagacgaagacctacttctggaaagtacagcaccacatggcccccacaaaagacgaattcgattgcaaagcatgggcgtatttttcagacgttgacttggagaaagatgtacattcaggacttattggtcctttgttggtgtgtcacactaacactctcaatccagcccatggcaggcaggtgacagtccaagaattcgctcttttctttaccatctttgatgagaccaagtcctggtacttcacggaaaacatggagcgcaattgcagagccccctgtaacatacagatggaggaccctacctttaaggaaaattatcggttccacgcaatcaacggatacattatggatacactccctggccttgtgatggctcaggaccaacgaatcaggtggtacctcctcagcatgggttctaatgagaacatacactccattcacttttcaggacatgtgttcactgtccggaagaaagaagagtataagatggccctctacaatttgtatccaggcgtgtttgagaccgttgaaatgcttccctctaaagctggcatctggagagtagagtgcttgatcggagaacatcttcacgcaggtatgagcaccttgttcctcgtgtacagcaacaaatgtcagaccccacttggcatggccagtggacacattcgcgactttcagatcacagcatctggccagtatggacaatgggccccaaagttggctcgcctccattactccggtagcataaatgcgtggtccactaaagaacctttcagctggattaaggtcgatcttcttgcccccatgatcatccacggcattaagacacagggagcgaggcagaaattctcctccctctacatctcacagttcattattatgtatagtttggacggcaagaagtggcaaacttatagaggtaacagtactggaacactcatggtgttcttcggcaacgttgatagctctggcatcaaacacaacatctttaatcctcccataatagctcggtacatcagattgcatccgacccactacagcattaggagtacactccgaatggagcttatgggttgcgacttgaattcctgttcaatgccactcggaatggagtctaaagccatctctgatgcacagataaccgccagtagctactttacgaacatgtttgctacgtggtcaccctctaaggcaaggcttcatttgcaaggccggtctaatgcctggagacctcaggtgaacaacccgaaagaatggctccaggtggactttcagaagaccatgaaagtaacaggtgtcactactcagggagttaagtccttggataccagcatgtatgtgaaggagttccttatttcctcatcacaagatggccaccagtggaccctcttctttcagaatggtaaggtcaaagtgtttcagggcaatcaagacagcttcacacccgtggtgaacagtatcgatcctccactcttgacacgataccttcgaatccatccacagtcttgggttcaccagattgcattgcgcatggaagtacttggatgcgaggctcaggacctctac

SEQ ID NO: 578 - protein, 1457 aa, synthetic construct
  REGION 1..1457: note = Variant of human B-domain deleted Factor VIII
MQIELSTCFFLCLLRFCFSATRRYYLGAVELSWDYMQSDLGELPVDARFPPRVPKSFPFNTSVVYKKTLFVEFTDHLFNIAKPRPPWMGLLGPTIQAEVYDTVVITLKNMASHPVSLHAVGVSYWKASEGAEYDDQTSQREKEDDKVFPGGSHTYVWQVLKENGPMASDPLCLTYSYLSHVDLVKDLNSGLIGALLVCREGSLAKEKTQTLHKFILLFAVFDEGKSWHSETKNSLMQDRDAASARAWPKMHTVNGYVNRSLPGLIGCHRKSVYWHVIGMGTTPEVHSIFLEGHTFLVRNHRQASLGISPITFLTAQTLLMDLGQFLLFCHISSHQHDGMEAYVKVDSCPEEPQLCMKNNEEAEDYDDDLTDSEMDVVRFDDDNSPSFIQIRSVAKKHPKTWVHYIAAEEEDWDYAPLVLAPDDRSYKSQYLNNGPQRIGRKYKKVRFMAYTDETFKTREAIQHESGILGPLLYGEVGDTLLIIFKNQASRPYNIYPHGITDVRPLYSRRLPKGVKHLKDFPILPGEIFKYKWTVTVEDGPTKSDPRCLTRYYSSFVNMERDLASGLIGPLLICYKESVDQRGNQIMSDKRNVILFSVFDENRSWYLTENIQRFLPNPAGVQLEDPEFQASNIMHSINGYVFDSLQLSVCLHEVAYWYILSIGAQTDFLSVFFSGYTFKHKMVYEDTLTLFPFSGETVFMSMENPGLWILGCHNSDFRNRGMTALLKVSSCDKNTGDYYEDSYEDISAYLLSKNNAIEPRSFSQNPPVLKRHQREITRTTLQSDQEEIDYDDTISVEMKKEDFDIYDEDENQSPRSFQKKTRHYFIAAVERLWDYGMSSSPHVLRNRAQSGSVPQFKKVVFQEFTDGSFTQPLYRGELNEHLGLLGPYIRAEVEDNIMVTFRNQASRPYSFYSSLISYEEDQRQGAEPRKNFVKPNETKTYFWKVQHHMAPTKDEFDCKAWAYFSDVDLEKDVHSGLIGPLLVCHTNTLNPAHGRQVTVQEFALFFTIFDETKSWYFTENMERNCRAPCNIQMEDPTFKENYRFHAINGYIMDTLPGLVMAQDQRIRWYLLSMGSNENIHSIHFSGHVFTVRKKEEYKMALYNLYPGVFETVEMLPSKAGIWRVECLIGEHLHAGMSTLFLVYSNKCQTPLGMASGHIRDFQITASGQYGQWAPKLARLHYSGSINAWSTKEPFSWIKVDLLAPMIIHGIKTQGARQKFSSLYISQFIIMYSLDGKKWQTYRGNSTGTLMVFFGNVDSSGIKHNIFNPPIIARYIRLHPTHYSIRSTLRMELMGCDLNSCSMPLGMESKAISDAQITASSYFTNMFATWSPSKARLHLQGRSNAWRPQVNNPKEWLQVDFQKTMKVTGVTTQGVKSLDTSMYVKEFLISSSQDGHQWTLFFQNGKVKVFQGNQDSFTPVVNSIDPPLLTRYLRIHPQSWVHQIALRMEVLGCEAQDLY

SEQ ID NO: 579 - DNA, 4371 bp, synthetic construct
  misc_feature 1..4371: note = Variant of human B-domain deleted Factor VIII
  source 1..4371: mol_type = other DNA
atgcagattgaactgtctacctgcttcttcctctgtttgctgaggttctgctttagcgccactagacggtactaccttggcgctgtggagctgtcctgggactatatgcagagtgatttgggagagcttcccgtcgacgcacgatttcctcctcgcgttccaaagtcatttcccttcaacacaagcgtggtgtacaagaagacgctcttcgtcgaattcaccgatcacctgttcaatatcgccaaacccagaccaccatggatgggtcttttggggcctaccatacaagcggaggtgtatgacacagttgttatcactctcaagaacatggcttctcatccggtaagtcttcacgcagtgggcgtgtcctactggaaagcttcagaaggagccgagtatgatgatcagacatcccagagggagaaagaagacgacaaggtatttccaggtgggtctcatacctatgtgtggcaagtgctcaaagagaatggccctatggcaagcgatccgctgtgtttgacttacagctacctttcacacgttgacctcgtcaaggacctcaactccgggttgattggagccttgttggtatgcagggaaggatctcttgccaaagagaagacacagaccctccacaagtttatccttctctttgctgtgttcgatgagggcaaaagttggcatagcgaaacgaagaattccctcatgcaggatcgcgacgcagccagcgccagagcttggcccaagatgcacactgtgaacggatatgtcaataggtcacttcctggcttgattgggtgtcatcggaaaagtgtctactggcacgtgatcggaatggggacaacaccagaggtccactccatatttctcgaaggccataccttccttgttcgaaaccacagacaggcatccttggagatctctcccattacctttctcactgcccaaacgctccttatggacttgggtcagttccttctcttctgccatatcagctcacaccagcatgatggtatggaagcttatgtgaaagtcgacagttgtcctgaggagccacagttgcgcatgaagaataatgaagaagccgaggattacgacgacgatctcaccgattctgagatggacgtggtgaggtttgatgacgacaactctccctccttcattcaaatccggagcgtggcgaagaaacaccccaagacttgggtccactatatagcggcggaagaggaggattgggattacgctcctcttgtattggcaccagatgaccgctcatacaaaagccagtacctcaacaacggaccgcagagaattggccggaagtataagaaagtgcgatttatggcctatacagacgaaacctttaagacaagggaggccatccagcatgagagtgggattttgggacctcttctttacggcgaagttggtgataccctcctcatcatcttcaagaatcaagcttctcgcccctataacatttacccacacgggatcactgacgttaggcctttgtatagcagaagacttcccaaaggcgtgaagcatctcaaagacttccccattttgccaggcgagatctttaagtacaaatggaccgtcacagtggaagatggaccgactaaatcagaccctcgatgccttacgcggtactattcctccttcgtgaatatggagagagatttggcaagcggactcataggaccactcctcatctgttacaaggaatctgtagaccagaggggtaaccagattatgagtgataaacgcaatgtgatcctttttagcgtcttcgacgagaaccggtcctggtacttgaccgagaatatacaaaggttccttcccaaccccgcaggcgttcagttggaagaccctgagtttcaggccagcaatattatgcactcaatcaacggctatgtgtttgatagtctccagctttctgtttgcctccatgaagtagcctattggtacatcttgtcaattggtgctcaaacagacttcctctccgtcttcttctccggctacacctttaagcacaagatggtgtatgaggacactctcacactctttccattttctggagaaaccgtgttcatgagcatggagaatccaggcctttggatcttgggttgccacaacagtgattttcgcaatcggggaatgactgctctcctcaaagtcagcagctgtgataagaacacaggcgactattacgaagattcttacgaggacataagtgcctacttgttgtccaagaataacgccattgagcccagatcattctcccagaatcctccagtgcttaaaaggcatcagcgcgaaatcaccagaactactcttcagtctgatcaagaggagattgactatgacgacaccataagcgtggaaatgaagaaggaggatttcgatatctatgacgaagatgagaaccagtctccgcggagctttcagaagaagacgcgacactacttcattgcagcagtcgaaaggctttgggactacggtatgtcatcatcccctcatgtgttgcgcaatagagctcagagtggaagtgttccacagttcaagaaagtcgtctttcaagagtttacagatggcagcttcacacagcctctctatcggggcgagcttaacgaacatttgggactccttggtccctatatccgagccgaagtggaggacaacattatggttacctttaggaatcaagcctctcgcccctacagcttctactcctccctcatcagttatgaggaggatcagagacaaggcgctgaaccacggaagaactttgtgaaaccgaatgagacgaagacctacttctggaaagtacagcaccacatggcccccacaaaagacgaattcgattgcaaagcatgggcgtatttttcagacgttgacttggagaaagatgtacattcaggacttattggtcctttgttggtgtgtcacactaacactctcaatccagcccatggcaggcaggtgacagtccaggaattcgctcttttctttaccatctttgatgagaccaagtcctggtacttcacggaaaacatggagcgcaattgcagagccccctgtaacatacagatggaggaccctacctttaaggaaaattatcggttccacgcaatcaacggatacattatggatacactccctggccttgtgatggctcaggaccaacgaatcaggtggtacctcctcagcatgggttctaatgagaacatacactccattcacttttcaggacatgtgttcactgtccggaagaaagaagagtataagatggccctctacaatttgtatccaggcgtgtttgagaccgttgaaatgcttccctctaaagctggcatctggagagtagagtgcttgatcggagaacatcttcacgcaggtatgagcaccttgttcctcgtgtacagcaacaaatgtcagaccccacttggcatggccagtggacacattcgcgactttcagatcacagcatctggccagtatggacaatgggccccaaagttggctcgcctccattactccggtagcataaatgcgtggtccactaaagaacctttcagctggattaaggtcgatcttcttgcccccatgatcatccacggcattaagacacagggagcgaggcagaaattctcctccctctacatctcacagttcattattatgtatagtttggacggcaagaagtggcaaacttatagaggtaacagtactggaacactcatggtgttcttcggcaacgttgatagctctggcatcaaacacaacatctttaatcctcccataatagctcggtacatcagattgcatccgacccactacagcattaggagtacactccgaatggagcttatgggttgcgacttgaattcctgttcaatgccactcggaatggagtctaaagccatctctgatgcacagataaccgccagtagctactttacgaacatgtttgctacgtggtcaccctctaaggcaaggcttcatttgcaaggccggtctaatgcctggagacctcaggtgaacaacccgaaagaatggctccaggtggactttcagaagaccatgaaagtaacaggtgtcactactcagggagttaagtccttggataccagcatgtatgtgaaggagttccttatttcctcatcacaagatggccaccagtggaccctcttctttcagaatggtaaggtcaaagtgtttcagggcaatcaagacagcttcacacccgtggtgaacagtatcgatcctccactcttgacacgataccttcgaatccatccacagtcttgggttcaccagattgcattgcgcatggaagtacttggatgcgaggctcaggacctctac

SEQ ID NO: 580 - protein, 1457 aa, synthetic construct
  REGION 1..1457: note = Variant of human B-domain deleted Factor VIII
MQIELSTCFFLCLLRFCFSATRRYYLGAVELSWDYMQSDLGELPVDARFPPRVPKSFPFNTSVVYKKTLFVEFTDHLFNIAKPRPPWMGLLGPTIQAEVYDTVVITLKNMASHPVSLHAVGVSYWKASEGAEYDDQTSQREKEDDKVFPGGSHTYVWQVLKENGPMASDPLCLTYSYLSHVDLVKDLNSGLIGALLVCREGSLAKEKTQTLHKFILLFAVFDEGKSWHSETKNSLMQDRDAASARAWPKMHTVNGYVNRSLPGLIGCHRKSVYWHVIGMGTTPEVHSIFLEGHTFLVRNHRQASLEISPITFLTAQTLLMDLGQFLLFCHISSHQHDGMEAYVKVDSCPEEPQLRMKNNEEAEDYDDDLTDSEMDVVRFDDDNSPSFIQIRSVAKKHPKTWVHYIAAEEEDWDYAPLVLAPDDRSYKSQYLNNGPQRIGRKYKKVRFMAYTDETFKTREAIQHESGILGPLLYGEVGDTLLIIFKNQASRPYNIYPHGITDVRPLYSRRLPKGVKHLKDFPILPGEIFKYKWTVTVEDGPTKSDPRCLTRYYSSFVNMERDLASGLIGPLLICYKESVDQRGNQIMSDKRNVILFSVFDENRSWYLTENIQRFLPNPAGVQLEDPEFQASNIMHSINGYVFDSLQLSVCLHEVAYWYILSIGAQTDFLSVFFSGYTFKHKMVYEDTLTLFPFSGETVFMSMENPGLWILGCHNSDFRNRGMTALLKVSSCDKNTGDYYEDSYEDISAYLLSKNNAIEPRSFSQNPPVLKRHQREITRTTLQSDQEEIDYDDTISVEMKKEDFDIYDEDENQSPRSFQKKTRHYFIAAVERLWDYGMSSSPHVLRNRAQSGSVPQFKKVVFQEFTDGSFTQPLYRGELNEHLGLLGPYIRAEVEDNIMVTFRNQASRPYSFYSSLISYEEDQRQGAEPRKNFVKPNETKTYFWKVQHHMAPTKDEFDCKAWAYFSDVDLEKDVHSGLIGPLLVCHTNTLNPAHGRQVTVQEFALFFTIFDETKSWYFTENMERNCRAPCNIQMEDPTFKENYRFHAINGYIMDTLPGLVMAQDQRIRWYLLSMGSNENIHSIHFSGHVFTVRKKEEYKMALYNLYPGVFETVEMLPSKAGIWRVECLIGEHLHAGMSTLFLVYSNKCQTPLGMASGHIRDFQITASGQYGQWAPKLARLHYSGSINAWSTKEPFSWIKVDLLAPMIIHGIKTQGARQKFSSLYISQFIIMYSLDGKKWQTYRGNSTGTLMVFFGNVDSSGIKHNIFNPPIIARYIRLHPTHYSIRSTLRMELMGCDLNSCSMPLGMESKAISDAQITASSYFTNMFATWSPSKARLHLQGRSNAWRPQVNNPKEWLQVDFQKTMKVTGVTTQGVKSLDTSMYVKEFLISSSQDGHQWTLFFQNGKVKVFQGNQDSFTPVVNSIDPPLLTRYLRIHPQSWVHQIALRMEVLGCEAQDLY

SEQ ID NO: 581 - DNA, 4371 bp, synthetic construct
  misc_feature 1..4371: note = Variant of human B-domain deleted Factor VIII
  source 1..4371: mol_type = other DNA
atgcagattgaactgtctacctgcttcttcctctgtttgctgaggttctgctttagcgccactagacggtactaccttggcgctgtggagctgtcctgggactatatgcagagtgatttgggagagcttcccgtcgacgcacgatttcctcctcgcgttccaaagtcatttcccttcaacacaagcgtggtgtacaagaagacgctcttcgtcgaattcaccgatcacctgttcaatatcgccaaacccagaccaccatggatgggtcttttggggcctaccatacaagcggaggtgtatgacacagttgttatcactctcaagaacatggcttctcatccggtaagtcttcacgcagtgggcgtgtcctactggaaagcttcagaaggagccgagtatgatgatcagacatcccagagggagaaagaagacgacaaggtatttccaggtgggtctcatacctatgtgtggcaagtgctcaaagagaatggccctatggcaagcgatccgctctgtttgacttacagctacctttcacacgttgacctcgtcaaggacctcaactccgggttgattggagccttgttggtatgcagggaaggatctcttgccaaagagaagacacagaccctccacaagtttatccttctctttgctgtgttcgatgagggcaaaagttggcatagcgaaacgaagaattccctcatgcaggatcgcgacgcagccagcgccagagcttggcccaagatgcacactgtgaacggatatgtcaataggtcacttcctggcttgattgggtgtcatcggaaaagtgtctactggcacgtgatcggaatggggacaacaccagaggtccactccatatttctcgaaggccataccttccttgttcgaaaccacagacaggcatccttggggatctctcccattacctttctcactgcccaaacgctccttatggacttgggtcagttccttctcttctgccatatcagctcacaccagcatgatggtatggaagcttatgtgaaagtccgcagttgtccggaggagccacagttgcgcatgaagaataatgaagaagccgaggattacgacgacgatctcaccgattctgagatggacgtggtgaggtttgatgacgacaactctccctccttcattcaaatccggagcgtggcgaagaaacaccccaagacttgggtccactatatagcggcggaagaggaggattgggattacgctcctcttgtattggcaccagatgaccgctcatacaaaagccagtacctcaacaacggaccgcagagaattggccggaagtataagaaagtgcgatttatggcctatacagacgaaacctttaagacaagggaggccatccagcatgagagtgggattttgggacctcttctttacggcgaagttggtgataccctcctcatcatcttcaagaatcaagcttctcgcccctataacatttacccacacgggatcactgacgttaggcctttgtatagcagaagacttcccaaaggcgtgaagcatctcaaagacttccccattttgccaggcgagatctttaagtacaaatggaccgtcacagtggaagatggaccgactaaatcagaccctcgatgccttacgcggtactattcctccttcgtgaatatggagagagatttggcaagcggactcataggaccactcctcatctgttacaaggaatctgtagaccagaggggtaaccagattatgagtgataaacgcaatgtgatcctttttagcgtcttcgacgagaaccggtcctggtacttgaccgagaatatacaaaggttccttcccaaccccgcaggcgttcagttggaagaccctgagtttcaggccagcaatattatgcactcaatcaacggctatgtgtttgatagtctccagctttctgtttgcctccatgaagtagcctattggtacatcttgtcaattggtgctcaaacagacttcctctccgtcttcttctccggctacacctttaagcacaagatggtgtatgaggacactctcacactctttccattttctggagaaaccgtgttcatgagcatggagaatccaggcctttggaccttgggttgccacaacagtgattttcgcaatcggggaatgactgctctcctcaaagtcagcagctgtgataagaacacaggcgactattacgaagattcttacgaggacataagtgcctacttgttgtccaagaataacgccattgagcccagatcattctcccagaatcctcccgtgcttaaaaggcatcagcgcgaaatcaccagaactactcttcagtctgatcaagaggagattgactatgacgacaccataagcgtggaaatgaagaaggaggatttcgatatctatgacgaagatgagaaccagtctccgcggagctttcagaagaagacgcgacactacttcattgcagcagtcgaaaggctttgggactacggtatgtcatcatcccctcatgtgttgcgcaatagagctcagagtggaagtgttccacagttcaagaaagtcgtctttcaagagtttacagatggcagcttcacacagcctctctatcggggcgagcttaacgaacatttgggactccttggtccctatatccgagccgaagtggaggacaacattatggttacctttaggaatcaagcctctcgcccctacagcttctactcctccctcatcagttatgaggaggatcagagacaaggcgctgaaccacggaagaactttgtgaaaccgaatgagacgaagacctacttctggaaagtacagcaccacatggcccccacaaaagacgaattcgattgcaaagcatgggcgtatttttcagacgttgacttggagaaagatgtacattcaggacttattggtcctttgttggtgtgtcacactaacactctcaatccagcccatggcaggcaggtgacagtccaggaattcgctcttttctttaccatctttgatgagaccaagtcctggtacttcacggaaaacatggagcgcaattgcagagccccctgtaacatacagatggaggaccctacctttaaggaaaattatcggttccacgcaatcaacggatacattatggatacactccctggccttgtgatggctcaggaccaacgaatcaggtggtacctcctcagcatgggttctaatgagaacatacactccattcacttttcaggacatgtgttcactgtccggaagaaagaagagtataagatggccctctacaatttgtatccaggcgtgtttgagaccgttgaaatgcttccctctaaagctggcatctggagagtagagtgcttgatcggagaacatcttcacgcaggtatgagcaccttgttcctcgtgtacagcaacaaatgtcagaccccacttggcatggccagtggacacattcgcgactttcagatcacagcatctggccagtatggacaatgggccccaaagttggctcgcctccattactccggtagcataaatgcgtggtccactaaagaacctttcagctggattaaggtcgatcttcttgcccccatgatcatccacggcattaagacacagggagcgaggcagaaattctcctccctctacatctcacagttcattattatgtatagtttggacggcaagaagtggcaaacttatagaggtaacagtactggaacactcatggtgttcttcggcaacgttgatagctctggcatcaaacacaacatctttaatcctcccataatagctcggtacatcagattgcatccgacccactacagcattaggagtacactccgaatggagcttatgggttgcgacttgaattcctgttcaatgccactcggaatggagtctaaagccatctctgatgcacagataaccgccagtagctactttacgaacatgtttgctacgtggtcaccctctaaggcaaggcttcatttgcaaggccggtctaatgcctggagacctcaggtgaacaacccgaaagaatggctccaggtggactttcagaagaccatgaaagtaacaggtgtcactactcagggagttaagtccttggataccagcatgtatgtgaaggagttccttatttcctcatcacaagatggccaccagtggaccctcttctttcagaatggtaaggtcaaagtgtttcagggcaatcaagacagcttcacacccgtggtgaacagtctggatcctccactcttgacacgataccttcgaatccatccacagtcttgggttcaccagattgcattgcgcatggaagtacttggatgcgaggctcaggacctctac

SEQ ID NO: 582 - protein, 1457 aa, synthetic construct
  REGION 1..1457: note = Variant of human B-domain deleted Factor VIII
MQIELSTCFFLCLLRFCFSATRRYYLGAVELSWDYMQSDLGELPVDARFPPRVPKSFPFNTSVVYKKTLFVEFTDHLFNIAKPRPPWMGLLGPTIQAEVYDTVVITLKNMASHPVSLHAVGVSYWKASEGAEYDDQTSQREKEDDKVFPGGSHTYVWQVLKENGPMASDPLCLTYSYLSHVDLVKDLNSGLIGALLVCREGSLAKEKTQTLHKFILLFAVFDEGKSWHSETKNSLMQDRDAASARAWPKMHTVNGYVNRSLPGLIGCHRKSVYWHVIGMGTTPEVHSIFLEGHTFLVRNHRQASLGISPITFLTAQTLLMDLGQFLLFCHISSHQHDGMEAYVKVRSCPEEPQLRMKNNEEAEDYDDDLTDSEMDVVRFDDDNSPSFIQIRSVAKKHPKTWVHYIAAEEEDWDYAPLVLAPDDRSYKSQYLNNGPQRIGRKYKKVRFMAYTDETFKTREAIQHESGILGPLLYGEVGDTLLIIFKNQASRPYNIYPHGITDVRPLYSRRLPKGVKHLKDFPILPGEIFKYKWTVTVEDGPTKSDPRCLTRYYSSFVNMERDLASGLIGPLLICYKESVDQRGNQIMSDKRNVILFSVFDENRSWYLTENIQRFLPNPAGVQLEDPEFQASNIMHSINGYVFDSLQLSVCLHEVAYWYILSIGAQTDFLSVFFSGYTFKHKMVYEDTLTLFPFSGETVFMSMENPGLWTLGCHNSDFRNRGMTALLKVSSCDKNTGDYYEDSYEDISAYLLSKNNAIEPRSFSQNPPVLKRHQREITRTTLQSDQEEIDYDDTISVEMKKEDFDIYDEDENQSPRSFQKKTRHYFIAAVERLWDYGMSSSPHVLRNRAQSGSVPQFKKVVFQEFTDGSFTQPLYRGELNEHLGLLGPYIRAEVEDNIMVTFRNQASRPYSFYSSLISYEEDQRQGAEPRKNFVKPNETKTYFWKVQHHMAPTKDEFDCKAWAYFSDVDLEKDVHSGLIGPLLVCHTNTLNPAHGRQVTVQEFALFFTIFDETKSWYFTENMERNCRAPCNIQMEDPTFKENYRFHAINGYIMDTLPGLVMAQDQRIRWYLLSMGSNENIHSIHFSGHVFTVRKKEEYKMALYNLYPGVFETVEMLPSKAGIWRVECLIGEHLHAGMSTLFLVYSNKCQTPLGMASGHIRDFQITASGQYGQWAPKLARLHYSGSINAWSTKEPFSWIKVDLLAPMIIHGIKTQGARQKFSSLYISQFIIMYSLDGKKWQTYRGNSTGTLMVFFGNVDSSGIKHNIFNPPIIARYIRLHPTHYSIRSTLRMELMGCDLNSCSMPLGMESKAISDAQITASSYFTNMFATWSPSKARLHLQGRSNAWRPQVNNPKEWLQVDFQKTMKVTGVTTQGVKSLDTSMYVKEFLISSSQDGHQWTLFFQNGKVKVFQGNQDSFTPVVNSLDPPLLTRYLRIHPQSWVHQIALRMEVLGCEAQDLY

SEQ ID NO: 583 - DNA, 4371 bp, synthetic construct
  misc_feature 1..4371: note = Variant of human B-domain deleted Factor VIII
  source 1..4371: mol_type = other DNA
atgcagattgaactgtctacctgcttcttcctctgtttgctgaggttctgctttagcgccactagacggtactaccttggcgctgtggagctgtcctgggactatatgcagagtgatttgggagagcttcccgtcgacgcacgatttcctcctcgcgttccaaagtcatttcccttcaacacaagcgtggtgtacaagaagacgctcttcgtcgaattcaccgatcacctgttcaatatcgccaaacccagaccaccatggatgggtcttttggggcctaccatacaagcggaggtgtatgacacagttgttatcactctcaagaacatggcttctcatccggtaagtcttcacgcagtgggcgtgtcctactggaaagcttcagaaggagccgagtatgatgatcagacatcccagagggagaaagaagacgacaaggtatttccaggtgggtctcatacctatgtgtggcaagtgctcaaagagaatggccctatggcaagcgatccgctctgtttgacttacagctacctttcacacgttgacctcgtcaaggacctcaactccgggttgattggagccttgttggtatgcagggaaggatctcttgccaaagagaagacacagaccctccacaagtttatccttctctttgctgtgttcgatgagggcaaaagttggcatagcgaaacgaagaattccctcatgcaggatcgcgacgcagccagcgccagagcttggcccaagatgcacactgtgaacggatatgtcaataggtcacttcctggcttgattgggtgtcatcggaaaagtgtctactggcacgtgatcggaatggggacaacaccagaggtccactccatatttctcgaaggccataccttccttgttcgaaaccacagacaggcatccttggagatctctcccattacctttctcactgcccaaacgctccttatggacttgggtcagttccttctcttctgccatatcagctcacaccagcatgatggtatggaagcttatgtgaaagtcgacagttgtccggaggagccacagttgcgcatgaagaataatgaagaagccgaggattacgacgacgatctcaccgattctgagatggacgtggtgaggtttgatgacgacaactctccctccttcattcaaatccggagcgtggcgaagaaacaccccaagacttgggtccactatatagcggcggaagaggaggattgggattacgctcctcttgtattggcaccagatgaccgctcatacaaaagccagtacctcaacaacggaccgcagagaattggccggaagtataagaaagtgcgatttatggcctatacagacgaaacctttaagacaagggaggccatccagcatgagagtgggattttgggacctcttctttacggcgaagttggtgataccctcctcatcatcttcaagaatcaagcttctcgcccctataacatttacccacacgggatcactgacgttaggcctttgtatagcagaagacttcccaaaggcgtgaagcatctcaaagacttccccattttgccaggcgagatctttaagtacaaatggaccgtcacagtggaagatggaccgactaaatcagaccctcgatgccttacgcggtactattcctccttcgtgaatatggagagagatttggcaagcggactcataggaccactcctcatctgttacaaggaatctgtagaccagaggggtaaccagattatgagtgataaacgcaatgtgatcctttttagcgtcttcgacgagaaccggtcctggtacttgaccgagaatatacaaaggttccttcccaaccccgcaggcgttcagttggaagaccctgagtttcaggccagcaatattatgcactcaatcaacggctatgtgtttgatagtctccagctttctgtttgcctccatgaagtagcctattggtacatcttgtcaattggtgctcaaacagacttcctctccgtcttcttctccggctacacctttaagcacaagatggtgtatgaggacactctcacactctttccattttctggagaaaccgtgttcatgagcatggagaatccaggcctttggatcttgggttgccacaacagtgattttcgcaatcggggaatgactgctctcctcaaagtcagcagctgtgataagaacacaggcgactattacgaagattcttacgaggacataagtgcctacttgttgtccaagaataacgccattgagcccagatcattctcccagaatcctcccgtgcttaaaaggcatcagcgcgaaatcaccagaactactcttcagtctgatcaagaggagattgactatgacgacaccataagcgtggaaatgaagaaggaggatttcgatatctatgacgaagatgagaaccagtctccgcggagctttcagaagaagacgcgacactacttcattgcagcagtcgaaaggctttgggactacggtatgtcatcatcccctcatgtgttgcgcaatagagctcagagtggaagtgttccacagttcaagaaagtcgtctttcaagagtttacagatggcagcttcacacagcctctctatcggggcgagcttaacgaacatttgggactccttggtccctatatccgagccgaagtggaggacaacattatggttacctttaggaatcaagcctctcgcccctacagcttctactcctccctcatcagttatgaggaggatcagagacaaggcgctgaaccacggaagaactttgtgaaaccgaatgagacgaagacctacttctggaaagtacagcaccacatggcccccacaaaagacgaattcgattgcaaagcatgggcgtatttttcagacgttgacttggagaaagatgtacattcaggacttattggtcctttgttggtgtgtcacactaacactctcaatccagcccatggcaggcaggtgacagtccaggaattcgctcttttctttaccatctttgatgagaccaagtcctggtacttcacggaaaacatggagcgcaattgcagagccccctgtaacatacagatggaggaccctacctttaaggaaaattatcggttccacgcaatcaacggatacattatggatacactccctggccttgtgatggctcaggaccaacgaatcaggtggtacctcctcagcatgggttctaatgagaacatacactccattcacttttcaggacatgtgttcactgtccggaagaaagaagagtataagatggccctctacaatttgtatccaggcgtgtttgagaccgttgaaatgcttccctctaaagctggcatctggagagtagagtgcttgatcggagaacatcttcacgcaggtatgagcaccttgttcctcgtgtacagcaacaaatgtcagaacccacttggcatggccagtggacacattcgcgactttcagatcacagcatctggccagtatggacaatgggccccaaagttggctcgcctccattactccggtagcataaatgcgtggtccactaaagaacctttcagctggattaaggtcgatcttcttgcccccatgatcatccacggcattaagacacagggagcgaggcagaaattctcctccctctacatctcacagttcattattatgtatagtttggacggcaagaagtggcaaacttatagaggtaacagtactggaacactcatggtgttcttcggcaacgttgatagctctggcatcaaacacaacatctttaatcctcccataatagctcggtacatcagattgcatccgacccactacagcattaggagtacactccgaatggagcttatgggttgcgacttgaattcctgttcaatgccactcggaatggagtctaaagccatctctgatgcacagataaccgccagtagctactttacgaacatgtttgctacgtggtcaccctctaaggcaaggcttcatttgcaaggccggtctaatgcctggagacctcaggtgaacaacccgaaagaatggctccaggtggactttcagaagaccatgaaagtaacaggtgtcactactcagggagttaagtccttggataccagcatgtatgtgaaggagttccttatttcctcatcacaagatggccaccagtggaccctcttctttcagaatggtaaggtcaaagtgtttcagggcaatcaagacagcttcacacccgtggtgaacagtcttgatcctccactcttgacacgataccttcgaatccatccacagtcttgggttcaccagattgcattgcgcatggaagtacttggatgcgaggctcaggacctctac

SEQ ID NO: 584 - protein, 1457 aa, synthetic construct
  REGION 1..1457: note = Variant of human B-domain deleted Factor VIII
MQIELSTCFFLCLLRFCFSATRRYYLGAVELSWDYMQSDLGELPVDARFPPRVPKSFPFNTSVVYKKTLFVEFTDHLFNIAKPRPPWMGLLGPTIQAEVYDTVVITLKNMASHPVSLHAVGVSYWKASEGAEYDDQTSQREKEDDKVFPGGSHTYVWQVLKENGPMASDPLCLTYSYLSHVDLVKDLNSGLIGALLVCREGSLAKEKTQTLHKFILLFAVFDEGKSWHSETKNSLMQDRDAASARAWPKMHTVNGYVNRSLPGLIGCHRKSVYWHVIGMGTTPEVHSIFLEGHTFLVRNHRQASLEISPITFLTAQTLLMDLGQFLLFCHISSHQHDGMEAYVKVDSCPEEPQLRMKNNEEAEDYDDDLTDSEMDVVRFDDDNSPSFIQIRSVAKKHPKTWVHYIAAEEEDWDYAPLVLAPDDRSYKSQYLNNGPQRIGRKYKKVRFMAYTDETFKTREAIQHESGILGPLLYGEVGDTLLIIFKNQASRPYNIYPHGITDVRPLYSRRLPKGVKHLKDFPILPGEIFKYKWTVTVEDGPTKSDPRCLTRYYSSFVNMERDLASGLIGPLLICYKESVDQRGNQIMSDKRNVILFSVFDENRSWYLTENIQRFLPNPAGVQLEDPEFQASNIMHSINGYVFDSLQLSVCLHEVAYWYILSIGAQTDFLSVFFSGYTFKHKMVYEDTLTLFPFSGETVFMSMENPGLWILGCHNSDFRNRGMTALLKVSSCDKNTGDYYEDSYEDISAYLLSKNNAIEPRSFSQNPPVLKRHQREITRTTLQSDQEEIDYDDTISVEMKKEDFDIYDEDENQSPRSFQKKTRHYFIAAVERLWDYGMSSSPHVLRNRAQSGSVPQFKKVVFQEFTDGSFTQPLYRGELNEHLGLLGPYIRAEVEDNIMVTFRNQASRPYSFYSSLISYEEDQRQGAEPRKNFVKPNETKTYFWKVQHHMAPTKDEFDCKAWAYFSDVDLEKDVHSGLIGPLLVCHTNTLNPAHGRQVTVQEFALFFTIFDETKSWYFTENMERNCRAPCNIQMEDPTFKENYRFHAINGYIMDTLPGLVMAQDQRIRWYLLSMGSNENIHSIHFSGHVFTVRKKEEYKMALYNLYPGVFETVEMLPSKAGIWRVECLIGEHLHAGMSTLFLVYSNKCQNPLGMASGHIRDFQITASGQYGQWAPKLARLHYSGSINAWSTKEPFSWIKVDLLAPMIIHGIKTQGARQKFSSLYISQFIIMYSLDGKKWQTYRGNSTGTLMVFFGNVDSSGIKHNIFNPPIIARYIRLHPTHYSIRSTLRMELMGCDLNSCSMPLGMESKAISDAQITASSYFTNMFATWSPSKARLHLQGRSNAWRPQVNNPKEWLQVDFQKTMKVTGVTTQGVKSLDTSMYVKEFLISSSQDGHQWTLFFQNGKVKVFQGNQDSFTPVVNSLDPPLLTRYLRIHPQSWVHQIALRMEVLGCEAQDLY

SEQ ID NO: 585 - DNA, 4371 bp, synthetic construct
  misc_feature 1..4371: note = Variant of human B-domain deleted Factor VIII
  source 1..4371: mol_type = other DNA
atgcagattgaactgtctacctgcttcttcctctgtttgctgaggttctgctttagcgccactagacggtactaccttggcgctgtggagctgtcctgggactatatgcagagtgatttgggagagcttcccgtcgacgcacgatttcctcctcgcgttccaaagtcatttcccttcaacacaagcgttgtgtacaagaagacgctcttcgtcgaattcaccgatcacctgttcaatatcgccaaacccagaccaccatggatgggtcttttggggcctaccatacaagcggaggtgtatgacacagttgttatcactctcaagaacatggcttctcatccggtaagtcttcacgcagtgggcgtgtcctactggaaagcttcagaaggagccgagtatgatgatcagacatcccagagggagaaagaagacgacaaggtatttccaggtgggtctcatacctatgtgtggcaagtgctcaaagagaatggccctatggcaagcgatccgccgtgtttgacttacagctacctttcacacgttgacctcgtcaaggacctcaactccgggttgattggagccttgttggtatgcagggaaggatctcttgccaaagagaagacacagaccctccacaagtttatccttctctttgctgtgttcgatgagggcaaaagttggcatagcgaaacgaagaattccctcatgcaggatcgcgacgcagccagcgccagagcttggcccaagatgcacactgtgaacggatatgtcaataggtcacttcctggcttgattgggtgtcatcggaaaagtgtctactggcacgtgatcggaatggggacaacaccagaggtccactccatatttctcgaaggccataccttccttgttcgaaaccacagacaggcatccttggagatctctcccattacctttctcactgcccaaacgctccttatggacttgggtcagttccttctcttctgccatatcagctcacaccagcatgatggtatggaagcttatgtgaaagtccgcagttgtccggaggagccacagttgcgcatgaagaataatgaagaagccgaggattacgacgacgatctcaccgattctgagatggacgtggtgaggtttgatgacgacaactctccctccttcattcaaatccggagcgtggcgaagaaacaccccaagacttgggtccactatatagcggcggaagaggaggattgggattacgctcctcttgtattggcaccagatgaccgctcatacaaaagccagtacctcaacaacggaccgcagagaattggccggaagtataagaaagtgcgatttatggcctatacagacgaaacctttaagacaagggaggccatccagcatgagagtgggattttgggacctcttctttacggcgaagttggtgataccctcctcatcatcttcaagaatcaagcttctcgcccctataacatttacccacacgggatcactgacgttaggcctttgtatagcagaagacttcccaaaggcgtgaagcatctcaaagacttccccattttgccaggcgagatctttaagtacaaatggaccgtcacagtggaagatggaccgactaaatcagaccctcgatgccttacgcggtactattcctccttcgtgaatatggagagagatttggcaagcggactcataggaccactcctcatctgttacaaggaatctgtagaccagaggggtaaccagattatgagtgataaacgcaatgtgatcctttttagcgtcttcgacgagaaccggtcctggtacttgaccgagaatatacaaaggttccttcccaaccccgcaggcgttcagttggaagaccctgagtttcaggccagcaatattatgcactcaatcaacggctatgtgtttgatagtctccagctttctgtttgcctccatgaagtagcctattggtacatcttgtcaattggtgctcaaacagacttcctctccgtcttcttctccggctacacctttaagcacaagatggtgtatgaggacactctcacactctttccattttctggagaaaccgtgttcatgagcatggagaatccaggcctttggatcttgggttgccacaacagtgattttcgcaatcggggaatgactgctctcctcaaagtcagcagctgtgataagaacacaggcgactattacgaagattcttacgaggacataagtgcctacttgttgtccaagaataacgccattgagcccagatcattctcccagaatcctcccgtgcttaaaaggcatcagcgcgaaatcaccagaactactcttcagtctgatcaagaggagattgactatgacgacaccataagcgtggaaatgaagaaggaggatttcgatatctatgacgaagatgagaaccagtctccgcggagctttcagaagaagacgcgacactacttcattgcagcagtcgaaaggctttgggactacggtatgtcatcatcccctcatgtgttgcgcaatagagctcagagtggaagtgttccacagttcaagaaagtcgtctttcaagagtttacagatggcagcttcacacagcctctctatcggggcgagcttaacgaacatttgggactccttggtccctatatccgagccgaagtggaggacaacattatggttacctttaggaatcaagcctctcgcccctacagcttctactcctccctcatcagttatgaggaggatcagagacaaggcgctgaaccacggaagaactttgtgaaaccgaatgagacgaagacctacttctggaaagtacagcaccacatggcccccacaaaagacgaattcgattgcaaagcatgggcgtatttttcagacgttgacttggagaaagatgtacattcaggacttattggtcctttgttggtgtgtcacactaacactctcaatccagcccatggcaggcaggtgacagtccaggaattcgctcttttctttaccatctttgatgagaccaagtcctggtacttcacggaaaacatggagcgcaattgcagagccccctgtaacatacagatggaggaccctacctttaaggaaaattatcggttccacgcaatcaacggatacattatggatacactccctggccttgtgatggctcaggaccaacgaatcaggtggtacctcctcagcatgggttctaatgagaacatacactccattcacttttcaggacatgtgttcactgtccggaagaaagaagagtataagatggccctctacaatttgtatccaggcgtgtttgagaccgttgaaatgcttccctctaaagctggcatctggagagtagagtgcttgatcggagaacatcttcacgcaggtatgagcaccttgttcctcgtgtacagcaacaaatgtcagaccccacttggcatggccagtggacacattcgcgactttcagatcacagcatctggccagtatggacaatgggccccaaagttggctcgcctccattactccggtagcataaatgcgtggtccactaaagaacctttcagctggattaaggtcgatcttcttgcccccatgatcatccacggcattaagacacagggagcgaggcagaaattctcctccctctacatctcacagttcattattatgtatagtttggacggcaagaagtggcaaacttatagaggtaacagtactggaacagatatggtgttcttcggcaacgttgatagctctggcatcaaacacaacatctttaatcctcccataatagctcggtacatcagattgcatccgacccactacagcattaggagtacactccgaatggagcttatgggttgcgacttgaattcctgttcaatgccactcggaatggagtctaaagccatctctgatgcacagataaccgccagtagctactttacgaacatgtttgctacgtggtcaccctctaaggcaaggcttcatttgcaaggccggtctaatgcctggagacctcaggtgaacaacccgaaagaatggctccaggtggactttcagaagaccatgaaagtaacaggtgtcactactcagggagttaagtccttggataccagcatgtatgtgaaggagttccttatttcctcatcacaagatggccaccagtggaccctcttctttcagaatggtaaggtcaaagtgtttcagggcaatcaagacagcttcacacccgtggtgaacagtctggatcctccactcttgacacgataccttcgaatccatccacagtcttgggttcaccagattgcattgcgcatggaagtacttggatgcgaggctcaggacctctac

SEQ ID NO: 586 - protein, 1457 aa, synthetic construct
  REGION 1..1457: note = Variant of human B-domain deleted Factor VIII
MQIELSTCFFLCLLRFCFSATRRYYLGAVELSWDYMQSDLGELPVDARFPPRVPKSFPFNTSVVYKKTLFVEFTDHLFNIAKPRPPWMGLLGPTIQAEVYDTVVITLKNMASHPVSLHAVGVSYWKASEGAEYDDQTSQREKEDDKVFPGGSHTYVWQVLKENGPMASDPPCLTYSYLSHVDLVKDLNSGLIGALLVCREGSLAKEKTQTLHKFILLFAVFDEGKSWHSETKNSLMQDRDAASARAWPKMHTVNGYVNRSLPGLIGCHRKSVYWHVIGMGTTPEVHSIFLEGHTFLVRNHRQASLEISPITFLTAQTLLMDLGQFLLFCHISSHQHDGMEAYVKVRSCPEEPQLRMKNNEEAEDYDDDLTDSEMDVVRFDDDNSPSFIQIRSVAKKHPKTWVHYIAAEEEDWDYAPLVLAPDDRSYKSQYLNNGPQRIGRKYKKVRFMAYTDETFKTREAIQHESGILGPLLYGEVGDTLLIIFKNQASRPYNIYPHGITDVRPLYSRRLPKGVKHLKDFPILPGEIFKYKWTVTVEDGPTKSDPRCLTRYYSSFVNMERDLASGLIGPLLICYKESVDQRGNQIMSDKRNVILFSVFDENRSWYLTENIQRFLPNPAGVQLEDPEFQASNIMHSINGYVFDSLQLSVCLHEVAYWYILSIGAQTDFLSVFFSGYTFKHKMVYEDTLTLFPFSGETVFMSMENPGLWILGCHNSDFRNRGMTALLKVSSCDKNTGDYYEDSYEDISAYLLSKNNAIEPRSFSQNPPVLKRHQREITRTTLQSDQEEIDYDDTISVEMKKEDFDIYDEDENQSPRSFQKKTRHYFIAAVERLWDYGMSSSPHVLRNRAQSGSVPQFKKVVFQEFTDGSFTQPLYRGELNEHLGLLGPYIRAEVEDNIMVTFRNQASRPYSFYSSLISYEEDQRQGAEPRKNFVKPNETKTYFWKVQHHMAPTKDEFDCKAWAYFSDVDLEKDVHSGLIGPLLVCHTNTLNPAHGRQVTVQEFALFFTIFDETKSWYFTENMERNCRAPCNIQMEDPTFKENYRFHAINGYIMDTLPGLVMAQDQRIRWYLLSMGSNENIHSIHFSGHVFTVRKKEEYKMALYNLYPGVFETVEMLPSKAGIWRVECLIGEHLHAGMSTLFLVYSNKCQTPLGMASGHIRDFQITASGQYGQWAPKLARLHYSGSINAWSTKEPFSWIKVDLLAPMIIHGIKTQGARQKFSSLYISQFIIMYSLDGKKWQTYRGNSTGTDMVFFGNVDSSGIKHNIFNPPIIARYIRLHPTHYSIRSTLRMELMGCDLNSCSMPLGMESKAISDAQITASSYFTNMFATWSPSKARLHLQGRSNAWRPQVNNPKEWLQVDFQKTMKVTGVTTQGVKSLDTSMYVKEFLISSSQDGHQWTLFFQNGKVKVFQGNQDSFTPVVNSLDPPLLTRYLRIHPQSWVHQIALRMEVLGCEAQDLY

SEQ ID NO: 587 - DNA, 4371 bp, synthetic construct
  misc_feature 1..4371: note = Variant of human B-domain deleted Factor VIII
  source 1..4371: mol_type = other DNA
atgcagattgaactgtctacctgcttcttcctctgtttgctgaggttctgctttagcgccactagacggtactaccttggcgctgtggagctgtcctgggactatatgcagagtgatttgggagagcttcccgtcgacgcacgatttcctcctcgcgttccaaagtcatttcccttcaacacaagccaagtgtacaagaagacgctcttcgtcgaattcaccgatcacctgttcaatatcgccaaacccagaccaccatggatgggtcttttggggcctaccatacaagcggaggtgtatgacacagttgttatcactctcaagaacatggcttctcatccggtaagtcttcacgcagtgggcgtgtcctactggaaagcttcagaaggagccgagtatgatgatcagacatcccagagggagaaagaagacgacaaggtatttccaggtgggtctcatacctatgtgtggcaagtgctcaaagagaatggccctatggcaagcgatccgctctgtttgacttacagctacctttcacacgttgacctcgtcaaggacctcaactccgggttgattggagccttgttggtatgcagggaaggatctcttgccaaagagaagacacagaccctccacaagtttatccttctctttgctgtgttcgatgagggcaaaagttggcatagcgaaacgaagaattccctcatgcaggatcgcgacgcagccagcgccagagcttggcccaagatgcacactgtgaacggatatgtcaataggtcacttcctggcttgattgggtgtcatcggaaaagtgtctactggcacgtgatcggaatggggacaacaccagaggtccactccatatttctcgaaggccataccttccttgttcgaaaccacagacaggcatccttggagatctctcccattacctttctcactgcccaaacgctccttatggacttgggtcagttccttctcttctgccatatcagctcacaccagcatgatggtatggaagcttatgtgaaagtcgacagttgtcctgaggagccacagttgcgcatgaagaataatgaagaagccgaggattacgacgacgatctcaccgattctgagatggacgtggtgaggtttgatgacgacaactctccctccttcattcaaatccggagcgtggcgaagaaacaccccaagacttgggtccactatatagcggcggaagaggaggattgggattacgctcctcttgtattggcaccagatgaccgctcatacaaaagccagtacctcaacaacggaccgcagagaattggccggaagtataagaaagtgcgatttatggcctatacagacgaaacctttaagacaagggaggccatccagcatgagagtgggattttgggacctcttctttacggcgaagttggtgataccctcctcatcatcttcaagaatcaagcttctcgcccctataacatttacccacacgggatcactgacgttaggcctttgtatagcagaagacttcccaaaggcgtgaagcatctcaaagacttccccattttgccaggcgagatctttaagtacaaatggaccgtcacagtggaagatggaccgactaaatcagaccctcgatgccttacgcggtactattcctccttcgtgaatatggagagagatttggcaagcggactcataggaccactcctcatctgttacaaggaatctgtagaccagaggggtaaccagattatgagtgataaacgcaatgtgatcctttttagcgtcttcgacgagaaccggtcctggtacttgaccgagaatatacaaaggttccttcccaaccccgcaggcgttcagttggaagaccctgagtttcaggccagcaatattatgcactcaatcaacggctatgtgtttgatagtctccagctttctgtttgcctccatgaagtagcctattggtacatcttgtcaattggtgctcaaacagacttcctctccgtcttcttctccggctacacctttaagcacaagatggtgtatgaggacactctcacactctttccattttctggagaaaccgtgttcatgagcatggagaatccaggcctttggatcttgggttgccacaacagtgattttcgcaatcggggaatgactgctctcctcaaagtcagcagctgtgataagaacacaggcgactattacgaagattcttacgaggacataagtgcctacttgttgtccaagaataacgccattgagcccagatcattctcccagaatcctcccgtgcttaaaaggcatcagcgcgaaatcaccagaactactcttcagtctgatcaagaggagattgactatgacgacaccataagcgtggaaacgaagcgtgaggatttcgatatctatgacgaagatgagaaccagtctccgcggagctttcagaagaagacgcgacactacttcattgcagcagtcgaaaggctttgggactacggtatgtcatcatcccctcatgtgttgcgcaatagagctcagagtggaagtgttccacagttcaagaaagtcgtctttcaagagtttacagatggcagcttcacacagcctctctatcggggcgagcttaacgaacatttgggactccttggtccctatatccgagccgaagtggaggacaacattatggttacctttaggaatcaagcctctcgcccctacagcttctactcctccctcatcagttatgaggaggatcagagacaaggcgctgaaccacggaagaactttgtgaaaccgaatgagacgaagacctacttctggaaagtacagcaccacatggcccccacaaaagacgaattcgattgcaaagcatgggcgtatttttcagacgttgacttggagaaagatgtacattcaggacttattggtcctttgttggtgtgtcacactaacactctcaatccagcccatggcaggcaggtgacagtccaggaattcgctcttttctttaccatctttgatgagaccaagtcctggtacttcacggaaaacatggagcgcaattgcagagccccctgtaacatacagatggaggaccctacctttaaggaaaattatcggttccacgcaatcaacggatacattatggatacactccctggccttgtgatggctcaggaccaacgaatcaggtggtacctcctcagcatgggttctaatgagaacatacactccattcacttttcaggacatgtgttcactgtccggaagaaagaagagtataagatggccctctacaatttgtatccaggcgtgtttgagaccgttgaaatgcttccctctaaagctggcatctggagagtagagtgcttgatcggagaacatcttcacgcaggtatgagcaccttgttcctcgtgtacagcaacaaatgtcagaccccacttggcatggccagtggacacattcgcgactttcagatcacagcatctggccagtatggacaatgggccccaaagttggctcgcctccattactccggtagcataaatgcgtggtccactaaagaacctttcagctggattaaggtcgatcttcttgcccccatgatcatccacggcattaagacacagggagcgaggcagaaattctcctccctctacatctcacagttcattattatgtatagtttggacggcaagaagtggcaaacttatagaggtaacagtactggaacagatatggtgttcttcggcaacgttgatagctctggcatcaaacacaacatctttaatcctcccataatagctcggtacatcagattgcatccgacccactacagcattaggagtacactccgaatggagcttatgggttgcgacttgaattcctgttcaatgccactcggaatggagtctaaagccatctctgatgcacagataaccgccagtagctactttacgaacatgtttgctacgtggtcaccctctaaggcaaggcttcatttgcaaggccggtctaatgcctggagacctcaggtgaacaacccgaaagaatggctccaggtggactttcagaagaccatgaaagtaacaggtgtcactactcagggagttaagtccttggataccagcatgtatgtgaaggagttccttatttcctcatcacaagatggccaccagtggaccctcttctttcagaatggtaaggtcaaagtgtttcagggcaatcaagacagcttcacacccgtggtgaacagtatcgatcctccactcttgacacgataccttcgaatccatccacagtcttgggttcaccagattgcattgcgcatggaagtacttggatgcgaggctcaggacctctac

SEQ ID NO: 588 - protein, 1457 aa, synthetic construct
  REGION 1..1457: note = Variant of human B-domain deleted Factor VIII
MQIELSTCFFLCLLRFCFSATRRYYLGAVELSWDYMQSDLGELPVDARFPPRVPKSFPFNTSQVYKKTLFVEFTDHLFNIAKPRPPWMGLLGPTIQAEVYDTVVITLKNMASHPVSLHAVGVSYWKASEGAEYDDQTSQREKEDDKVFPGGSHTYVWQVLKENGPMASDPLCLTYSYLSHVDLVKDLNSGLIGALLVCREGSLAKEKTQTLHKFILLFAVFDEGKSWHSETKNSLMQDRDAASARAWPKMHTVNGYVNRSLPGLIGCHRKSVYWHVIGMGTTPEVHSIFLEGHTFLVRNHRQASLEISPITFLTAQTLLMDLGQFLLFCHISSHQHDGMEAYVKVDSCPEEPQLRMKNNEEAEDYDDDLTDSEMDVVRFDDDNSPSFIQIRSVAKKHPKTWVHYIAAEEEDWDYAPLVLAPDDRSYKSQYLNNGPQRIGRKYKKVRFMAYTDETFKTREAIQHESGILGPLLYGEVGDTLLIIFKNQASRPYNIYPHGITDVRPLYSRRLPKGVKHLKDFPILPGEIFKYKWTVTVEDGPTKSDPRCLTRYYSSFVNMERDLASGLIGPLLICYKESVDQRGNQIMSDKRNVILFSVFDENRSWYLTENIQRFLPNPAGVQLEDPEFQASNIMHSINGYVFDSLQLSVCLHEVAYWYILSIGAQTDFLSVFFSGYTFKHKMVYEDTLTLFPFSGETVFMSMENPGLWILGCHNSDFRNRGMTALLKVSSCDKNTGDYYEDSYEDISAYLLSKNNAIEPRSFSQNPPVLKRHQREITRTTLQSDQEEIDYDDTISVETKREDFDIYDEDENQSPRSFQKKTRHYFIAAVERLWDYGMSSSPHVLRNRAQSGSVPQFKKVVFQEFTDGSFTQPLYRGELNEHLGLLGPYIRAEVEDNIMVTFRNQASRPYSFYSSLISYEEDQRQGAEPRKNFVKPNETKTYFWKVQHHMAPTKDEFDCKAWAYFSDVDLEKDVHSGLIGPLLVCHTNTLNPAHGRQVTVQEFALFFTIFDETKSWYFTENMERNCRAPCNIQMEDPTFKENYRFHAINGYIMDTLPGLVMAQDQRIRWYLLSMGSNENIHSIHFSGHVFTVRKKEEYKMALYNLYPGVFETVEMLPSKAGIWRVECLIGEHLHAGMSTLFLVYSNKCQTPLGMASGHIRDFQITASGQYGQWAPKLARLHYSGSINAWSTKEPFSWIKVDLLAPMIIHGIKTQGARQKFSSLYISQFIIMYSLDGKKWQTYRGNSTGTDMVFFGNVDSSGIKHNIFNPPIIARYIRLHPTHYSIRSTLRMELMGCDLNSCSMPLGMESKAISDAQITASSYFTNMFATWSPSKARLHLQGRSNAWRPQVNNPKEWLQVDFQKTMKVTGVTTQGVKSLDTSMYVKEFLISSSQDGHQWTLFFQNGKVKVFQGNQDSFTPVVNSIDPPLLTRYLRIHPQSWVHQIALRMEVLGCEAQDLY

SEQ ID NO: 589 - DNA, 4371 bp, synthetic construct
  misc_feature 1..4371: note = Variant of human B-domain deleted Factor VIII
  source 1..4371: mol_type = other DNA
atgcagattgaactgtctacctgcttcttcctctgtttgctgaggttctgctttagcgccactagacggtactaccttggcgctgtggagctgtcctgggactatatgcagagtgatttgggagagcttcccgtcgacgcacgatttcctcctcgcgttccaaagtcatttcccttcaacacaagcgttgtgtacaagaagacgctcttcgtcgaattcaccgatcacctgttcaatatcgccaaacccagaccaccatggatgggtcttttggggcctaccatacaagcggaggtgtatgacacagttgttatcactctcaagaacatggcttctcatccggtaagtcttcacgcagtgggcgtgtcctactggaaagcttcagaaggagccgagtatgatgatcagacatcccagagggagaaagaagacgacaaggtatttccaggtgggtctcatacctatgtgtggcaagtgctcaaagagaatggccctatggcaagcgatccgccgtgtttgacttacagctacctttcacacgttgacctcgtcaaggacctcaactccgggttgattggagccttgttggtatgcagggaaggatctcttgccaaagagaagacacagaccctccacaagtttatccttctctttgctgtgttcgatgagggcaaaagttggcatagcgaaacgaagaattccctcatgcaggatcgcgacgcagccagcgccagagcttggcccaagatgcacactgtgaacggatatgtcaataggtcacttcctggcttgattgggtgtcatcggaaaagtgtctactggcacgtgatcggaatggggacaacaccagaggtccactccatatttctcgaaggccataccttccttgttcgaaaccacagacaggcatccttggagatctctcccattacctttctcactgcccaaacgctccttatggacttgggtcagttccttctcttctgccatatcagctcacaccagcatgatggtatggaagcttatgtgaaagtcgacagttgtccggaggagccacagttgcgcatgaagaataatgaagaagccgaggattacgacgacgatctcaccgattctgagatggacgtggtgaggtttgatgacgacaactctccctccttcattcaaatccggagcgtggcgaagaaacaccccaagacttgggtccactatatagcggcggaagaggaggattgggattacgctcctcttgtattggcaccagatgaccgctcatacaaaagccagtacctcaacaacggaccgcagagaattggccggaagtataagaaagtgcgatttatggcctatacagacgaaacctttaagacaagggaggccatccagcatgagagtgggattttgggacctcttctttacggcgaagttggtgataccctcctcatcatcttcaagaatcaagcttctcgcccctataacatttacccacacgggatcactgacgttaggcctttgtatagcagaagacttcccaaaggcgtgaagcatctcaaagacttccccattttgccaggcgagatctttaagtacaaatggaccgtcacagtggaagatggaccgactaaatcagaccctcgatgccttacgcggtactattcctccttcgtgaatatggagagagatttggcaagcggactcataggaccactcctcatctgttacaaggaatctgtagaccagaggggtaaccagattatgagtgataaacgcaatgtgatcctttttagcgtcttcgacgagaaccggtcctggtacttgaccgagaatatacaaaggttccttcccaaccccgcaggcgttcagttggaagaccctgagtttcaggccagcaatattatgcactcaatcaacggctatgtgtttgatagtctccagctttctgtttgcctccatgaagtagcctattggtacatcttgtcaattggtgctcaaacagacttcctctccgtcttcttctccggctacacctttaagcacaagatggtgtatgaggacactctcacactctttccattttctggagaaaccgtgttcatgagcatggagaatccaggcctttggatcttgggttgccacaacagtgattttcgcaatcggggaatgactgctctcctcaaagtcagcagctgtgataagaacacaggcgactattacgaagattcttacgaggacataagtgcctacttgttgtccaagaataacgccattgagcccagatcattctcccagaatcctcccgtgcttaaaaggcatcagcgcgaaatcaccagaactactcttcagtctgatcaagaggagattgactatgacgacaccataagcgtggaaatgaagcgtgaggatttcgatatctatgacgaagatgagaaccagtctccgcggagctttcagaagaagacgcgacactacttcattgcagcagtcgaaaggctttgggactacggtatgtcatcatcccctcatgtgttgcgcaatagagctcagagtggaagtgttccacagttcaagaaagtcgtctttcaagagtttacagatggcagcttcacacagcctctctatcggggcgagcttaacgaacatttgggactccttggtccctatatccgagccgaagtggaggacaacattatggttacctttaggaatcaagcctctcgcccctacagcttctactcctccctcatcagttatgaggaggatcagagacaaggcgctgaaccacggaagaactttgtgaaaccgaatgagacgaagacctacttctggaaagtacagcaccacatggcccccacaaaagacgaattcgattgcaaagcatgggcgtatttttcagacgttgacttggagaaagatgtacattcaggacttattggtcctttgttggtgtgtcacactaacactctcaatccagcccatggcaggcaggtgacagtccaagaattcgctcttttctttaccatctttgatgagaccaagtcctggtacttcacggaaaacatggagcgcaattgcagagccccctgtaacatacagatggaggaccctacctttaaggaaaattatcggttccacgcaatcaacggatacattatggatacactccctggccttgtgatggctcaggaccaacgaatcaggtggtacctcctcagcatgggttctaatgagaacatacactccattcacttttcaggacatgtgttcactgtccggaagaaagaagagtataagatggccctctacaatttgtatccaggcgtgtttgagaccgttgaaatgcttccctctaaagctggcatctggagagtagagtgcttgatcggagaacatcttcacgcaggtatgagcaccttgttcctcgtgtacagcaacaaatgtcagaccccacttggcatggccagtggacacattcgcgactttcagatcacagcatctggccagtatggacaatgggccccaaagttggctcgcctccattactccggtagcataaatgcgtggtccactaaagaacctttcagctggattaaggtcgatcttcttgcccccatgatcatccacggcattaagacacagggagcgaggcagaaattctcctccctctacatctcacagttcattattatgtatagtttggacggcaagaagtggcaaacttatagaggtaacagtactggaacactcatggtgttcttcggcaacgttgatagctctggcatcaaacacaacatctttaatcctcccataatagctcggtacatcagattgcatccgacccactacagcattaggagtacactccgaatggagcttatgggttgcgacttgaattcctgttcaatgccactcggaatggagtctaaagccatctctgatgcacagataaccgccagtagctactttacgaacatgtttgctacgtggtcaccctctaaggcaaggcttcatttgcaaggccggtctaatgcctggagacctcaggtgaacaacccgaaagaatggctccaggtggactttcagaagaccatgaaagtaacaggtgtcactactcagggagttaagtccttggataccagcatgtatgtgaaggagttccttatttcctcatcacaagatggccaccagtggaccctcttctttcagaatggtaaggtcaaagtgtttcagggcaatcaagacagcttcacacccgtggtgaacagtcttgatcctccactcttgacacgataccttcgaatccatccacagtcttgggttcaccagattgcattgcgcatggaagtacttggatgcgaggctcaggacctctac

SEQ ID NO: 590 - protein, 1457 aa, synthetic construct
  REGION 1..1457: note = Variant of human B-domain deleted Factor VIII
MQIELSTCFFLCLLRFCFSATRRYYLGAVELSWDYMQSDLGELPVDARFPPRVPKSFPFNTSVVYKKTLFVEFTDHLFNIAKPRPPWMGLLGPTIQAEVYDTVVITLKNMASHPVSLHAVGVSYWKASEGAEYDDQTSQREKEDDKVFPGGSHTYVWQVLKENGPMASDPPCLTYSYLSHVDLVKDLNSGLIGALLVCREGSLAKEKTQTLHKFILLFAVFDEGKSWHSETKNSLMQDRDAASARAWPKMHTVNGYVNRSLPGLIGCHRKSVYWHVIGMGTTPEVHSIFLEGHTFLVRNHRQASLEISPITFLTAQTLLMDLGQFLLFCHISSHQHDGMEAYVKVDSCPEEPQLRMKNNEEAEDYDDDLTDSEMDVVRFDDDNSPSFIQIRSVAKKHPKTWVHYIAAEEEDWDYAPLVLAPDDRSYKSQYLNNGPQRIGRKYKKVRFMAYTDETFKTREAIQHESGILGPLLYGEVGDTLLIIFKNQASRPYNIYPHGITDVRPLYSRRLPKGVKHLKDFPILPGEIFKYKWTVTVEDGPTKSDPRCLTRYYSSFVNMERDLASGLIGPLLICYKESVDQRGNQIMSDKRNVILFSVFDENRSWYLTENIQRFLPNPAGVQLEDPEFQASNIMHSINGYVFDSLQLSVCLHEVAYWYILSIGAQTDFLSVFFSGYTFKHKMVYEDTLTLFPFSGETVFMSMENPGLWILGCHNSDFRNRGMTALLKVSSCDKNTGDYYEDSYEDISAYLLSKNNAIEPRSFSQNPPVLKRHQREITRTTLQSDQEEIDYDDTISVEMKREDFDIYDEDENQSPRSFQKKTRHYFIAAVERLWDYGMSSSPHVLRNRAQSGSVPQFKKVVFQEFTDGSFTQPLYRGELNEHLGLLGPYIRAEVEDNIMVTFRNQASRPYSFYSSLISYEEDQRQGAEPRKNFVKPNETKTYFWKVQHHMAPTKDEFDCKAWAYFSDVDLEKDVHSGLIGPLLVCHTNTLNPAHGRQVTVQEFALFFTIFDETKSWYFTENMERNCRAPCNIQMEDPTFKENYRFHAINGYIMDTLPGLVMAQDQRIRWYLLSMGSNENIHSIHFSGHVFTVRKKEEYKMALYNLYPGVFETVEMLPSKAGIWRVECLIGEHLHAGMSTLFLVYSNKCQTPLGMASGHIRDFQITASGQYGQWAPKLARLHYSGSINAWSTKEPFSWIKVDLLAPMIIHGIKTQGARQKFSSLYISQFIIMYSLDGKKWQTYRGNSTGTLMVFFGNVDSSGIKHNIFNPPIIARYIRLHPTHYSIRSTLRMELMGCDLNSCSMPLGMESKAISDAQITASSYFTNMFATWSPSKARLHLQGRSNAWRPQVNNPKEWLQVDFQKTMKVTGVTTQGVKSLDTSMYVKEFLISSSQDGHQWTLFFQNGKVKVFQGNQDSFTPVVNSLDPPLLTRYLRIHPQSWVHQIALRMEVLGCEAQDLY

SEQ ID NO: 591 - DNA, 4371 bp, synthetic construct
  misc_feature 1..4371: note = Variant of human B-domain deleted Factor VIII
  source 1..4371: mol_type = other DNA
atgcagattgaactgtctacctgcttcttcctctgtttgctgaggttctgctttagcgccactagacggtactaccttggcgctgtggagctgtcctgggactatatgcagagtgatttgggagagcttcccgtcgacgcacgatttcctcctcgcgttccaaagtcatttcccttcaacacaagcgttgtgtacaagaagacgctcttcgtcgaattcaccgatcacctgttcaatatcgccaaacccagaccaccatggatgggtcttttggggcctaccatacaagcggaggtgtatgacacagttgttatcactctcaagaacatggcttctcatccggtaagtcttcacgcagtgggcgtgtcctactggaaagcttcagaaggagccgagtatgatgatcagacatcccagagggagaaagaagacgacaaggtatttccaggtgggtctcatacctatgtgtggcaagtgctcaaagagaatggccctatggcaagcgatccgctctgtttgacttacagctacctttcacacgttgacctcgtcaaggacctcaactccgggttgattggagccttgttggtatgcagggaaggatctcttgccaaagagaagacacagaccctccacaagtttatccttctctttgctgtgttcgatgagggcaaaagttggcatagcgaaacgaagaattccctcatgcaggatcgcgacgcagccagcgccagagcttggcccaagatgcacactgtgaacggatatgtcaataggtcacttcctggcttgattgggtgtcatcggaaaagtgtctactggcacgtgatcggaatggggacaacaccagaggtccactccatatttctcgaaggccataccttccttgttcgaaaccacagacaggcatccttggagatctctcccattacctttctcactgcccaaacgctccttatggacttgggtcagttccttctcttctgccatatcagctcacaccagcatgatggtatggaagcttatgtgaaagtcgacagttgtcctgaggagccacagttgcgcatgaagaataatgaagaaccagaggattacgacgacgatctcaccgattctgagatggacgtggtgaggtttgatgacgacaactctccctccttcattcaaatccggagcgtggcgaagaaacaccccaagacttgggtccactatatagcggcggaagaggaggattgggattacgctcctcttgtattggcaccagatgaccgctcatacaaaagccagtacctcaacaacggaccgcagagaattggccggaagtataagaaagtgcgatttatggcctatacagacgaaacctttaagacaagggaggccatccagcatgagagtgggattttgggacctcttctttacggcgaagttggtgataccctcctcatcatcttcaagaatcaagcttctcgcccctataacatttacccacacgggatcactgacgttaggcctttgtatagcagaagacttcccaaaggcgtgaagcatctcaaagacttccccattttgccaggcgagatctttaagtacaaatggaccgtcacagtggaagatggaccgactaaatcagaccctcgatgccttacgcggtactattcctccttcgtgaatatggagagagatttggcaagcggactcataggaccactcctcatctgttacaaggaatctgtagaccagaggggtaaccagattatgagtgataaacgcaatgtgatcctttttagcgtcttcgacgagaaccggtcctggtacttgaccgagaatatacaaaggttccttcccaaccccgcaggcgttcagttggaagaccctgagtttcaggccagcaatattatgcactcaatcaacggctatgtgtttgatagtctccagctttctgtttgcctccatgaagtagcctattggtacatcttgtcaattggtgctcaaacagacttcctctccgtcttcttctccggctacacctttaagcacaagatggtgtatgaggacactctcacactctttccattttctggagaaaccgtgttcatgagcatggagaatccaggcctttggatcttgggttgccacaacagtgattttcgcaatcggggaatgactgctctcctcaaagtcagcagctgtgataagaacacaggcgactattacgaagattcttacgaggacataagtgcctacttgttgtccaagaataacgccattgagcccagatcattctcccagaatcctcccgtgcttaaaaggcatcagcgcgaaatcaccagaactactcttcagtctgatcaagaggagattgactatgacgacaccataagcgtggaaatgaagaaggaggatttcgatatctatgacgaagatgagaaccagtctccgcggagctttcagaagaagacgcgacactacttcattgcagcagtcgaaaggctttgggactacggtatgtcatcatcccctcatgtgttgcgcaatagagctcagagtggaagtgttccacagttcaagaaagtcgtctttcaagagtttacagatggcagcttcacacagcctctctatcggggcgagcttaacgaacatttgggactccttggtccctatatccgagccgaagtggaggacaacattatggttacctttaggaatcaagcctctcgcccctacagcttctactcctccctcatcagttatgaggaggatcagagacaaggcgctgaaccacggaagaactttgtgaaaccgaatgagacgaagacctacttctggaaagtacagcaccacatggcccccacaaaagacgaattcgattgcaaagcatgggcgtatttttcagacgttgacttggagaaagatgtacattcaggacttattggtcctttgttggtgtgtcacactaacactctcaatccagcccatggcaggcaggtgacagtccaggaattcgctcttttctttaccatctttgatgagaccaagtcctggtacttcacggaaaacatggagcgcaattgcagagccccctgtaacatacagatggaggaccctacctttaaggaaaattatcggttccacgcaatcaacggatacattatggatacactccctggccttgtgatggctcaggaccaacgaatcaggtggtacctcctcagcatgggttctaatgagaacatacactccattcacttttcaggacatgtgttcactgtccggaagaaagaagagtataagatggccctctacaatttgtatccaggcgtgtttgagaccgttgaaatgcttccctctaaagctggcatctggagagtagagtgcttgatcggagaacatcttcacgcaggtatgagcaccttgttcctcgtgtacagcaacaaatgtcagaccccacttggcatggccagtggacacattcgcgactttcagatcacagcatctggccagtatggacaatgggccccaaagttggctcgcctccattactccggtagcataaatgcgtggtccactaaagaacctttcagctggattaaggtcgatcttcttgcccccatgatcatccacggcattaagacacagggagcgaggcagaaattctcctccctctacatctcacagttcattattatgtatagtttggacggcaagaagtggcaaacttatagaggtaacagtactggaacactcatggtgttcttcggcaacgttgatagctctggcatcaaacacaacatctttaatcctcccataatagctcggtacatcagattgcatccgacccactacagcattaggagtacactccgaatggagcttatgggttgcgacttgaattcctgttcaatgccactcggaatggagtctaaagccatctctgatgcacagataaccgccagtagctactttacgaacatgtttgctacgtggtcaccctctaaggcaaggcttcatttgcaaggccggtctaatgcctggagacctcaggtgaacaacccgaaagaatggctccaggtggactttcagaagaccatgaaagtaacaggtgtcactactcagggagttaagtccttggataccagcatgtatgtgaaggagttccttatttcctcatcacaagatggccaccagtggaccctcttctttcagaatggtaaggtcaaagtgtttcagggcaatcaagacagcttcacacccgtggtgaacagtcttgatcctccactcttgacacgataccttcgaatccatccacagtcttgggttcaccagattgcattgcgcatggaagtacttggatgcgaggctcaggacctctac

SEQ ID NO: 592 - protein, 1457 aa, synthetic construct
  REGION 1..1457: note = Variant of human B-domain deleted Factor VIII
MQIELSTCFFLCLLRFCFSATRRYYLGAVELSWDYMQSDLGELPVDARFPPRVPKSFPFNTSVVYKKTLFVEFTDHLFNIAKPRPPWMGLLGPTIQAEVYDTVVITLKNMASHPVSLHAVGVSYWKASEGAEYDDQTSQREKEDDKVFPGGSHTYVWQVLKENGPMASDPLCLTYSYLSHVDLVKDLNSGLIGALLVCREGSLAKEKTQTLHKFILLFAVFDEGKSWHSETKNSLMQDRDAASARAWPKMHTVNGYVNRSLPGLIGCHRKSVYWHVIGMGTTPEVHSIFLEGHTFLVRNHRQASLEISPITFLTAQTLLMDLGQFLLFCHISSHQHDGMEAYVKVDSCPEEPQLRMKNNEEPEDYDDDLTDSEMDVVRFDDDNSPSFIQIRSVAKKHPKTWVHYIAAEEEDWDYAPLVLAPDDRSYKSQYLNNGPQRIGRKYKKVRFMAYTDETFKTREAIQHESGILGPLLYGEVGDTLLIIFKNQASRPYNIYPHGITDVRPLYSRRLPKGVKHLKDFPILPGEIFKYKWTVTVEDGPTKSDPRCLTRYYSSFVNMERDLASGLIGPLLICYKESVDQRGNQIMSDKRNVILFSVFDENRSWYLTENIQRFLPNPAGVQLEDPEFQASNIMHSINGYVFDSLQLSVCLHEVAYWYILSIGAQTDFLSVFFSGYTFKHKMVYEDTLTLFPFSGETVFMSMENPGLWILGCHNSDFRNRGMTALLKVSSCDKNTGDYYEDSYEDISAYLLSKNNAIEPRSFSQNPPVLKRHQREITRTTLQSDQEEIDYDDTISVEMKKEDFDIYDEDENQSPRSFQKKTRHYFIAAVERLWDYGMSSSPHVLRNRAQSGSVPQFKKVVFQEFTDGSFTQPLYRGELNEHLGLLGPYIRAEVEDNIMVTFRNQASRPYSFYSSLISYEEDQRQGAEPRKNFVKPNETKTYFWKVQHHMAPTKDEFDCKAWAYFSDVDLEKDVHSGLIGPLLVCHTNTLNPAHGRQVTVQEFALFFTIFDETKSWYFTENMERNCRAPCNIQMEDPTFKENYRFHAINGYIMDTLPGLVMAQDQRIRWYLLSMGSNENIHSIHFSGHVFTVRKKEEYKMALYNLYPGVFETVEMLPSKAGIWRVECLIGEHLHAGMSTLFLVYSNKCQTPLGMASGHIRDFQITASGQYGQWAPKLARLHYSGSINAWSTKEPFSWIKVDLLAPMIIHGIKTQGARQKFSSLYISQFIIMYSLDGKKWQTYRGNSTGTLMVFFGNVDSSGIKHNIFNPPIIARYIRLHPTHYSIRSTLRMELMGCDLNSCSMPLGMESKAISDAQITASSYFTNMFATWSPSKARLHLQGRSNAWRPQVNNPKEWLQVDFQKTMKVTGVTTQGVKSLDTSMYVKEFLISSSQDGHQWTLFFQNGKVKVFQGNQDSFTPVVNSLDPPLLTRYLRIHPQSWVHQIALRMEVLGCEAQDLY

SEQ ID NO: 593 - DNA, 4371 bp, synthetic construct
  misc_feature 1..4371: note = Variant of human B-domain deleted Factor VIII
  source 1..4371: mol_type = other DNA
atgcagattgaactgtctacctgcttcttcctctgtttgctgaggttctgctttagcgccactagacggtactaccttggcgctgtggagctgtcctgggactatatgcagagtgatttgggagagcttcccgtcgacgcacgatttcctcctcgcgttccaaagtcatttcccttcaacacaagcgttgtgtacaagaagacgctcttcgtcgaattcaccgatcacctgttcaatatcgccaaacccagaccaccatggatgggtcttttggggcctaccatacaagcggaggtgtatgacacagttgttatcactctcaagaacatggcttctcatccggtaagtcttcacgcagtgggcgtgtcctactggaaagcttcagaaggagccgagtatgatgatcagacatcccagagggagaaagaagacgacaaggtatttccaggtgggtctcatacctatgtgtggcaagtgctcaaagagaatggccctatggcaagcgatccgctctgtttgacttacagctacctttcacacgttgacctcgtcaaggacctcaactccgggttgattggagccttgttggtatgcagggaaggatctcttgccaaagagaagacacagaccctccacaagtttatccttctctttgctgtgttcgatgagggcaaaagttggcatagcgaaacgaagaattccctcatgcaggatcgcgacgcagccagcgccagagcttggcccaagatgcacactgtgaacggatatgtcaataggtcacttcctggcttgattgggtgtcatcggaaaagtgtctactggcacgtgatcggaatggggacaacaccagaggtccactccatatttctcgaaggccataccttccttgttcgaaaccacagacaggcatccttggagatctctcccattacctttctcactgcccaaacgctccttatggacttgggtcagttccttctcttctgccatatcagctcacaccagcatgatggtatggaagcttatgtgaaagtcgacagttgtcctgaggagccacagttgcgcatgaagaataatgaagaagccgaggattacgacgacgatctcaccgattctgagatggacgtggtgaggtttgatgacgacaactctccctccttcattcaaatccggagcgtggcgaagaaacaccccaagacttgggtccactatatagcggcggaagaggaggattgggattacgctcctcttgtattggcaccagatgaccgctcatacaaaagccagtacctcaacaacggaccgcagagaattggccggaagtataagaaagtgcgatttatggcctatacagacgaaacctttaagacaagggaggccatccagcatgagagtgggattttgggacctcttctttacggcgaagttggtgataccctcctcatcatcttcaagaatcaagcttctcgcccctataacatttacccacacgggatcactgacgttaggcctttgtatagcagaagacttcccaaaggcgtgaagcatctcaaagacttccccattttgccaggcgagatctttaagtacaaatggaccgtcacagtggaagatggaccgactaaatcagaccctcgatgccttacgcggtactattcctccttcgtgaatatggagagagatttggcaagcggactcataggaccactcctcatctgttacaaggaatctgtagaccagaggggtaaccagattatgagtgataaacgcaatgtgatcctttttagcgtcttcgacgagaaccggtcctggtacttgaccgagaatatacaaaggttccttcccaaccccgcaggcgttcagttggaagaccctgagtttcaggccagcaatattatgcactcaatcaacggctatgtgtttgatagtctccagctttctgtttgcctccatgaagtagcctattggtacatcttgtcaattggtgctcaaacagacttcctctccgtcttcttctccggctacacctttaagcacaagatggtgtatgaggacactctcacactctttccattttctggagaaaccgtgttcatgagcatggagaatccaggcctttggatcttgggttgccacaacagtgattttcgcaatcggggaatgactgctctcctcaaagtcagcagctgtgataagaacacaggcgactattacgaagattcttacgaggacataagtgcctacttgttgtccaagaataacgccattgagcccagatcattctcccagaatcctcccgtgcttaaaaggcatcagcgcgaaatcaccagaactactcttcagtctgatcaagaggagattgactatgacgacaccataagcgtggaaatgaagaaggaggatttcgatatctatgacgaagatgagaaccagtctccgcggagctttcagaagaagacgcgacactacttcattgcagcagtcgaaaggctttgggactacggtatgtcatcatcccctcatgtgttgcgcaatagagctcagagtggaagtgttccacagttcaagaaagtcgtctttcaagagtttacagatggcagcttcacacagcctctctatcggggcgagcttaacgaacatttgggactccttggtccctatatccgagccgaagtggaggacaacattatggttacctttaggaatcaagcctctcgcccctacagcttctactcctccctcatcagttatgaggaggatcagagacaaggcgctgaaccacggaagaactttgtgaaaccgaatgagacgaagacctacttctggaaagtacagcaccacatggcccccacaaaagacgaattcgattgcaaagcatgggcgtatttttcagacgttgacttggagaaagatgtacattcaggacttattggtcctttgttggtgtgtcacactaacactctcaatccagcccatggcaggcaggtgacagtccaggaattcgctcttttctttaccatctttgatgagaccaagtcctggtacttcacggaaaacatggagcgcaattgcagagccccctgtaacatacagatggaggaccctacctttaaggaaaattatcggttccacgcaatcaacggatacattatggatacactccctggccttgtgatggctcaggaccaacgaatcaggtggtacctcctcagcatgggttctaatgagaacatacactccattcacttttcaggacatgtgttcactgtccggaagaaagaagagtataagatggccctctacaatttgtatccaggcgtgtttgagaccgttgaaatgcttccctctaaagctggcatctggagagtagagtgcttgatcggagaacatcttcacgcaggtatgagcaccttgttcctcgtgtacagcaacaaatgtcagaccccacttggcatggccagtggacacattcgcgactttcagatcacagcatctggccagtatggacaatgggccccaaagttggctcgcctccattactccggtagcataaatgcgtggtccactaaagaacctttcagctggattaaggtcgatcttcttgcccccatgatcatccacggcattaagacacagggagcgaggcagaaattctcctccctctacatctcacagttcattattatgtatagtttggacggcaagaagtggcaaacttatagaggtaacagtactggaacagatatggtgttcttcggcaacgttgatagctctggcatcaaacacaacatctttaatcctcccataatagctcggtacatcagattgcatccgacccactacagcattaggagtacactccgaatggagcttatgggttgcgacttgaattcctgttcaatgccactcggaatggagtctaaagccatctctgatgcacagataaccgccagtagctactttacgaacatgtttgctacgtggtcaccctctaaggcaaggcttcatttgcaaggccggtctaatgcctggagacctcaggtgaacaacccgaaagaatggctccaggtggactttcagaagaccatgaaagtaacaggtgtcactactcagggagttaagtccttggataccagcatgtatgtgaaggagttccttatttcctcatcacaagatggccaccagtggaccctcttctttcagaatggtaaggtcaaagtgtttcagggcaatcaagacagcttcacacccgtggtgaacagtcttgatcctccactcttgacacgataccttcgaatccatccacagtcttgggttcaccagattgcattgcgcatggaagtacttggatgcgaggctcaggacctctac

SEQ ID NO: 594 - protein, 1457 aa, synthetic construct
  REGION 1..1457: note = Variant of human B-domain deleted Factor VIII
MQIELSTCFFLCLLRFCFSATRRYYLGAVELSWDYMQSDLGELPVDARFPPRVPKSFPFNTSVVYKKTLFVEFTDHLFNIAKPRPPWMGLLGPTIQAEVYDTVVITLKNMASHPVSLHAVGVSYWKASEGAEYDDQTSQREKEDDKVFPGGSHTYVWQVLKENGPMASDPLCLTYSYLSHVDLVKDLNSGLIGALLVCREGSLAKEKTQTLHKFILLFAVFDEGKSWHSETKNSLMQDRDAASARAWPKMHTVNGYVNRSLPGLIGCHRKSVYWHVIGMGTTPEVHSIFLEGHTFLVRNHRQASLEISPITFLTAQTLLMDLGQFLLFCHISSHQHDGMEAYVKVDSCPEEPQLRMKNNEEAEDYDDDLTDSEMDVVRFDDDNSPSFIQIRSVAKKHPKTWVHYIAAEEEDWDYAPLVLAPDDRSYKSQYLNNGPQRIGRKYKKVRFMAYTDETFKTREAIQHESGILGPLLYGEVGDTLLIIFKNQASRPYNIYPHGITDVRPLYSRRLPKGVKHLKDFPILPGEIFKYKWTVTVEDGPTKSDPRCLTRYYSSFVNMERDLASGLIGPLLICYKESVDQRGNQIMSDKRNVILFSVFDENRSWYLTENIQRFLPNPAGVQLEDPEFQASNIMHSINGYVFDSLQLSVCLHEVAYWYILSIGAQTDFLSVFFSGYTFKHKMVYEDTLTLFPFSGETVFMSMENPGLWILGCHNSDFRNRGMTALLKVSSCDKNTGDYYEDSYEDISAYLLSKNNAIEPRSFSQNPPVLKRHQREITRTTLQSDQEEIDYDDTISVEMKKEDFDIYDEDENQSPRSFQKKTRHYFIAAVERLWDYGMSSSPHVLRNRAQSGSVPQFKKVVFQEFTDGSFTQPLYRGELNEHLGLLGPYIRAEVEDNIMVTFRNQASRPYSFYSSLISYEEDQRQGAEPRKNFVKPNETKTYFWKVQHHMAPTKDEFDCKAWAYFSDVDLEKDVHSGLIGPLLVCHTNTLNPAHGRQVTVQEFALFFTIFDETKSWYFTENMERNCRAPCNIQMEDPTFKENYRFHAINGYIMDTLPGLVMAQDQRIRWYLLSMGSNENIHSIHFSGHVFTVRKKEEYKMALYNLYPGVFETVEMLPSKAGIWRVECLIGEHLHAGMSTLFLVYSNKCQTPLGMASGHIRDFQITASGQYGQWAPKLARLHYSGSINAWSTKEPFSWIKVDLLAPMIIHGIKTQGARQKFSSLYISQFIIMYSLDGKKWQTYRGNSTGTDMVFFGNVDSSGIKHNIFNPPIIARYIRLHPTHYSIRSTLRMELMGCDLNSCSMPLGMESKAISDAQITASSYFTNMFATWSPSKARLHLQGRSNAWRPQVNNPKEWLQVDFQKTMKVTGVTTQGVKSLDTSMYVKEFLISSSQDGHQWTLFFQNGKVKVFQGNQDSFTPVVNSLDPPLLTRYLRIHPQSWVHQIALRMEVLGCEAQDLY

SEQ ID NO: 595 - DNA, 4371 bp, synthetic construct
  misc_feature 1..4371: note = Variant of human B-domain deleted Factor VIII
  source 1..4371: mol_type = other DNA
atgcagattgaactgtctacctgcttcttcctctgtttgctgaggttctgctttagcgccactagacggtactaccttggcgctgtggagctgtcctgggactatatgcagagtgatttgggagagcttcccgtcgacgcacgatttcctcctcgcgttccaaagtcatttcccttcaacacaagccaagtgtacaagaagacgctcttcgtcgaattcaccgatcacctgttcaatatcgccaaacccagaccaccatggatgggtcttttggggcctaccatacaagcggaggtgtatgacacagttgttatcactctcaagaacatggcttctcatccggtaagtcttcacgcagtgggcgtgtcctactggaaagcttcagaaggagccgagtatgatgatcagacatcccagagggagaaagaagacgacaaggtatttccaggtgggtctcatacctatgtgtggcaagtgctcaaagagaatggccctatggcaagcgatccgctgtgtttgacttacagctacctttcacacgttgacctcgtcaaggacctcaactccgggttgattggagccttgttggtatgcagggaaggatctcttgccaaagagaagacacagaccctccacaagtttatccttctctttgctgtgttcgatgagggcaaaagttggcatagcgaaacgaagaattccctcatgcaggatcgcgacgcagccagcgccagagcttggcccaagatgcacactgtgaacggatatgtcaataggtcacttcctggcttgattgggtgtcatcggaaaagtgtctactggcacgtgatcggaatggggacaacaccagaggtccactccatatttctcgaaggccataccttccttgttcgaaaccacagacaggcatccttggagatctctcccattacctttctcactgcccaaacgctccttatggacttgggtcagttccttctcttctgccatatcagctcacaccagcatgatggtatggaagcttatgtgaaagtcgacagttgtccggaggagccacagttgcgcatgaagaataatgaagaagccgaggattacgacgacgatctcaccgattctgagatggacgtggtgaggtttgatgacgacaactctccctccttcattcaaatccggagcgtggcgaagaaacaccccaagacttgggtccactatatagcggcggaagaggaggattgggattacgctcctcttgtattggcaccagatgaccgctcatacaaaagccagtacctcaacaacggaccgcagagaattggccggaagtataagaaagtgcgatttatggcctatacagacgaaacctttaagacaagggaggccatccagcatgagagtgggattttgggacctcttctttacggcgaagttggtgataccctcctcatcatcttcaagaatcaagcttctcgcccctataacatttacccacacgggatcactgacgttaggcctttgtatagcagaagacttcccaaaggcgtgaagcatctcaaagacttccccattttgccaggcgagatctttaagtacaaatggaccgtcacagtggaagatggaccgactaaatcagaccctcgatgccttacgcggtactattcctccttcgtgaatatggagagagatttggcaagcggactcataggaccactcctcatctgttacaaggaatctgtagaccagaggggtaaccagattatgagtgataaacgcaatgtgatcctttttagcgtcttcgacgagaaccggtcctggtacttgaccgagaatatacaaaggttccttcccaaccccgcaggcgttcagttggaagaccctgagtttcaggccagcaatattatgcactcaatcaacggctatgtgtttgatagtctccagctttctgtttgcctccatgaagtagcctattggtacatcttgtcaattggtgctcaaacagacttcctctccgtcttcttctccggctacacctttaagcacaagatggtgtatgaggacactctcacactctttccattttctggagaaaccgtgttcatgagcatggagaatccaggcctttggatcttgggttgccacaacagtgattttcgcaatcggggaatgactgctctcctcaaagtcagcagctgtgataagaacacaggcgactattacgaagattcttacgaggacataagtgcctacttgttgtccaagaataacgccattgagcccagatcattctcccagaatcctcccgtgcttaaaaggcatcagcgcgaaatcaccagaactactcttcagtctgatcaagaggagattgactatgacgacaccataagcgtggaaatgaagaaggaggatttcgatatctatgacgaagatgagaaccagtctccgcggagctttcagaagaagacgcgacactacttcattgcagcagtcgaaaggctttgggactacggtatgtcatcatcccctcatgtgttgcgcaatagagctcagagtggaagtgttccacagttcaagaaagtcgtctttcaagagtttacagatggcagcttcacacagcctctctatcggggcgagcttaacgaacatttgggactccttggtccctatatccgagccgaagtggaggacaacattatggttacctttaggaatcaagcctctcgcccctacagcttctactcctccctcatcagttatgaggaggatcagagacaaggcgctgaaccacggaagaactttgtgaaaccgaatgagacgaagacctacttctggaaagtacagcaccacatggcccccacaaaagacgaattcgattgcaaagcatgggcgtatttttcagacgttgacttggagaaagatgtacattcaggacttattggtcctttgttggtgtgtcacactaacactctcaatccagcccatggcaggcaggtgacagtccaagaattcgctcttttctttaccatctttgatgagaccaagtcctggtacttcacggaaaacatggagcgcaattgcagagccccctgtaacatacagatggaggaccctacctttaaggaaaattatcggttccacgcaatcaacggatacattatggatacactccctggccttgtgatggctcaggaccaacgaatcaggtggtacctcctcagcatgggttctaatgagaacatacactccattcacttttcaggacatgtgttcactgtccggaagaaagaagagtataagatggccctctacaatttgtatccaggcgtgtttgagaccgttgaaatgcttccctctaaagctggcatctggagagtagagtgcttgatcggagaacatcttcacgcaggtatgagcaccttgttcctcgtgtacagcaacaaatgtcagaccccacttggcatggccagtggacacattcgcgactttcagatcacagcatctggccagtatggacaatgggccccaaagttggctcgcctccattactccggtagcataaatgcgtggtccactaaagaacctttcagctggattaaggtcgatcttcttgcccccatgatcatccacggcattaagacacagggagcgaggcagaaattctcctccctctacatctcacagttcattattatgtatagtttggacggcaagaagtggcaaacttatagaggtaacagtactggaacactcatggtgttcttcggcaacgttgatagctctggcatcaaacacaacatctttaatcctcccataatagctcggtacatcagattgcatccgacccactacagcattaggagtacactccgaatggagcttatgggttgcgacttgaattcctgttcaatgccactcggaatggagtctaaagccatctctgatgcacagataaccgccagtagctactttacgaacatgtttgctacgtggtcaccctctaaggcaaggcttcatttgcaaggccggtctaatgcctggagacctcaggtgaacaacccgaaagaatggctccaggtggactttcagaagaccatgaaagtaacaggtgtcactactcagggagttaagtccttggataccagcatgtatgtgaaggagttccttatttcctcatcacaagatggccaccagtggaccctcttctttcagaatggtaaggtcaaagtgtttcagggcaatcaagacagcttcacacccgtggtgaacagtctggatcctccactcttgacacgataccttcgaatccatccacagtcttgggttcaccagattgcattgcgcatggaagtacttggatgcgaggctcaggacctctac

SEQ ID NO: 596 - protein, 1457 aa, synthetic construct
  REGION 1..1457: note = Variant of human B-domain deleted Factor VIII
MQIELSTCFFLCLLRFCFSATRRYYLGAVELSWDYMQSDLGELPVDARFPPRVPKSFPFNTSQVYKKTLFVEFTDHLFNIAKPRPPWMGLLGPTIQAEVYDTVVITLKNMASHPVSLHAVGVSYWKASEGAEYDDQTSQREKEDDKVFPGGSHTYVWQVLKENGPMASDPLCLTYSYLSHVDLVKDLNSGLIGALLVCREGSLAKEKTQTLHKFILLFAVFDEGKSWHSETKNSLMQDRDAASARAWPKMHTVNGYVNRSLPGLIGCHRKSVYWHVIGMGTTPEVHSIFLEGHTFLVRNHRQASLEISPITFLTAQTLLMDLGQFLLFCHISSHQHDGMEAYVKVDSCPEEPQLRMKNNEEAEDYDDDLTDSEMDVVRFDDDNSPSFIQIRSVAKKHPKTWVHYIAAEEEDWDYAPLVLAPDDRSYKSQYLNNGPQRIGRKYKKVRFMAYTDETFKTREAIQHESGILGPLLYGEVGDTLLIIFKNQASRPYNIYPHGITDVRPLYSRRLPKGVKHLKDFPILPGEIFKYKWTVTVEDGPTKSDPRCLTRYYSSFVNMERDLASGLIGPLLICYKESVDQRGNQIMSDKRNVILFSVFDENRSWYLTENIQRFLPNPAGVQLEDPEFQASNIMHSINGYVFDSLQLSVCLHEVAYWYILSIGAQTDFLSVFFSGYTFKHKMVYEDTLTLFPFSGETVFMSMENPGLWILGCHNSDFRNRGMTALLKVSSCDKNTGDYYEDSYEDISAYLLSKNNAIEPRSFSQNPPVLKRHQREITRTTLQSDQEEIDYDDTISVEMKKEDFDIYDEDENQSPRSFQKKTRHYFIAAVERLWDYGMSSSPHVLRNRAQSGSVPQFKKVVFQEFTDGSFTQPLYRGELNEHLGLLGPYIRAEVEDNIMVTFRNQASRPYSFYSSLISYEEDQRQGAEPRKNFVKPNETKTYFWKVQHHMAPTKDEFDCKAWAYFSDVDLEKDVHSGLIGPLLVCHTNTLNPAHGRQVTVQEFALFFTIFDETKSWYFTENMERNCRAPCNIQMEDPTFKENYRFHAINGYIMDTLPGLVMAQDQRIRWYLLSMGSNENIHSIHFSGHVFTVRKKEEYKMALYNLYPGVFETVEMLPSKAGIWRVECLIGEHLHAGMSTLFLVYSNKCQTPLGMASGHIRDFQITASGQYGQWAPKLARLHYSGSINAWSTKEPFSWIKVDLLAPMIIHGIKTQGARQKFSSLYISQFIIMYSLDGKKWQTYRGNSTGTLMVFFGNVDSSGIKHNIFNPPIIARYIRLHPTHYSIRSTLRMELMGCDLNSCSMPLGMESKAISDAQITASSYFTNMFATWSPSKARLHLQGRSNAWRPQVNNPKEWLQVDFQKTMKVTGVTTQGVKSLDTSMYVKEFLISSSQDGHQWTLFFQNGKVKVFQGNQDSFTPVVNSLDPPLLTRYLRIHPQSWVHQIALRMEVLGCEAQDLY

SEQ ID NO: 597 - DNA, 4371 bp, synthetic construct
  misc_feature 1..4371: note = Variant of human B-domain deleted Factor VIII
  source 1..4371: mol_type = other DNA
atgcagattgaactgtctacctgcttcttcctctgtttgctgaggttctgctttagcgccactagacggtactaccttggcgctgtggagctgtcctgggactatatgcagagtgatttgggagagcttcccgtcgacgcacgatttcctcctcgcgttccaaagtcatttcccttcaacacaagcgttgtgtacaagaagacgctcttcgtcgaattcaccgatcacctgttcaatatcgccaaacccagaccaccatggatgggtcttttggggcctaccatacaagcggaggtgtatgacacagttgttatcactctcaagaacatggcttctcatccggtaagtcttcacgcagtgggcgtgtcctactggaaagcttcagaaggagccgagtatgatgatcagacatcccagagggagaaagaagacgacaaggtatttccaggtgggtctcatacctatgtgtggcaagtgctcaaagagaatggccctatggcaagcgatccgccgtgtttgacttacagctacctttcacacgttgacctcgtcaaggacctcaactccgggttgattggagccttgttggtatgcagggaaggatctcttgccaaagagaagacacagaccctccacaagtttatccttctctttgctgtgttcgatgagggcaaaagttggcatagcgaaacgaagaattccctcatgcaggatcgcgacgcagccagcgccagagcttggcccaagatgcacactgtgaacggatatgtcaataggtcacttcctggcttgattgggtgtcatcggaaaagtgtctactggcacgtgatcggaatggggacaacaccagaggtccactccatatttctcgaaggccataccttccttgttcgaaaccacagacaggcatccttggggatctctcccattacctttctcactgcccaaacgctccttatggacttgggtcagttccttctcttctgccatatcagctcacaccagcatgatggtatggaagcttatgtgaaagtccgcagttgtccggaggagccacagttgcgcatgaagaataatgaagaagccgaggattacgacgacgatctcaccgattctgagatggacgtggtgaggtttgatgacgacaactctccctccttcattcaaatccggagcgtggcgaagaaacaccccaagacttgggtccactatatagcggcggaagaggaggattgggattacgctcctcttgtattggcaccagatgaccgctcatacaaaagccagtacctcaacaacggaccgcagagaattggccggaagtataagaaagtgcgatttatggcctatacagacgaaacctttaagacaagggaggccatccagcatgagagtgggattttgggacctcttctttacggcgaagttggtgataccctcctcatcatcttcaagaatcaagcttctcgcccctataacatttacccacacgggatcactgacgttaggcctttgtatagcagaagacttcccaaaggcgtgaagcatctcaaagacttccccattttgccaggcgagatctttaagtacaaatggaccgtcacagtggaagatggaccgactaaatcagaccctcgatgccttacgcggtactattcctccttcgtgaatatggagagagatttggcaagcggactcataggaccactcctcatctgttacaaggaatctgtagaccagaggggtaaccagattatgagtgataaacgcaatgtgatcctttttagcgtcttcgacgagaaccggtcctggtacttgaccgagaatatacaaaggttccttcccaaccccgcaggcgttcagttggaagaccctgagtttcaggccagcaatattatgcactcaatcaacggctatgtgtttgatagtctccagctttctgtttgcctccatgaagtagcctattggtacatcttgtcaattggtgctcaaacagacttcctctccgtcttcttctccggctacacctttaagcacaagatggtgtatgaggacactctcacactctttccattttctggagaaaccgtgttcatgagcatggagaatccaggcctttggatcttgggttgccacaacagtgattttcgcaatcggggaatgactgctctcctcaaagtcagcagctgtgataagaacacaggcgactattacgaagattcttacgaggacataagtgcctacttgttgtccaagaataacgccattgagcccagatcattctcccagaatcctcccgtgcttaaaaggcatcagcgcgaaatcaccagaactactcttcagtctgatcaagaggagattgactatgacgacaccataagcgtggaaatgaagaaggaggatttcgatatctatgacgaagatgagaaccagtctccgcggagctttcagaagaagacgcgacactacttcattgcagcagtcgaaaggctttgggactacggtatgtcatcatcccctcatgtgttgcgcaatagagctcagagtggaagtgttccacagttcaagaaagtcgtctttcaagagtttacagatggcagcttcacacagcctctctatcggggcgagcttaacgaacatttgggactccttggtccctatatccgagccgaagtggaggacaacattatggttacctttaggaatcaagcctctcgcccctacagcttctactcctccctcatcagttatgaggaggatcagagacaaggcgctgaaccacggaagaactttgtgaaaccgaatgagacgaagacctacttctggaaagtacagcaccacatggcccccacaaaagacgaattcgattgcaaagcatgggcgtatttttcagacgttgacttggagaaagatgtacattcaggacttattggtcctttgttggtgtgtcacactaacactctcaatccagcccatggcaggcaggtgacagtccgtgaattcgctcttttctttaccatctttgatgagaccaagtcctggtacttcacggaaaacatggagcgcaattgcagagccccctgtaacatacagatggaggaccctacctttaaggaaaattatcggttccacgcaatcaacggatacattatggatacactccctggccttgtgatggctcaggaccaacgaatcaggtggtacctcctcagcatgggttctaatgagaacatacactccattcacttttcaggacatgtgttcactgtccggaagaaagaagagtataagatggccctctacaatttgtatccaggcgtgtttgagaccgttgaaatgcttccctctaaagctggcatctggagagtagagtgcttgatcggagaacatcttcacgcaggtatgagcaccttgttcctcgtgtacagcaacaaatgtcagaccccacttggcatggccagtggacacattcgcgactttcagatcacagcatctggccagtatggacaatgggccccaaagttggctcgcctccattactccggtagcataaatgcgtggtccactaaagaacctttcagctggattaaggtcgatcttcttgcccccatgatcatccacggcattaagacacagggagcgaggcagaaattctcctccctctacatctcacagttcattattatgtatagtttggacggcaagaagtggcaaacttatagaggtaacagtactggaacagatatggtgttcttcggcaacgttgatagctctggcatcaaacacaacatctttaatcctcccataatagctcggtacatcagattgcatccgacccactacagcattaggagtacactccgaatggagcttatgggttgcgacttgaattcctgttcaatgccactcggaatggagtctaaagccatctctgatgcacagataaccgccagtagctactttacgaacatgtttgctacgtggtcaccctctaaggcaaggcttcatttgcaaggccggtctaatgcctggagacctcaggtgaacaacccgaaagaatggctccaggtggactttcagaagaccatgaaagtaacaggtgtcactactcagggagttaagtccttggataccagcatgtatgtgaaggagttccttatttcctcatcacaagatggccaccagtggaccctcttctttcagaatggtaaggtcaaagtgtttcagggcaatcaagacagcttcacacccgtggtgaacagtctggatcctccactcttgacacgataccttcgaatccatccacagtcttgggttcaccagattgcattgcgcatggaagtacttggatgcgaggctcaggacctctac

SEQ ID NO: 598 - protein, 1457 aa, synthetic construct
  REGION 1..1457: note = Variant of human B-domain deleted Factor VIII
MQIELSTCFFLCLLRFCFSATRRYYLGAVELSWDYMQSDLGELPVDARFPPRVPKSFPFNTSVVYKKTLFVEFTDHLFNIAKPRPPWMGLLGPTIQAEVYDTVVITLKNMASHPVSLHAVGVSYWKASEGAEYDDQTSQREKEDDKVFPGGSHTYVWQVLKENGPMASDPPCLTYSYLSHVDLVKDLNSGLIGALLVCREGSLAKEKTQTLHKFILLFAVFDEGKSWHSETKNSLMQDRDAASARAWPKMHTVNGYVNRSLPGLIGCHRKSVYWHVIGMGTTPEVHSIFLEGHTFLVRNHRQASLGISPITFLTAQTLLMDLGQFLLFCHISSHQHDGMEAYVKVRSCPEEPQLRMKNNEEAEDYDDDLTDSEMDVVRFDDDNSPSFIQIRSVAKKHPKTWVHYIAAEEEDWDYAPLVLAPDDRSYKSQYLNNGPQRIGRKYKKVRFMAYTDETFKTREAIQHESGILGPLLYGEVGDTLLIIFKNQASRPYNIYPHGITDVRPLYSRRLPKGVKHLKDFPILPGEIFKYKWTVTVEDGPTKSDPRCLTRYYSSFVNMERDLASGLIGPLLICYKESVDQRGNQIMSDKRNVILFSVFDENRSWYLTENIQRFLPNPAGVQLEDPEFQASNIMHSINGYVFDSLQLSVCLHEVAYWYILSIGAQTDFLSVFFSGYTFKHKMVYEDTLTLFPFSGETVFMSMENPGLWILGCHNSDFRNRGMTALLKVSSCDKNTGDYYEDSYEDISAYLLSKNNAIEPRSFSQNPPVLKRHQREITRTTLQSDQEEIDYDDTISVEMKKEDFDIYDEDENQSPRSFQKKTRHYFIAAVERLWDYGMSSSPHVLRNRAQSGSVPQFKKVVFQEFTDGSFTQPLYRGELNEHLGLLGPYIRAEVEDNIMVTFRNQASRPYSFYSSLISYEEDQRQGAEPRKNFVKPNETKTYFWKVQHHMAPTKDEFDCKAWAYFSDVDLEKDVHSGLIGPLLVCHTNTLNPAHGRQVTVREFALFFTIFDETKSWYFTENMERNCRAPCNIQMEDPTFKENYRFHAINGYIMDTLPGLVMAQDQRIRWYLLSMGSNENIHSIHFSGHVFTVRKKEEYKMALYNLYPGVFETVEMLPSKAGIWRVECLIGEHLHAGMSTLFLVYSNKCQTPLGMASGHIRDFQITASGQYGQWAPKLARLHYSGSINAWSTKEPFSWIKVDLLAPMIIHGIKTQGARQKFSSLYISQFIIMYSLDGKKWQTYRGNSTGTDMVFFGNVDSSGIKHNIFNPPIIARYIRLHPTHYSIRSTLRMELMGCDLNSCSMPLGMESKAISDAQITASSYFTNMFATWSPSKARLHLQGRSNAWRPQVNNPKEWLQVDFQKTMKVTGVTTQGVKSLDTSMYVKEFLISSSQDGHQWTLFFQNGKVKVFQGNQDSFTPVVNSLDPPLLTRYLRIHPQSWVHQIALRMEVLGCEAQDLY

SEQ ID NO: 599 - DNA, 4371 bp, synthetic construct
  misc_feature 1..4371: note = Variant of human B-domain deleted Factor VIII
  source 1..4371: mol_type = other DNA
atgcagattgaactgtctacctgcttcttcctctgtttgctgaggttctgctttagcgccactagacggtactaccttggcgctgtggagctgtcctgggactatatgcagagtgatttgggagagcttcccgtcgacgcacgatttcctcctcgcgttccaaagtcatttcccttcaacacaagcgtggtgtacaagaagacgctcttcgtcgaattcaccgatcacctgttcaatatcgccaaacccagaccaccatggatgggtcttttggggcctaccatacaagcggaggtgtatgacacagttgttatcactctcaagaacatggcttctcatccggtaagtcttcacgcagtgggcgtgtcctactggaaagcttcagaaggagccgagtatgatgatcagacatcccagagggagaaagaagacgacaaggtatttccaggtgggtctcatacctatgtgtggcaagtgctcaaagagaatggccctatggcaagcgatccgccgtgtttgacttacagctacctttcacacgttgacctcgtcaaggacctcaactccgggttgattggagccttgttggtatgcagggaaggatctcttgccaaagagaagacacagaccctccacaagtttatccttctctttgctgtgttcgatgagggcaaaagttggcatagcgaaacgaagaattccctcatgcaggatcgcgacgcagccagcgccagagcttggcccaagatgcacactgtgaacggatatgtcaataggtcacttcctggcttgattgggtgtcatcggaaaagtgtctactggcacgtgatcggaatggggacaacaccagaggtccactccatatttctcgaaggccataccttccttgttcgaaaccacagacaggcatccttggagatctctcccattacctttctcactgcccaaacgctccttatggacttgggtcagttccttctcttctgccatatcagctcacaccagcatgatggtatggaagcttatgtgaaagtcgacagttgtccggaggagccacagttgcgcatgaagaataatgaagaagccgaggattacgacgacgatctcaccgattctgagatggacgtggtgaggtttgatgacgacaactctccctccttcattcaaatccggagcgtggcgaagaaacaccccaagacttgggtccactatatagcggcggaagaggaggattgggattacgctcctcttgtattggcaccagatgaccgctcatacaaaagccagtacctcaacaacggaccgcagagaattggccggaagtataagaaagtgcgatttatggcctatacagacgaaacctttaagacaagggaggccatccagcatgagagtgggattttgggacctcttctttacggcgaagttggtgataccctcctcatcatcttcaagaatcaagcttctcgcccctataacatttacccacacgggatcactgacgttaggcctttgtatagcagaagacttcccaaaggcgtgaagcatctcaaagacttccccattttgccaggcgagatctttaagtacaaatggaccgtcacagtggaagatggaccgactaaatcagaccctcgatgccttacgcggtactattcctccttcgtgaatatggagagagatttggcaagcggactcataggaccactcctcatctgttacaaggaatctgtagaccagaggggtaaccagattatgagtgataaacgcaatgtgatcctttttagcgtcttcgacgagaaccggtcctggtacttgaccgagaatatacaaaggttccttcccaaccccgcaggcgttcagttggaagaccctgagtttcaggccagcaatattatgcactcaatcaacggctatgtgtttgatagtctccagctttctgtttgcctccatgaagtagcctattggtacatcttgtcaattggtgctcaaacagacttcctctccgtcttcttctccggctacacctttaagcacaagatggtgtatgaggacactctcacactctttccattttctggagaaaccgtgttcatgagcatggagaatccaggcctttggatcttgggttgccacaacagtgattttcgcaatcggggaatgactgctctcctcaaagtcagcagctgtgataagaacacaggcgactattacgaagattcttacgaggacataagtgcctacttgttgtccaagaataacgccattgagcccagatcattctcccagaatcctcccgtgcttaaaaggcatcagcgcgaaatcaccagaactactcttcagtctgatcaagaggagattgactatgacgacaccataagcgtggaaatgaagaaggaggatttcgatatctatgacgaagatgagaaccagtctccgcggagctttcagaagaagacgcgacactacttcattgcagcagtcgaaaggctttgggactacggtatgtcatcatcccctcatgtgttgcgcaatagagctcagagtggaagtgttccacagttcaagaaagtcgtctttcaagagtttacagatggcagcttcacacagcctctctatcggggcgagcttaacgaacatttgggactccttggtccctatatccgagccgaagtggaggacaacattatggttacctttaggaatcaagcctctcgcccctacagcttctactcctccctcatcagttatgaggaggatcagagacaaggcgctgaaccacggaagaactttgtgaaaccgaatgagacgaagacctacttctggaaagtacagcaccacatggcccccacaaaagacgaattcgattgcaaagcatgggcgtatttttcagacgttgacttggagaaagatgtacattcaggacttattggtcctttgttggtgtgtcacactaacactctcaatccagcccatggcaggcaggtgacagtccaggaattcgctcttttctttaccatctttgatgagaccaagtcctggtacttcacggaaaacatggagcgcaattgcagagccccctgtaacatacagatggaggaccctacctttaaggaaaattatcggttccacgcaatcaacggatacattatggatacactccctggccttgtgatggctcaggaccaacgaatcaggtggtacctcctcagcatgggttctaatgagaacatacactccattcacttttcaggacatgtgttcactgtccggaagaaagaagagtataagatggccctctacaatttgtatccaggcgtgtttgagaccgttgaaatgcttccctctaaagctggcatctggagagtagagtgcttgatcggagaacatcttcacgcaggtatgagcaccttgttcctcgtgtacagcaacaaatgtcagaacccacttggcatggccagtggacacattcgcgactttcagatcacagcatctggccagtatggacaatgggccccaaagttggctcgcctccattactccggtagcataaatgcgtggtccactaaagaacctttcagctggattaaggtcgatcttcttgcccccatgatcatccacggcattaagacacagggagcgaggcagaaattctcctccctctacatctcacagttcattattatgtatagtttggacggcaagaagtggcaaacttatagaggtaacagtactggaacactcatggtgttcttcggcaacgttgatagctctggcatcaaacacaacatctttaatcctcccataatagctcggtacatcagattgcatccgacccactacagcattaggagtacactccgaatggagcttatgggttgcgacttgaattcctgttcaatgccactcggaatggagtctaaagccatctctgatgcacagataaccgccagtagctactttacgaacatgtttgctacgtggtcaccctctaaggcaaggcttcatttgcaaggccggtctaatgcctggagacctcaggtgaacaacccgaaagaatggctccaggtggactttcagaagaccatgaaagtaacaggtgtcactactcagggagttaagtccttggataccagcatgtatgtgaaggagttccttatttcctcatcacaagatggccaccagtggaccctcttctttcagaatggtaaggtcaaagtgtttcagggcaatcaagacagcttcacacccgtggtgaacagtcttgatcctccactcttgacacgataccttcgaatccatccacagtcttgggttcaccagattgcattgcgcatggaagtacttggatgcgaggctcaggacctctac

SEQ ID NO: 600 - protein, 1457 aa, synthetic construct
  REGION 1..1457: note = Variant of human B-domain deleted Factor VIII
MQIELSTCFFLCLLRFCFSATRRYYLGAVELSWDYMQSDLGELPVDARFPPRVPKSFPFNTSVVYKKTLFVEFTDHLFNIAKPRPPWMGLLGPTIQAEVYDTVVITLKNMASHPVSLHAVGVSYWKASEGAEYDDQTSQREKEDDKVFPGGSHTYVWQVLKENGPMASDPPCLTYSYLSHVDLVKDLNSGLIGALLVCREGSLAKEKTQTLHKFILLFAVFDEGKSWHSETKNSLMQDRDAASARAWPKMHTVNGYVNRSLPGLIGCHRKSVYWHVIGMGTTPEVHSIFLEGHTFLVRNHRQASLEISPITFLTAQTLLMDLGQFLLFCHISSHQHDGMEAYVKVDSCPEEPQLRMKNNEEAEDYDDDLTDSEMDVVRFDDDNSPSFIQIRSVAKKHPKTWVHYIAAEEEDWDYAPLVLAPDDRSYKSQYLNNGPQRIGRKYKKVRFMAYTDETFKTREAIQHESGILGPLLYGEVGDTLLIIFKNQASRPYNIYPHGITDVRPLYSRRLPKGVKHLKDFPILPGEIFKYKWTVTVEDGPTKSDPRCLTRYYSSFVNMERDLASGLIGPLLICYKESVDQRGNQIMSDKRNVILFSVFDENRSWYLTENIQRFLPNPAGVQLEDPEFQASNIMHSINGYVFDSLQLSVCLHEVAYWYILSIGAQTDFLSVFFSGYTFKHKMVYEDTLTLFPFSGETVFMSMENPGLWILGCHNSDFRNRGMTALLKVSSCDKNTGDYYEDSYEDISAYLLSKNNAIEPRSFSQNPPVLKRHQREITRTTLQSDQEEIDYDDTISVEMKKEDFDIYDEDENQSPRSFQKKTRHYFIAAVERLWDYGMSSSPHVLRNRAQSGSVPQFKKVVFQEFTDGSFTQPLYRGELNEHLGLLGPYIRAEVEDNIMVTFRNQASRPYSFYSSLISYEEDQRQGAEPRKNFVKPNETKTYFWKVQHHMAPTKDEFDCKAWAYFSDVDLEKDVHSGLIGPLLVCHTNTLNPAHGRQVTVQEFALFFTIFDETKSWYFTENMERNCRAPCNIQMEDPTFKENYRFHAINGYIMDTLPGLVMAQDQRIRWYLLSMGSNENIHSIHFSGHVFTVRKKEEYKMALYNLYPGVFETVEMLPSKAGIWRVECLIGEHLHAGMSTLFLVYSNKCQNPLGMASGHIRDFQITASGQYGQWAPKLARLHYSGSINAWSTKEPFSWIKVDLLAPMIIHGIKTQGARQKFSSLYISQFIIMYSLDGKKWQTYRGNSTGTLMVFFGNVDSSGIKHNIFNPPIIARYIRLHPTHYSIRSTLRMELMGCDLNSCSMPLGMESKAISDAQITASSYFTNMFATWSPSKARLHLQGRSNAWRPQVNNPKEWLQVDFQKTMKVTGVTTQGVKSLDTSMYVKEFLISSSQDGHQWTLFFQNGKVKVFQGNQDSFTPVVNSLDPPLLTRYLRIHPQSWVHQIALRMEVLGCEAQDLY

SEQ ID NO: 601 - DNA, 4371 bp, synthetic construct
  misc_feature 1..4371: note = Variant of human B-domain deleted Factor VIII
  source 1..4371: mol_type = other DNA
atgcagattgaactgtctacctgcttcttcctctgtttgctgaggttctgctttagcgccactagacggtactaccttggcgctgtggagctgtcctgggactatatgcagagtgatttgggagagcttcccgtcgacgcacgatttcctcctcgcgttccaaagtcatttcccttcaacacaagcgttgtgtacaagaagacgctcttcgtcgaattcaccgatcacctgttcaatatcgccaaacccagaccaccatggatgggtcttttggggcctaccatacaagcggaggtgtatgacacagttgttatcactctcaagaacatggcttctcatccggtaagtcttcacgcagtgggcgtgtcctactggaaagcttcagaaggagccgagtatgatgatcagacatcccagagggagaaagaagacgacaaggtatttccaggtgggtctcatacctatgtgtggcaagtgctcaaagagaatggccctatggcaagcgatccgctgtgtttgacttacagctacctttcacacgttgacctcgtcaaggacctcaactccgggttgattggagccttgttggtatgcagggaaggatctcttgccaaagagaagacacagaccctccacaagtttatccttctctttgctgtgttcgatgagggcaaaagttggcatagcgaaacgaagaattccctcatgcaggatcgcgacgcagccagcgccagagcttggcccaagatgcacactgtgaacggatatgtcaataggtcacttcctggcttgattgggtgtcatcggaaaagtgtctactggcacgtgatcggaatggggacaacaccagaggtccactccatatttctcgaaggccataccttccttgttcgaaaccacagacaggcatccttggagatctctcccattacctttctcactgcccaaacgctccttatggacttgggtcagttccttctcttctgccatatcagctcacaccagcatgatggtatggaagcttatgtgaaagtcgacagttgtcctgaggagccacagttgcgcatgaagaataatgaagaagccgaggattacgacgacgatctcaccgattctgagatggacgtggtgaggtttgatgacgacaactctccctccttcattcaaatccggagcgtggcgaagaaacaccccaagacttgggtccactatatagcggcggaagaggaggattgggattacgctcctcttgtattggcaccagatgaccgctcatacaaaagccagtacctcaacaacggaccgcagagaattggccggaagtataagaaagtgcgatttatggcctatacagacgaaacctttaagacaagggaggccatccagcatgagagtgggattttgggacctcttctttacggcgaagttggtgataccctcctcatcatcttcaagaatcaagcttctcgcccctataacatttacccacacgggatcactgacgttaggcctttgtatagcagaagacttcccaaaggcgtgaagcatctcaaagacttccccattttgccaggcgagatctttaagtacaaatggaccgtcacagtggaagatggaccgactaaatcagaccctcgatgccttacgcggtactattcctccttcgtgaatatggagagagatttggcaagcggactcataggaccactcctcatctgttacaaggaatctgtagaccagaggggtaaccagattatgagtgataaacgcaatgtgatcctttttagcgtcttcgacgagaaccggtcctggtacttgaccgagaatatacaaaggttccttcccaaccccgcaggcgttcagttggaagaccctgagtttcaggccagcaatattatgcactcaatcaacggctatgtgtttgatagtctccagctttctgtttgcctccatgaagtagcctattggtacatcttgtcaattggtgctcaaacagacttcctctccgtcttcttctccggctacacctttaagcacaagatggtgtatgaggacactctcacactctttccattttctggagaaaccgtgttcatgagcatggagaatccaggcctttggatcttgggttgccacaacagtgattttcgcaatcggggaatgactgctctcctcaaagtcagcagctgtgataagaacagcggcgactattacgaagattcttacgaggacataagtgcctacttgttgtccaagaataacgccattgagcccagatcattctcccagaatcctcccgtgcttaaaaggcatcagcgcgaaatcaccagaactactcttcagtctgatcaagaggagattgactatgacgacaccataagcgtggaaatgaagcgtgaggatttcgatatctatgacgaagatgagaaccagtctccgcggagctttcagaagaagacgcgacactacttcattgcagcagtcgaaaggctttgggactacggtatgtcatcatcccctcatgtgttgcgcaatagagctcagagtggaagtgttccacagttcaagaaagtcgtctttcaagagtttacagatggcagcttcacacagcctctctatcggggcgagcttaacgaacatttgggactccttggtccctatatccgagccgaagtggaggacaacattatggttacctttaggaatcaagcctctcgcccctacagcttctactcctccctcatcagttatgaggaggatcagagacaaggcgctgaaccacggaagaactttgtgaaaccgaatgagacgaagacctacttctggaaagtacagcaccacatggcccccacaaaagacgaattcgattgcaaagcatgggcgtatttttcagacgttgacttggagaaagatgtacattcaggacttattggtcctttgttggtgtgtcacactaacactctcaatccagcccatggcaggcaggtgacagtccaggaattcgctcttttctttaccatctttgatgagaccaagtcctggtacttcacggaaaacatggagcgcaattgcagagccccctgtaacatacagatggaggaccctacctttaaggaaaattatcggttccacgcaatcaacggatacattatggatacactccctggccttgtgatggctcaggaccaacgaatcaggtggtacctcctcagcatgggttctaatgagaacatacactccattcacttttcaggacatgtgttcactgtccggaagaaagaagagtataagatggccctctacaatttgtatccaggcgtgtttgagaccgttgaaatgcttccctctaaagctggcatctggagagtagagtgcttgatcggagaacatcttcacgcaggtatgagcaccttgttcctcgtgtacagcaacaaatgtcagaccccacttggcatggccagtggacacattcgcgactttcagatcacagcatctggccagtatggacaatgggccccaaagttggctcgcctccattactccggtagcataaatgcgtggtccactaaagaacctttcagctggattaaggtcgatcttcttgcccccatgatcatccacggcattaagacacagggagcgaggcagaaattctcctccctctacatctcacagttcattattatgtatagtttggacggcaagaagtggcaaacttatagaggtaacagtactggaacagatatggtgttcttcggcaacgttgatagctctggcatcaaacacaacatctttaatcctcccataatagctcggtacatcagattgcatccgacccactacagcattaggagtacactccgaatggagcttatgggttgcgacttgaattcctgttcaatgccactcggaatggagtctaaagccatctctgatgcacagataaccgccagtagctactttacgaacatgtttgctacgtggtcaccctctaaggcaaggcttcatttgcaaggccggtctaatgcctggagacctcaggtgaacaacccgaaagaatggctccaggtggactttcagaagaccatgaaagtaacaggtgtcactactcagggagttaagtccttggataccagcatgtatgtgaaggagttccttatttcctcatcacaagatggccaccagtggaccctcttctttcagaatggtaaggtcaaagtgtttcagggcaatcaagacagcttcacacccgtggtgaacagtatcgatcctccactcttgacacgataccttcgaatccatccacagtcttgggttcaccagattgcattgcgcatggaagtacttggatgcgaggctcaggacctctac

SEQ ID NO: 602 - protein, 1457 aa, synthetic construct
  REGION 1..1457: note = Variant of human B-domain deleted Factor VIII
MQIELSTCFFLCLLRFCFSATRRYYLGAVELSWDYMQSDLGELPVDARFPPRVPKSFPFNTSVVYKKTLFVEFTDHLFNIAKPRPPWMGLLGPTIQAEVYDTVVITLKNMASHPVSLHAVGVSYWKASEGAEYDDQTSQREKEDDKVFPGGSHTYVWQVLKENGPMASDPLCLTYSYLSHVDLVKDLNSGLIGALLVCREGSLAKEKTQTLHKFILLFAVFDEGKSWHSETKNSLMQDRDAASARAWPKMHTVNGYVNRSLPGLIGCHRKSVYWHVIGMGTTPEVHSIFLEGHTFLVRNHRQASLEISPITFLTAQTLLMDLGQFLLFCHISSHQHDGMEAYVKVDSCPEEPQLRMKNNEEAEDYDDDLTDSEMDVVRFDDDNSPSFIQIRSVAKKHPKTWVHYIAAEEEDWDYAPLVLAPDDRSYKSQYLNNGPQRIGRKYKKVRFMAYTDETFKTREAIQHESGILGPLLYGEVGDTLLIIFKNQASRPYNIYPHGITDVRPLYSRRLPKGVKHLKDFPILPGEIFKYKWTVTVEDGPTKSDPRCLTRYYSSFVNMERDLASGLIGPLLICYKESVDQRGNQIMSDKRNVILFSVFDENRSWYLTENIQRFLPNPAGVQLEDPEFQASNIMHSINGYVFDSLQLSVCLHEVAYWYILSIGAQTDFLSVFFSGYTFKHKMVYEDTLTLFPFSGETVFMSMENPGLWILGCHNSDFRNRGMTALLKVSSCDKNSGDYYEDSYEDISAYLLSKNNAIEPRSFSQNPPVLKRHQREITRTTLQSDQEEIDYDDTISVEMKREDFDIYDEDENQSPRSFQKKTRHYFIAAVERLWDYGMSSSPHVLRNRAQSGSVPQFKKVVFQEFTDGSFTQPLYRGELNEHLGLLGPYIRAEVEDNIMVTFRNQASRPYSFYSSLISYEEDQRQGAEPRKNFVKPNETKTYFWKVQHHMAPTKDEFDCKAWAYFSDVDLEKDVHSGLIGPLLVCHTNTLNPAHGRQVTVQEFALFFTIFDETKSWYFTENMERNCRAPCNIQMEDPTFKENYRFHAINGYIMDTLPGLVMAQDQRIRWYLLSMGSNENIHSIHFSGHVFTVRKKEEYKMALYNLYPGVFETVEMLPSKAGIWRVECLIGEHLHAGMSTLFLVYSNKCQTPLGMASGHIRDFQITASGQYGQWAPKLARLHYSGSINAWSTKEPFSWIKVDLLAPMIIHGIKTQGARQKFSSLYISQFIIMYSLDGKKWQTYRGNSTGTDMVFFGNVDSSGIKHNIFNPPIIARYIRLHPTHYSIRSTLRMELMGCDLNSCSMPLGMESKAISDAQITASSYFTNMFATWSPSKARLHLQGRSNAWRPQVNNPKEWLQVDFQKTMKVTGVTTQGVKSLDTSMYVKEFLISSSQDGHQWTLFFQNGKVKVFQGNQDSFTPVVNSIDPPLLTRYLRIHPQSWVHQIALRMEVLGCEAQDLY

SEQ ID NO: 603 - DNA, 4371 bp, synthetic construct
  misc_feature 1..4371: note = Variant of human B-domain deleted Factor VIII
  source 1..4371: mol_type = other DNA
atgcagattgaactgtctacctgcttcttcctctgtttgctgaggttctgctttagcgccactagacggtactaccttggcgctgtggagctgtcctgggactatatgcagagtgatttgggagagcttcccgtcgacgcacgatttcctcctcgcgttccaaagtcatttcccttcaacacaagccaagtgtacaagaagacgctcttcgtcgaattcaccgatcacctgttcaatatcgccaaacccagaccaccatggatgggtcttttggggcctaccatacaagcggaggtgtatgacacagttgttatcactctcaagaacatggcttctcatccggtaagtcttcacgcagtgggcgtgtcctactggaaagcttcagaaggagccgagtatgatgatcagacatcccagagggagaaagaagacgacaaggtatttccaggtgggtctcatacctatgtgtggcaagtgctcaaagagaatggccctatggcaagcgatccgctctgtttgacttacagctacctttcacacgttgacctcgtcaaggacctcaactccgggttgattggagccttgttggtatgcagggaaggatctcttgccaaagagaagacacagaccctccacaagtttatccttctctttgctgtgttcgatgagggcaaaagttggcatagcgaaacgaagaattccctcatgcaggatcgcgacgcagccagcgccagagcttggcccaagatgcacactgtgaacggatatgtcaataggtcacttcctggcttgattgggtgtcatcggaaaagtgtctactggcacgtgatcggaatggggacaacaccagaggtccactccatatttctcgaaggccataccttccttgttcgaaaccacagacaggcatccttggagatctctcccattacctttctcactgcccaaacgctccttatggacttgggtcagttccttctcttctgccatatcagctcacaccagcatgatggtatggaagcttatgtgaaagtcgacagttgtcctgaggagccacagttgcgcatgaagaataatgaagaagccgaggattacgacgacgatctcaccgattctgagatggacgtggtgaggtttgatgacgacaactctccctccttcattcaaatccggagcgtggcgaagaaacaccccaagacttgggtccactatatagcggcggaagaggaggattgggattacgctcctcttgtattggcaccagatgaccgctcatacaaaagccagtacctcaacaacggaccgcagagaattggccggaagtataagaaagtgcgatttatggcctatacagacgaaacctttaagacaagggaggccatccagcatgagagtgggattttgggacctcttctttacggcgaagttggtgataccctcctcatcatcttcaagaatcaagcttctcgcccctataacatttacccacacgggatcactgacgttaggcctttgtatagcagaagacttcccaaaggcgtgaagcatctcaaagacttccccattttgccaggcgagatctttaagtacaaatggaccgtcacagtggaagatggaccgactaaatcagaccctcgatgccttacgcggtactattcctccttcgtgaatatggagagagatttggcaagcggactcataggaccactcctcatctgttacaaggaatctgtagaccagaggggtaaccagattatgagtgataaacgcaatgtgatcctttttagcgtcttcgacgagaaccggtcctggtacttgaccgagaatatacaaaggttccttcccaaccccgcaggcgttcagttggaagaccctgagtttcaggccagcaatattatgcactcaatcaacggctatgtgtttgatagtctccagctttctgtttgcctccatgaagtagcctattggtacatcttgtcaattggtgctcaaacagacttcctctccgtcttcttctccggctacacctttaagcacaagatggtgtatgaggacactctcacactctttccattttctggagaaaccgtgttcatgagcatggagaatccaggcctttggatcttgggttgccacaacagtgattttcgcaatcggggaatgactgctctcctcaaagtcagcagctgtgatgagaacaccggcgactattacgaagattcttacgaggacataagtgcctacttgttgtccaagaataacgccattgagcccagatcattctcccagaatcctcccgtgcttaaaaggcatcagcgcgaaatcaccagaactactcttcagtctgatcaagaggagattgactatgacgacaccataagcgtggaaatgaagaaggaggatttcgatatctatgacgaagatgagaaccagtctccgcggagctttcagaagaagacgcgacactacttcattgcagcagtcgaaaggctttgggactacggtatgtcatcatcccctcatgtgttgcgcaatagagctcagagtggaagtgttccacagttcaagaaagtcgtctttcaagagtttacagatggcagcttcacacagcctctctatcggggcgagcttaacgaacatttgggactccttggtccctatatccgagccgaagtggaggacaacattatggttacctttaggaatcaagcctctcgcccctacagcttctactcctccctcatcagttatgaggaggatcagagacaaggcgctgaaccacggaagaactttgtgaaaccgaatgagacgaagacctacttctggaaagtacagcaccacatggcccccacaaaagacgaattcgattgcaaagcatgggcgtatttttcagacgttgacttggagaaagatgtacattcaggacttattggtcctttgttggtgtgtcacactaacactctcaatccagcccatggcaggcaggtgacagtccaagaattcgctcttttctttaccatctttgatgagaccaagtcctggtacttcacggaaaacatggagcgcaattgcagagccccctgtaacatacagatggaggaccctacctttaaggaaaattatcggttccacgcaatcaacggatacattatggatacactccctggccttgtgatggctcaggaccaacgaatcaggtggtacctcctcagcatgggttctaatgagaacatacactccattcacttttcaggacatgtgttcactgtccggaagaaagaagagtataagatggccctctacaatttgtatccaggcgtgtttgagaccgttgaaatgcttccctctaaagctggcatctggagagtagagtgcttgatcggagaacatcttcacgcaggtatgagcaccttgttcctcgtgtacagcaacaaatgtcagaccccacttggcatggccagtggacacattcgcgactttcagatcacagcatctggccagtatggacaatgggccccaaagttggctcgcctccattactccggtagcataaatgcgtggtccactaaagaacctttcagctggattaaggtcgatcttcttgcccccatgatcatccacggcattaagacacagggagcgaggcagaaattctcctccctctacatctcacagttcattattatgtatagtttggacggcaagaagtggcaaacttatagaggtaacagtactggaacactcatggtgttcttcggcaacgttgatagctctggcatcaaacacaacatctttaatcctcccataatagctcggtacatcagattgcatccgacccactacagcattaggagtacactccgaatggagcttatgggttgcgacttgaattcctgttcaatgccactcggaatggagtctaaagccatctctgatgcacagataaccgccagtagctactttacgaacatgtttgctacgtggtcaccctctaaggcaaggcttcatttgcaaggccggtctaatgcctggagacctcaggtgaacaacccgaaagaatggctccaggtggactttcagaagaccatgaaagtaacaggtgtcactactcagggagttaagtccttggataccagcatgtatgtgaaggagttccttatttcctcatcacaagatggccaccagtggaccctcttctttcagaatggtaaggtcaaagtgtttcagggcaatcaagacagcttcacacccgtggtgaacagtcttgatcctccactcttgacacgataccttcgaatccatccacagtcttgggttcaccagattgcattgcgcatggaagtacttggatgcgaggctcaggacctctac

SEQ ID NO: 604 - protein, 1457 aa, synthetic construct
  REGION 1..1457: note = Variant of human B-domain deleted Factor VIII
MQIELSTCFFLCLLRFCFSATRRYYLGAVELSWDYMQSDLGELPVDARFPPRVPKSFPFNTSQVYKKTLFVEFTDHLFNIAKPRPPWMGLLGPTIQAEVYDTVVITLKNMASHPVSLHAVGVSYWKASEGAEYDDQTSQREKEDDKVFPGGSHTYVWQVLKENGPMASDPLCLTYSYLSHVDLVKDLNSGLIGALLVCREGSLAKEKTQTLHKFILLFAVFDEGKSWHSETKNSLMQDRDAASARAWPKMHTVNGYVNRSLPGLIGCHRKSVYWHVIGMGTTPEVHSIFLEGHTFLVRNHRQASLEISPITFLTAQTLLMDLGQFLLFCHISSHQHDGMEAYVKVDSCPEEPQLRMKNNEEAEDYDDDLTDSEMDVVRFDDDNSPSFIQIRSVAKKHPKTWVHYIAAEEEDWDYAPLVLAPDDRSYKSQYLNNGPQRIGRKYKKVRFMAYTDETFKTREAIQHESGILGPLLYGEVGDTLLIIFKNQASRPYNIYPHGITDVRPLYSRRLPKGVKHLKDFPILPGEIFKYKWTVTVEDGPTKSDPRCLTRYYSSFVNMERDLASGLIGPLLICYKESVDQRGNQIMSDKRNVILFSVFDENRSWYLTENIQRFLPNPAGVQLEDPEFQASNIMHSINGYVFDSLQLSVCLHEVAYWYILSIGAQTDFLSVFFSGYTFKHKMVYEDTLTLFPFSGETVFMSMENPGLWILGCHNSDFRNRGMTALLKVSSCDENTGDYYEDSYEDISAYLLSKNNAIEPRSFSQNPPVLKRHQREITRTTLQSDQEEIDYDDTISVEMKKEDFDIYDEDENQSPRSFQKKTRHYFIAAVERLWDYGMSSSPHVLRNRAQSGSVPQFKKVVFQEFTDGSFTQPLYRGELNEHLGLLGPYIRAEVEDNIMVTFRNQASRPYSFYSSLISYEEDQRQGAEPRKNFVKPNETKTYFWKVQHHMAPTKDEFDCKAWAYFSDVDLEKDVHSGLIGPLLVCHTNTLNPAHGRQVTVQEFALFFTIFDETKSWYFTENMERNCRAPCNIQMEDPTFKENYRFHAINGYIMDTLPGLVMAQDQRIRWYLLSMGSNENIHSIHFSGHVFTVRKKEEYKMALYNLYPGVFETVEMLPSKAGIWRVECLIGEHLHAGMSTLFLVYSNKCQTPLGMASGHIRDFQITASGQYGQWAPKLARLHYSGSINAWSTKEPFSWIKVDLLAPMIIHGIKTQGARQKFSSLYISQFIIMYSLDGKKWQTYRGNSTGTLMVFFGNVDSSGIKHNIFNPPIIARYIRLHPTHYSIRSTLRMELMGCDLNSCSMPLGMESKAISDAQITASSYFTNMFATWSPSKARLHLQGRSNAWRPQVNNPKEWLQVDFQKTMKVTGVTTQGVKSLDTSMYVKEFLISSSQDGHQWTLFFQNGKVKVFQGNQDSFTPVVNSLDPPLLTRYLRIHPQSWVHQIALRMEVLGCEAQDLY

SEQ ID NO: 605 - DNA, 4371 bp, synthetic construct
  misc_feature 1..4371: note = Variant of human B-domain deleted Factor VIII
  source 1..4371: mol_type = other DNA
atgcagattgaactgtctacctgcttcttcctctgtttgctgaggttctgctttagcgccactagacggtactaccttggcgctgtggagctgtcctgggactatatgcagagtgatttgggagagcttcccgtcgacgcacgatttcctcctcgcgttccaaagtcatttcccttcaacacaagccaagtgtacaagaagacgctcttcgtcgaattcaccgatcacctgttcaatatcgccaaacccagaccaccatggatgggtcttttggggcctaccatacaagcggaggtgtatgacacagttgttatcactctcaagaacatggcttctcatccggtaagtcttcacgcagtgggcgtgtcctactggaaagcttcagaaggagccgagtatgatgatcagacatcccagagggagaaagaagacgacaaggtatttccaggtgggtctcatacctatgtgtggcaagtgctcaaagagaatggccctatggcaagcgatccgccgtgtttgacttacagctacctttcacacgttgacctcgtcaaggacctcaactccgggttgattggagccttgttggtatgcagggaaggatctcttgccaaagagaagacacagaccctccacaagtttatccttctctttgctgtgttcgatgagggcaaaagttggcatagcgaaacgaagaattccctcatgcaggatcgcgacgcagccagcgccagagcttggcccaagatgcacactgtgaacggatatgtcaataggtcacttcctggcttgattgggtgtcatcggaaaagtgtctactggcacgtgatcggaatggggacaacaccagaggtccactccatatttctcgaaggccataccttccttgttcgaaaccacagacaggcatccttggggatctctcccattacctttctcactgcccaaacgctccttatggacttgggtcagttccttctcttctgccatatcagctcacaccagcatgatggtatggaagcttatgtgaaagtccgcagttgtccggaggagccacagttgcgcatgaagaataatgaagaagcagaggattacgacgacgatctcaccgattctgagatggacgtggtgaggtttgatgacgacaactctccctccttcattcaaatccggagcgtggcgaagaaacaccccaagacttgggtccactatatagcggcggaagaggaggattgggattacgctcctcttgtattggcaccagatgaccgctcatacaaaagccagtacctcaacaacggaccgcagagaattggccggaagtataagaaagtgcgatttatggcctatacagacgaaacctttaagacaagggaggccatccagcatgagagtgggattttgggacctcttctttacggcgaagttggtgataccctcctcatcatcttcaagaatcaagcttctcgcccctataacatttacccacacgggatcactgacgttaggcctttgtatagcagaagacttcccaaaggcgtgaagcatctcaaagacttccccattttgccaggcgagatctttaagtacaaatggaccgtcacagtggaagatggaccgactaaatcagaccctcgatgccttacgcggtactattcctccttcgtgaatatggagagagatttggcaagcggactcataggaccactcctcatctgttacaaggaatctgtagaccagaggggtaaccagattatgagtgataaacgcaatgtgatcctttttagcgtcttcgacgagaaccggtcctggtacttgaccgagaatatacaaaggttccttcccaaccccgcaggcgttcagttggaagaccctgagtttcaggccagcaatattatgcactcaatcaacggctatgtgtttgatagtctccagctttctgtttgcctccatgaagtagcctattggtacatcttgtcaattggtgctcaaacagacttcctctccgtcttcttctccggctacacctttaagcacaagatggtgtatgaggacactctcacactctttccattttctggagaaaccgtgttcatgagcatggagaatccaggcctttggatcttgggttgccacaacagtgattttcgcaatcggggaatgactgctctcctcaaagtcagcagctgtgatgggaacaccggcgactattacgaagattcttacgaggacataagtgcctacttgttgtccaagaataacgccattgagcccagatcattctcccagaatcctcccgtgcttaaaaggcatcagcgcgaaatcaccagaactactcttcagtctgatcaagaggagattgactatgacgacaccataagcgtggaaatgaagaaagaggatttcgatatctatgacgaagatgagaaccagtctccgcggagctttcagaagaagacgcgacactacttcattgcagcagtcgaaaggctttgggactacggtatgtcatcatcccctcatgtgttgcgcaatagagctcagagtggaagtgttccacagttcaagaaagtcgtctttcaagagtttacagatggcagcttcacacagcctctctatcggggcgagcttaacgaacatttgggactccttggtccctatatccgagccgaagtggaggacaacattatggttacctttaggaatcaagcctctcgcccctacagcttctactcctccctcatcagttatgaggaggatcagagacaaggcgctgaaccacggaagaactttgtgaaaccgaatgagacgaagacctacttctggaaagtacagcaccacatggcccccacaaaagacgaattcgattgcaaagcatgggcgtatttttcagacgttgacttggagaaagatgtacattcaggacttattggtcctttgttggtgtgtcacactaacactctcaatccagcccatggcaggcaggtgacagtccaggaattcgctcttttctttaccatctttgatgagaccaagtcctggtacttcacggaaaacatggagcgcaattgcagagccccctgtaacatacagatggaggaccctacctttaaggaaaattatcggttccacgcaatcaacggatacattatggatacactccctggccttgtgatggctcaggaccaacgaatcaggtggtacctcctcagcatgggttctaatgagaacatacactccattcacttttcaggacatgtgttcactgtccggaagaaagaagagtataagatggccctctacaatttgtatccaggcgtgtttgagaccgttgaaatgcttccctctaaagctggcatctggagagtagagtgcttgatcggagaacatcttcacgcaggtatgagcaccttgttcctcgtgtacagcaacaaatgtcagaccccacttggcatggccagtggacacattcgcgactttcagatcacagcatctggccagtatggacaatgggccccaaagttggctcgcctccattactccggtagcataaatgcgtggtccactaaagaacctttcagctggattaaggtcgatcttcttgcccccatgatcatccacggcattaagacacagggagcgaggcagaaattctcctccctctacatctcacagttcattattatgtatagtttggacggcaagaagtggcaaacttatagaggtaacagtactggaacactcatggtgttcttcggcaacgttgatagctctggcatcaaacacaacatctttaatcctcccataatagctcggtacatcagattgcatccgacccactacagcattaggagtacactccgaatggagcttatgggttgcgacttgaattcctgttcaatgccactcggaatggagtctaaagccatctctgatgcacagataaccgccagtagctactttacgaacatgtttgctacgtggtcaccctctaaggcaaggcttcatttgcaaggccggtctaatgcctggagacctcaggtgaacaacccgaaagaatggctccaggtggactttcagaagaccatgaaagtaacaggtgtcactactcagggagttaagtccttggataccagcatgtatgtgaaggagttccttatttcctcatcacaagatggccaccagtggaccctcttctttcagaatggtaaggtcaaagtgtttcagggcaatcaagacagcttcacacccgtggtgaacagtcttgatcctccactcttgacacgataccttcgaatccatccacagtcttgggttcaccagattgcattgcgcatggaagtacttggatgcgaggctcaggacctctac

SEQ ID NO: 606 - protein, 1457 aa, synthetic construct
  REGION 1..1457: note = Variant of human B-domain deleted Factor VIII
MQIELSTCFFLCLLRFCFSATRRYYLGAVELSWDYMQSDLGELPVDARFPPRVPKSFPFNTSQVYKKTLFVEFTDHLFNIAKPRPPWMGLLGPTIQAEVYDTVVITLKNMASHPVSLHAVGVSYWKASEGAEYDDQTSQREKEDDKVFPGGSHTYVWQVLKENGPMASDPPCLTYSYLSHVDLVKDLNSGLIGALLVCREGSLAKEKTQTLHKFILLFAVFDEGKSWHSETKNSLMQDRDAASARAWPKMHTVNGYVNRSLPGLIGCHRKSVYWHVIGMGTTPEVHSIFLEGHTFLVRNHRQASLGISPITFLTAQTLLMDLGQFLLFCHISSHQHDGMEAYVKVRSCPEEPQLRMKNNEEAEDYDDDLTDSEMDVVRFDDDNSPSFIQIRSVAKKHPKTWVHYIAAEEEDWDYAPLVLAPDDRSYKSQYLNNGPQRIGRKYKKVRFMAYTDETFKTREAIQHESGILGPLLYGEVGDTLLIIFKNQASRPYNIYPHGITDVRPLYSRRLPKGVKHLKDFPILPGEIFKYKWTVTVEDGPTKSDPRCLTRYYSSFVNMERDLASGLIGPLLICYKESVDQRGNQIMSDKRNVILFSVFDENRSWYLTENIQRFLPNPAGVQLEDPEFQASNIMHSINGYVFDSLQLSVCLHEVAYWYILSIGAQTDFLSVFFSGYTFKHKMVYEDTLTLFPFSGETVFMSMENPGLWILGCHNSDFRNRGMTALLKVSSCDGNTGDYYEDSYEDISAYLLSKNNAIEPRSFSQNPPVLKRHQREITRTTLQSDQEEIDYDDTISVEMKKEDFDIYDEDENQSPRSFQKKTRHYFIAAVERLWDYGMSSSPHVLRNRAQSGSVPQFKKVVFQEFTDGSFTQPLYRGELNEHLGLLGPYIRAEVEDNIMVTFRNQASRPYSFYSSLISYEEDQRQGAEPRKNFVKPNETKTYFWKVQHHMAPTKDEFDCKAWAYFSDVDLEKDVHSGLIGPLLVCHTNTLNPAHGRQVTVQEFALFFTIFDETKSWYFTENMERNCRAPCNIQMEDPTFKENYRFHAINGYIMDTLPGLVMAQDQRIRWYLLSMGSNENIHSIHFSGHVFTVRKKEEYKMALYNLYPGVFETVEMLPSKAGIWRVECLIGEHLHAGMSTLFLVYSNKCQTPLGMASGHIRDFQITASGQYGQWAPKLARLHYSGSINAWSTKEPFSWIKVDLLAPMIIHGIKTQGARQKFSSLYISQFIIMYSLDGKKWQTYRGNSTGTLMVFFGNVDSSGIKHNIFNPPIIARYIRLHPTHYSIRSTLRMELMGCDLNSCSMPLGMESKAISDAQITASSYFTNMFATWSPSKARLHLQGRSNAWRPQVNNPKEWLQVDFQKTMKVTGVTTQGVKSLDTSMYVKEFLISSSQDGHQWTLFFQNGKVKVFQGNQDSFTPVVNSLDPPLLTRYLRIHPQSWVHQIALRMEVLGCEAQDLY

SEQ ID NO: 607 - DNA, 4371 bp, synthetic construct
  misc_feature 1..4371: note = Variant of human B-domain deleted Factor VIII
  source 1..4371: mol_type = other DNA
atgcagattgaactgtctacctgcttcttcctctgtttgctgaggttctgctttagcgccactagacggtactaccttggcgctgtggagctgtcctgggactatatgcagagtgatttgggagagcttcccgtcgacgcacgatttcctcctcgcgttccaaagtcatttcccttcaacacaagcgtggtgtacaagaagacgctcttcgtcgaattcaccgatcacctgttcaatatcgccaaacccagaccaccatggatgggtcttttggggcctaccatacaagcggaggtgtatgacacagttgttatcactctcaagaacatggcttctcatccggtaagtcttcacgcagtgggcgtgtcctactggaaagcttcagaaggagccgagtatgatgatcagacatcccagagggagaaagaagacgacaaggtatttccaggtgggtctcatacctatgtgtggcaagtgctcaaagagaatggccctatggcaagcgatccgccgtgtttgacttacagctacctttcacacgttgacctcgtcaaggacctcaactccgggttgattggagccttgttggtatgcagggaaggatctcttgccaaagagaagacacagaccctccacaagtttatccttctctttgctgtgttcgatgagggcaaaagttggcatagcgaaacgaagaattccctcatgcaggatcgcgacgcagccagcgccagagcttggcccaagatgcacactgtgaacggatatgtcaataggtcacttcctggcttgattgggtgtcatcggaaaagtgtctactggcacgtgatcggaatggggacaacaccagaggtccactccatatttctcgaaggccataccttccttgttcgaaaccacagacaggcatccttggagatctctcccattacctttctcactgcccaaacgctccttatggacttgggtcagttccttctcttctgccatatcagctcacaccagcatgatggtatggaagcttatgtgaaagtcgacagttgtccggaggagccacagttgcgcatgaagaataatgaagaagccgaggattacgacgacgatctcaccgattctgagatggacgtggtgaggtttgatgacgacaactctccctccttcattcaaatccggagcgtggcgaagaaacaccccaagacttgggtccactatatagcggcggaagaggaggattgggattacgctcctcttgtattggcaccagatgaccgctcatacaaaagccagtacctcaacaacggaccgcagagaattggccggaagtataagaaagtgcgatttatggcctatacagacgaaacctttaagacaagggaggccatccagcatgagagtgggattttgggacctcttctttacggcgaagttggtgataccctcctcatcatcttcaagaatcaagcttctcgcccctataacatttacccacacgggatcactgacgttaggcctttgtatagcagaagacttcccaaaggcgtgaagcatctcaaagacttccccattttgccaggcgagatctttaagtacaaatggaccgtcacagtggaagatggaccgactaaatcagaccctcgatgccttacgcggtactattcctccttcgtgaatatggagagagatttggcaagcggactcataggaccactcctcatctgttacaaggaatctgtagaccagaggggtaaccagattatgagtgataaacgcaatgtgatcctttttagcgtcttcgacgagaaccggtcctggtacttgaccgagaatatacaaaggttccttcccaaccccgcaggcgttcagttggaagaccctgagtttcaggccagcaatattatgcactcaatcaacggctatgtgtttgatagtctccagctttctgtttgcctccatgaagtagcctattggtacatcttgtcaattggtgctcaaacagacttcctctccgtcttcttctccggctacacctttaagcacaagatggtgtatgaggacactctcacactctttccattttctggagaaaccgtgttcatgagcatggagaatccaggcctttggatcttgggttgccacaacagtgattttcgcaatcggggaatgactgctctcctcaaagtcagcagctgtgataagaacacaggcgactattacgaagattcttacgaggacataagtgcctacttgttgtccaagaataacgccattgagcccagatcattctcccagaatcctcccgtgcttaaaaggcatcagcgcgaaatcaccagaactactcttcagtctgatcaagaggagattgactatgacgacaccataagcgtggaaatgaagaaggaggatttcgatatctatgacgaagatgagaaccagtctccgcggagctttcagaagaagacgcgacactacttcattgcagcagtcgaaaggctttgggactacggtatgtcatcatcccctcatgtgttgcgcaatagagctcagagtggaagtgttccacagttcaagaaagtcgtctttcaagagtttacagatggcagcttcacacagcctctctatcggggcgagcttaacgaacatttgggactccttggtccctatatccgagccgaagtggaggacaacattatggttacctttaggaatcaagcctctcgcccctacagcttctactcctccctcatcagttatgaggaggatcagagacaaggcgctgaaccacggaagaactttgtgaaaccgaatgagacgaagacctacttctggaaagtacagcaccacatggcccccacaaaagacgaattcgattgcaaagcatgggcgtatttttcagacgttgacttggagaaagatgtacattcaggacttattggtcctttgttggtgtgtcacactaacactctcaatccagcccatggcaggcaggtgacagtccaggaattcgctcttttctttaccatctttgatgagaccaagtcctggtacttcacggaaaacatggagcgcaattgcagagccccctgtaacatacagatggaggaccctacctttaaggaaaattatcggttccacgcaatcaacggatacattatggatacactccctggccttgtgatggctcaggaccaacgaatcaggtggtacctcctcagcatgggttctaatgagaacatacactccattcacttttcaggacatgtgttcactgtccggaagaaagaagagtataagatggccctctacaatttgtatccaggcgtgtttgagaccgttgaaatgcttccctctaaagctggcatctggagagtagagtgcttgatcggagaacatcttcacgcaggtatgagcaccttgttcctcgtgtacagcaacaaatgtcagaccccacttggcatggccagtggacacattcgcgactttcagatcacagcatctggccagtatggacaatgggccccaaagttggctcgcctccattactccggtagcataaatgcgtggtccactaaagaacctttcagctggattaaggtcgatcttcttgcccccatgatcatccacggcattaagacacagggagcgaggcagaaattctcctccctctacatctcacagttcattattatgtatagtttggacggcaagaagtggcaaacttatagaggtaacagtactggaacactcatggtgttcttcggcaacgttgatagctctggcatcaaacacaacatctttaatcctcccataatagctcggtacatcagattgcatccgacccactacagcattaggagtacactccgaatggagcttatgggttgcgacttgaattcctgttcaatgccactcggaatggagtctaaagccatctctgatgcacagataaccgccagtagctactttacgaacatgtttgctacgtggtcaccctctaaggcaaggcttcatttgcaaggccggtctaatgcctggagacctcaggtgaacaacccgaaagaatggctccaggtggactttcagaagaccatgaaagtaacaggtgtcactactcagggagttaagtccttggataccagcatgtatgtgaaggagttccttatttcctcatcacaagatggccaccagtggaccctcttctttcagaatggtaaggtcaaagtgtttcagggcaatcaagacagcttcacacccgtggtgaacagtcttgatcctccactcttgacacgataccttcgaatccatccacagtcttgggttcaccagattgcattgcgcatggaagtacttggatgcgaggctcaggacctctac

SEQ ID NO: 608 - protein, 1457 aa, synthetic construct
  REGION 1..1457: note = Variant of human B-domain deleted Factor VIII
MQIELSTCFFLCLLRFCFSATRRYYLGAVELSWDYMQSDLGELPVDARFPPRVPKSFPFNTSVVYKKTLFVEFTDHLFNIAKPRPPWMGLLGPTIQAEVYDTVVITLKNMASHPVSLHAVGVSYWKASEGAEYDDQTSQREKEDDKVFPGGSHTYVWQVLKENGPMASDPPCLTYSYLSHVDLVKDLNSGLIGALLVCREGSLAKEKTQTLHKFILLFAVFDEGKSWHSETKNSLMQDRDAASARAWPKMHTVNGYVNRSLPGLIGCHRKSVYWHVIGMGTTPEVHSIFLEGHTFLVRNHRQASLEISPITFLTAQTLLMDLGQFLLFCHISSHQHDGMEAYVKVDSCPEEPQLRMKNNEEAEDYDDDLTDSEMDVVRFDDDNSPSFIQIRSVAKKHPKTWVHYIAAEEEDWDYAPLVLAPDDRSYKSQYLNNGPQRIGRKYKKVRFMAYTDETFKTREAIQHESGILGPLLYGEVGDTLLIIFKNQASRPYNIYPHGITDVRPLYSRRLPKGVKHLKDFPILPGEIFKYKWTVTVEDGPTKSDPRCLTRYYSSFVNMERDLASGLIGPLLICYKESVDQRGNQIMSDKRNVILFSVFDENRSWYLTENIQRFLPNPAGVQLEDPEFQASNIMHSINGYVFDSLQLSVCLHEVAYWYILSIGAQTDFLSVFFSGYTFKHKMVYEDTLTLFPFSGETVFMSMENPGLWILGCHNSDFRNRGMTALLKVSSCDKNTGDYYEDSYEDISAYLLSKNNAIEPRSFSQNPPVLKRHQREITRTTLQSDQEEIDYDDTISVEMKKEDFDIYDEDENQSPRSFQKKTRHYFIAAVERLWDYGMSSSPHVLRNRAQSGSVPQFKKVVFQEFTDGSFTQPLYRGELNEHLGLLGPYIRAEVEDNIMVTFRNQASRPYSFYSSLISYEEDQRQGAEPRKNFVKPNETKTYFWKVQHHMAPTKDEFDCKAWAYFSDVDLEKDVHSGLIGPLLVCHTNTLNPAHGRQVTVQEFALFFTIFDETKSWYFTENMERNCRAPCNIQMEDPTFKENYRFHAINGYIMDTLPGLVMAQDQRIRWYLLSMGSNENIHSIHFSGHVFTVRKKEEYKMALYNLYPGVFETVEMLPSKAGIWRVECLIGEHLHAGMSTLFLVYSNKCQTPLGMASGHIRDFQITASGQYGQWAPKLARLHYSGSINAWSTKEPFSWIKVDLLAPMIIHGIKTQGARQKFSSLYISQFIIMYSLDGKKWQTYRGNSTGTLMVFFGNVDSSGIKHNIFNPPIIARYIRLHPTHYSIRSTLRMELMGCDLNSCSMPLGMESKAISDAQITASSYFTNMFATWSPSKARLHLQGRSNAWRPQVNNPKEWLQVDFQKTMKVTGVTTQGVKSLDTSMYVKEFLISSSQDGHQWTLFFQNGKVKVFQGNQDSFTPVVNSLDPPLLTRYLRIHPQSWVHQIALRMEVLGCEAQDLY

SEQ ID NO: 609 - DNA, 4371 bp, synthetic construct
  misc_feature 1..4371: note = Variant of human B-domain deleted Factor VIII
  source 1..4371: mol_type = other DNA
atgcagattgaactgtctacctgcttcttcctctgtttgctgaggttctgctttagcgccactagacggtactaccttggcgctgtggagctgtcctgggactatatgcagagtgatttgggagagcttcccgtcgacgcacgatttcctcctcgcgttccaaagtcatttcccttcaacacaagcgtggtgtacaagaagacgctcttcgtcgaattcaccgatcacctgttcaatatcgccaaacccagaccaccatggatgggtcttttggggcctaccatacaagcggaggtgtatgacacagttgttatcactctcaagaacatggcttctcatccggtaagtcttcacgcagtgggcgtgtcctactggaaagcttcagaaggagccgagtatgatgatcagacatcccagagggagaaagaagacgacaaggtatttccaggtgggtctcatacctatgtgtggcaagtgctcaaagagaatggccctatggcaagcgatccgccgtgtttgacttacagctacctttcacacgttgacctcgtcaaggacctcaactccgggttgattggagccttgttggtatgcagggaaggatctcttgccaaagagaagacacagaccctccacaagtttatccttctctttgctgtgttcgatgagggcaaaagttggcatagcgaaacgaagaattccctcatgcaggatcgcgacgcagccagcgccagagcttggcccaagatgcacactgtgaacggatatgtcaataggtcacttcctggcttgattgggtgtcatcggaaaagtgtctactggcacgtgatcggaatggggacaacaccagaggtccactccatatttctcgaaggccataccttccttgttcgaaaccacagacaggcatccttggagatctctcccattacctttctcactgcccaaacgctccttatggacttgggtcagttccttctcttctgccatatcagctcacaccagcatgatggtatggaagcttatgtgaaagtcgacagttgtccggaggagccacagttgcgcatgaagaataatgaagaagccgaggattacgacgacgatctcaccgattctgagatggacgtggtgaggtttgatgacgacaactctccctccttcattcaaatccggagcgtggcgaagaaacaccccaagacttgggtccactatatagcggcggaagaggaggattgggattacgctcctcttgtattggcaccagatgaccgctcatacaaaagccagtacctcaacaacggaccgcagagaattggccggaagtataagaaagtgcgatttatggcctatacagacgaaacctttaagacaagggaggccatccagcatgagagtgggattttgggacctcttctttacggcgaagttggtgataccctcctcatcatcttcaagaatcaagcttctcgcccctataacatttacccacacgggatcactgacgttaggcctttgtatagcagaagacttcccaaaggcgtgaagcatctcaaagacttccccattttgccaggcgagatctttaagtacaaatggaccgtcacagtggaagatggaccgactaaatcagaccctcgatgccttacgcggtactattcctccttcgtgaatatggagagagatttggcaagcggactcataggaccactcctcatctgttacaaggaatctgtagaccagaggggtaaccagattatgagtgataaacgcaatgtgatcctttttagcgtcttcgacgagaaccggtcctggtacttgaccgagaatatacaaaggttccttcccaaccccgcaggcgttcagttggaagaccctgagtttcaggccagcaatattatgcactcaatcaacggctatgtgtttgatagtctccagctttctgtttgcctccatgaagtagcctattggtacatcttgtcaattggtgctcaaacagacttcctctccgtcttcttctccggctacacctttaagcacaagatggtgtatgaggacactctcacactctttccattttctggagaaaccgtgttcatgagcatggagaatccaggcctttggatcttgggttgccacaacagtgattttcgcaatcggggaatgactgctctcctcaaagtcagcagctgtgataagaacacaggcgactattacgaagattcttacgaggacataagtgcctacttgttgtccaagaataacgccattgagcccagatcattctcccagaatcctcccgtgcttaaaaggcatcagcgcgaaatcaccagaactactcttcagtctgatcaagaggagattgactatgacgacaccataagcgtggaaatgaagaaagaggatttcgatatctatgacgaagatgagaaccagtctccgcggagctttcagaagaagacgcgacactacttcattgcagcagtcgaaaggctttgggactacggtatgtcatcatcccctcatgtgttgcgcaatagagctcagagtggaagtgttccacagttcaagaaagtcgtctttcaagagtttacagatggcagcttcacacagcctctctatcggggcgagcttaacgaacatttgggactccttggtccctatatccgagccgaagtggaggacaacattatggttacctttaggaatcaagcctctcgcccctacagcttctactcctccctcatcagttatgaggaggatcagagacaaggcgctgaaccacggaagaactttgtgaaaccgaatgagacgaagacctacttctggaaagtacagcaccacatggcccccacaaaagacgaattcgattgcaaagcatgggcgtatttttcagacgttgacttggagaaagatgtacattcaggacttattggtcctttgttggtgtgtcacactaacactctcaatccagcccatggcaggcaggtgacagtccaggaattcgctcttttctttaccatctttgatgagaccaagtcctggtacttcacggaaaacatggagcgcaattgcagagccccctgtaacatacagatggaggaccctacctttaaggaaaattatcggttccacgcaatcaacggatacattatggatacactccctggccttgtgatggctcaggaccaacgaatcaggtggtacctcctcagcatgggttctaatgagaacatacactccattcacttttcaggacatgtgttcactgtccggaagaaagaagagtataagatggccctctacaatttgtatccaggcgtgtttgagaccgttgaaatgcttccctctaaagctggcatctggagagtagagtgcttgatcggagaacatcttcacgcaggtatgagcaccttgttcctcgtgtacagcaacaaatgtcagaccccacttggcatggccagtggacacattcgcgactttcagatcacagcatctggccagtatggacaatgggccccaaagttggctcgcctccattactccggtagcataaatgcgtggtccactaaagaacctttcagctggattaaggtcgatcttcttgcccccatgatcatccacggcattaagacacagggagcgaggcagaaattctcctccctctacatctcacagttcattattatgtatagtttggacggcaagaagtggcaaacttatagaggtaacagtactggaacactcatggtgttcttcggcaacgttgatagctctggcatcaaacacaacatctttaatcctcccataatagctcggtacatcagattgcatccgacccactacagcattaggagtacactccgaatggagcttatgggttgcgacttgaattcctgttcaatgccactcggaatggagtctaaagccatctctgatgcacagataaccgccagtagctactttacgaacatgtttgctacgtggtcaccctctaaggcaaggcttcatttgcaaggccggtctaatgcctggagacctcaggtgaacaacccgaaagaatggctccaggtggactttcagaagaccatgaaagtaacaggtgtcactactcagggagttaagtccttggataccagcatgtatgtgaaggagttccttatttcctcatcacaagatggccaccagtggaccctcttctttcagaatggtaaggtcaaagtgtttcagggcaatcaagacagcttcacacccgtggtgaacagtatcgatcctccactcttgacacgataccttcgaatccatccacagtcttgggttcaccagattgcattgcgcatggaagtacttggatgcgaggctcaggacctctac

SEQ ID NO: 610 - protein, 1457 aa, synthetic construct
  REGION 1..1457: note = Variant of human B-domain deleted Factor VIII
MQIELSTCFFLCLLRFCFSATRRYYLGAVELSWDYMQSDLGELPVDARFPPRVPKSFPFNTSVVYKKTLFVEFTDHLFNIAKPRPPWMGLLGPTIQAEVYDTVVITLKNMASHPVSLHAVGVSYWKASEGAEYDDQTSQREKEDDKVFPGGSHTYVWQVLKENGPMASDPPCLTYSYLSHVDLVKDLNSGLIGALLVCREGSLAKEKTQTLHKFILLFAVFDEGKSWHSETKNSLMQDRDAASARAWPKMHTVNGYVNRSLPGLIGCHRKSVYWHVIGMGTTPEVHSIFLEGHTFLVRNHRQASLEISPITFLTAQTLLMDLGQFLLFCHISSHQHDGMEAYVKVDSCPEEPQLRMKNNEEAEDYDDDLTDSEMDVVRFDDDNSPSFIQIRSVAKKHPKTWVHYIAAEEEDWDYAPLVLAPDDRSYKSQYLNNGPQRIGRKYKKVRFMAYTDETFKTREAIQHESGILGPLLYGEVGDTLLIIFKNQASRPYNIYPHGITDVRPLYSRRLPKGVKHLKDFPILPGEIFKYKWTVTVEDGPTKSDPRCLTRYYSSFVNMERDLASGLIGPLLICYKESVDQRGNQIMSDKRNVILFSVFDENRSWYLTENIQRFLPNPAGVQLEDPEFQASNIMHSINGYVFDSLQLSVCLHEVAYWYILSIGAQTDFLSVFFSGYTFKHKMVYEDTLTLFPFSGETVFMSMENPGLWILGCHNSDFRNRGMTALLKVSSCDKNTGDYYEDSYEDISAYLLSKNNAIEPRSFSQNPPVLKRHQREITRTTLQSDQEEIDYDDTISVEMKKEDFDIYDEDENQSPRSFQKKTRHYFIAAVERLWDYGMSSSPHVLRNRAQSGSVPQFKKVVFQEFTDGSFTQPLYRGELNEHLGLLGPYIRAEVEDNIMVTFRNQASRPYSFYSSLISYEEDQRQGAEPRKNFVKPNETKTYFWKVQHHMAPTKDEFDCKAWAYFSDVDLEKDVHSGLIGPLLVCHTNTLNPAHGRQVTVQEFALFFTIFDETKSWYFTENMERNCRAPCNIQMEDPTFKENYRFHAINGYIMDTLPGLVMAQDQRIRWYLLSMGSNENIHSIHFSGHVFTVRKKEEYKMALYNLYPGVFETVEMLPSKAGIWRVECLIGEHLHAGMSTLFLVYSNKCQTPLGMASGHIRDFQITASGQYGQWAPKLARLHYSGSINAWSTKEPFSWIKVDLLAPMIIHGIKTQGARQKFSSLYISQFIIMYSLDGKKWQTYRGNSTGTLMVFFGNVDSSGIKHNIFNPPIIARYIRLHPTHYSIRSTLRMELMGCDLNSCSMPLGMESKAISDAQITASSYFTNMFATWSPSKARLHLQGRSNAWRPQVNNPKEWLQVDFQKTMKVTGVTTQGVKSLDTSMYVKEFLISSSQDGHQWTLFFQNGKVKVFQGNQDSFTPVVNSIDPPLLTRYLRIHPQSWVHQIALRMEVLGCEAQDLY

SEQ ID NO: 611 - DNA, 4371 bp, synthetic construct
  misc_feature 1..4371: note = Variant of human B-domain deleted Factor VIII
  source 1..4371: mol_type = other DNA
atgcagattgaactgtctacctgcttcttcctctgtttgctgaggttctgctttagcgccactagacggtactaccttggcgctgtggagctgtcctgggactatatgcagagtgatttgggagagcttcccgtcgacgcacgatttcctcctcgcgttccaaagtcatttcccttcaacacaagccaagtgtacaagaagacgctcttcgtcgaattcaccgatcacctgttcaatatcgccaaacccagaccaccatggatgggtcttttggggcctaccatacaagcggaggtgtatgacacagttgttatcactctcaagaacatggcttctcatccggtaagtcttcacgcagtgggcgtgtcctactggaaagcttcagaaggagccgagtatgatgatcagacatcccagagggagaaagaagacgacaaggtatttccaggtgggtctcatacctatgtgtggcaagtgctcaaagagaatggccctatggcaagcgatccgctctgtttgacttacagctacctttcacacgttgacctcgtcaaggacctcaactccgggttgattggagccttgttggtatgcagggaaggatctcttgccaaagagaagacacagaccctccacaagtttatccttctctttgctgtgttcgatgagggcaaaagttggcatagcgaaacgaagaattccctcatgcaggatcgcgacgcagccagcgccagagcttggcccaagatgcacactgtgaacggatatgtcaataggtcacttcctggcttgattgggtgtcatcggaaaagtgtctactggcacgtgatcggaatggggacaacaccagaggtccactccatatttctcgaaggccataccttccttgttcgaaaccacagacaggcatccttggagatctctcccattacctttctcactgcccaaacgctccttatggacttgggtcagttccttctcttctgccatatcagctcacaccagcatgatggtatggaagcttatgtgaaagtcgacagttgtccggaggagccacagttgcgcatgaagaataatgaagaaccagaggattacgacgacgatctcaccgattctgagatggacgtggtgaggtttgatgacgacaactctccctccttcattcaaatccggagcgtggcgaagaaacaccccaagacttgggtccactatatagcggcggaagaggaggattgggattacgctcctcttgtattggcaccagatgaccgctcatacaaaagccagtacctcaacaacggaccgcagagaattggccggaagtataagaaagtgcgatttatggcctatacagacgaaacctttaagacaagggaggccatccagcatgagagtgggattttgggacctcttctttacggcgaagttggtgataccctcctcatcatcttcaagaatcaagcttctcgcccctataacatttacccacacgggatcactgacgttaggcctttgtatagcagaagacttcccaaaggcgtgaagcatctcaaagacttccccattttgccaggcgagatctttaagtacaaatggaccgtcacagtggaagatggaccgactaaatcagaccctcgatgccttacgcggtactattcctccttcgtgaatatggagagagatttggcaagcggactcataggaccactcctcatctgttacaaggaatctgtagaccagaggggtaaccagattatgagtgataaacgcaatgtgatcctttttagcgtcttcgacgagaaccggtcctggtacttgaccgagaatatacaaaggttccttcccaaccccgcaggcgttcagttggaagaccctgagtttcaggccagcaatattatgcactcaatcaacggctatgtgtttgatagtctccagctttctgtttgcctccatgaagtagcctattggtacatcttgtcaattggtgctcaaacagacttcctctccgtcttcttctccggctacacctttaagcacaagatggtgtatgaggacactctcacactctttccattttctggagaaaccgtgttcatgagcatggagaatccaggcctttggatcttgggttgccacaacagtgattttcgcaatcggggaatgactgctctcctcaaagtcagcagctgtgatgggaacaccggcgactattacgaagattcttacgaggacataagtgcctacttgttgtccaagaataacgccattgagcccagatcattctcccagaatcctcccgtgcttaaaaggcatcagcgcgaaatcaccagaactactcttcagtctgatcaagaggagattgactatgacgacaccataagcgtggaaatgaagcgtgaggatttcgatatctatgacgaagatgagaaccagtctccgcggagctttcagaagaagacgcgacactacttcattgcagcagtcgaaaggctttgggactacggtatgtcatcatcccctcatgtgttgcgcaatagagctcagagtggaagtgttccacagttcaagaaagtcgtctttcaagagtttacagatggcagcttcacacagcctctctatcggggcgagcttaacgaacatttgggactccttggtccctatatccgagccgaagtggaggacaacattatggttacctttaggaatcaagcctctcgcccctacagcttctactcctccctcatcagttatgaggaggatcagagacaaggcgctgaaccacggaagaactttgtgaaaccgaatgagacgaagacctacttctggaaagtacagcaccacatggcccccacaaaagacgaattcgattgcaaagcatgggcgtatttttcagacgttgacttggagaaagatgtacattcaggacttattggtcctttgttggtgtgtcacactaacactctcaatccagcccatggcaggcaggtgacagtccaggaattcgctcttttctttaccatctttgatgagaccaagtcctggtacttcacggaaaacatggagcgcaattgcagagccccctgtaacatacagatggaggaccctacctttaaggaaaattatcggttccacgcaatcaacggatacattatggatacactccctggccttgtgatggctcaggaccaacgaatcaggtggtacctcctcagcatgggttctaatgagaacatacactccattcacttttcaggacatgtgttcactgtccggaagaaagaagagtataagatggccctctacaatttgtatccaggcgtgtttgagaccgttgaaatgcttccctctaaagctggcatctggagagtagagtgcttgatcggagaacatcttcacgcaggtatgagcaccttgttcctcgtgtacagcaacaaatgtcagaccccacttggcatggccagtggacacattcgcgactttcagatcacagcatctggccagtatggacaatgggccccaaagttggctcgcctccattactccggtagcataaatgcgtggtccactaaagaacctttcagctggattaaggtcgatcttcttgcccccatgatcatccacggcattaagacacagggagcgaggcagaaattctcctccctctacatctcacagttcattattatgtatagtttggacggcaagaagtggcaaacttatagaggtaacagtactggaacagatatggtgttcttcggcaacgttgatagctctggcatcaaacacaacatctttaatcctcccataatagctcggtacatcagattgcatccgacccactacagcattaggagtacactccgaatggagcttatgggttgcgacttgaattcctgttcaatgccactcggaatggagtctaaagccatctctgatgcacagataaccgccagtagctactttacgaacatgtttgctacgtggtcaccctctaaggcaaggcttcatttgcaaggccggtctaatgcctggagacctcaggtgaacaacccgaaagaatggctccaggtggactttcagaagaccatgaaagtaacaggtgtcactactcagggagttaagtccttggataccagcatgtatgtgaaggagttccttatttcctcatcacaagatggccaccagtggaccctcttctttcagaatggtaaggtcaaagtgtttcagggcaatcaagacagcttcacacccgtggtgaacagtcttgatcctccactcttgacacgataccttcgaatccatccacagtcttgggttcaccagattgcattgcgcatggaagtacttggatgcgaggctcaggacctctac

SEQ ID NO: 612 - protein, 1457 aa, synthetic construct
  REGION 1..1457: note = Variant of human B-domain deleted Factor VIII
MQIELSTCFFLCLLRFCFSATRRYYLGAVELSWDYMQSDLGELPVDARFPPRVPKSFPFNTSQVYKKTLFVEFTDHLFNIAKPRPPWMGLLGPTIQAEVYDTVVITLKNMASHPVSLHAVGVSYWKASEGAEYDDQTSQREKEDDKVFPGGSHTYVWQVLKENGPMASDPLCLTYSYLSHVDLVKDLNSGLIGALLVCREGSLAKEKTQTLHKFILLFAVFDEGKSWHSETKNSLMQDRDAASARAWPKMHTVNGYVNRSLPGLIGCHRKSVYWHVIGMGTTPEVHSIFLEGHTFLVRNHRQASLEISPITFLTAQTLLMDLGQFLLFCHISSHQHDGMEAYVKVDSCPEEPQLRMKNNEEPEDYDDDLTDSEMDVVRFDDDNSPSFIQIRSVAKKHPKTWVHYIAAEEEDWDYAPLVLAPDDRSYKSQYLNNGPQRIGRKYKKVRFMAYTDETFKTREAIQHESGILGPLLYGEVGDTLLIIFKNQASRPYNIYPHGITDVRPLYSRRLPKGVKHLKDFPILPGEIFKYKWTVTVEDGPTKSDPRCLTRYYSSFVNMERDLASGLIGPLLICYKESVDQRGNQIMSDKRNVILFSVFDENRSWYLTENIQRFLPNPAGVQLEDPEFQASNIMHSINGYVFDSLQLSVCLHEVAYWYILSIGAQTDFLSVFFSGYTFKHKMVYEDTLTLFPFSGETVFMSMENPGLWILGCHNSDFRNRGMTALLKVSSCDGNTGDYYEDSYEDISAYLLSKNNAIEPRSFSQNPPVLKRHQREITRTTLQSDQEEIDYDDTISVEMKREDFDIYDEDENQSPRSFQKKTRHYFIAAVERLWDYGMSSSPHVLRNRAQSGSVPQFKKVVFQEFTDGSFTQPLYRGELNEHLGLLGPYIRAEVEDNIMVTFRNQASRPYSFYSSLISYEEDQRQGAEPRKNFVKPNETKTYFWKVQHHMAPTKDEFDCKAWAYFSDVDLEKDVHSGLIGPLLVCHTNTLNPAHGRQVTVQEFALFFTIFDETKSWYFTENMERNCRAPCNIQMEDPTFKENYRFHAINGYIMDTLPGLVMAQDQRIRWYLLSMGSNENIHSIHFSGHVFTVRKKEEYKMALYNLYPGVFETVEMLPSKAGIWRVECLIGEHLHAGMSTLFLVYSNKCQTPLGMASGHIRDFQITASGQYGQWAPKLARLHYSGSINAWSTKEPFSWIKVDLLAPMIIHGIKTQGARQKFSSLYISQFIIMYSLDGKKWQTYRGNSTGTDMVFFGNVDSSGIKHNIFNPPIIARYIRLHPTHYSIRSTLRMELMGCDLNSCSMPLGMESKAISDAQITASSYFTNMFATWSPSKARLHLQGRSNAWRPQVNNPKEWLQVDFQKTMKVTGVTTQGVKSLDTSMYVKEFLISSSQDGHQWTLFFQNGKVKVFQGNQDSFTPVVNSLDPPLLTRYLRIHPQSWVHQIALRMEVLGCEAQDLY

SEQ ID NO: 613 - DNA, 4371 bp, synthetic construct
  misc_feature 1..4371: note = Variant of human B-domain deleted Factor VIII
  source 1..4371: mol_type = other DNA
atgcagattgaactgtctacctgcttcttcctctgtttgctgaggttctgctttagcgccactagacggtactaccttggcgctgtggagctgtcctgggactatatgcagagtgatttgggagagcttcccgtcgacgcacgatttcctcctcgcgttccaaagtcatttcccttcaacacaagcgttgtgtacaagaagacgctcttcgtcgaattcaccgatcacctgttcaatatcgccaaacccagaccaccatggatgggtcttttggggcctaccatacaagcggaggtgtatgacacagttgttatcactctcaagaacatggcttctcatccggtaagtcttcacgcagtgggcgtgtcctactggaaagcttcagaaggagccgagtatgatgatcagacatcccagagggagaaagaagacgacaaggtatttccaggtgggtctcatacctatgtgtggcaagtgctcaaagagaatggccctatggcaagcgatccgctctgtttgacttacagctacctttcacacgttgacctcgtcaaggacctcaactccgggttgattggagccttgttggtatgcagggaaggatctcttgccaaagagaagacacagaccctccacaagtttatccttctctttgctgtgttcgatgagggcaaaagttggcatagcgaaacgaagaattccctcatgcaggatcgcgacgcagccagcgccagagcttggcccaagatgcacactgtgaacggatatgtcaataggtcacttcctggcttgattgggtgtcatcggaaaagtgtctactggcacgtgatcggaatggggacaacaccagaggtccactccatatttctcgaaggccataccttccttgttcgaaaccacagacaggcatccttggagatctctcccattacctttctcactgcccaaacgctccttatggacttgggtcagttccttctcttctgccatatcagctcacaccagcatgatggtatggaagcttatgtgaaagtcgacagttgtccggaggagccacagttgcgcatgaagaataatgaagaagccgaggattacgacgacgatctcaccgattctgagatggacgtggtgaggtttgatgacgacaactctccctccttcattcaaatccggagcgtggcgaagaaacaccccaagacttgggtccactatatagcggcggaagaggaggattgggattacgctcctcttgtattggcaccagatgaccgctcatacaaaagccagtacctcaacaacggaccgcagagaattggccggaagtataagaaagtgcgatttatggcctatacagacgaaacctttaagacaagggaggccatccagcatgagagtgggattttgggacctcttctttacggcgaagttggtgataccctcctcatcatcttcaagaatcaagcttctcgcccctataacatttacccacacgggatcactgacgttaggcctttgtatagcagaagacttcccaaaggcgtgaagcatctcaaagacttccccattttgccaggcgagatctttaagtacaaatggaccgtcacagtggaagatggaccgactaaatcagaccctcgatgccttacgcggtactattcctccttcgtgaatatggagagagatttggcaagcggactcataggaccactcctcatctgttacaaggaatctgtagaccagaggggtaaccagattatgagtgataaacgcaatgtgatcctttttagcgtcttcgacgagaaccggtcctggtacttgaccgagaatatacaaaggttccttcccaaccccgcaggcgttcagttggaagaccctgagtttcaggccagcaatattatgcactcaatcaacggctatgtgtttgatagtctccagctttctgtttgcctccatgaagtagcctattggtacatcttgtcaattggtgctcaaacagacttcctctccgtcttcttctccggctacacctttaagcacaagatggtgtatgaggacactctcacactctttccattttctggagaaaccgtgttcatgagcatggagaatccaggcctttggatcttgggttgccacaacagtgattttcgcaatcggggaatgactgctctcctcaaagtcagcagctgtgataagaacacaggcgactattacgaagattcttacgaggacataagtgcctacttgttgtccaagaataacgccattgagcccagatcattctcccagaatcctcccgtgcttaaaaggcatcagcgcgaaatcaccagaactactcttcagtctgatcaagaggagattgactatgacgacaccataagcgtggaaatgaagaaggaggatttcgatatctatgacgaagatgagaaccagtctccgcggagctttcagaagaagacgcgacactacttcattgcagcagtcgaaaggctttgggactacggtatgtcatcatcccctcatgtgttgcgcaatagagctcagagtggaagtgttccacagttcaagaaagtcgtctttcaagagtttacagatggcagcttcacacagcctctctatcggggcgagcttaacgaacatttgggactccttggtccctatatccgagccgaagtggaggacaacattatggttacctttaggaatcaagcctctcgcccctacagcttctactcctccctcatcagttatgaggaggatcagagacaaggcgctgaaccacggaagaactttgtgaaaccgaatgagacgaagacctacttctggaaagtacagcaccacatggcccccacaaaagacgaattcgattgcaaagcatgggcgtatttttcagacgttgacttggagaaagatgtacattcaggacttattggtcctttgttggtgtgtcacactaacactctcaatccagcccatggcaggcaggtgacagtccgtgaattcgctcttttctttaccatctttgatgagaccaagtcctggtacttcacggaaaacatggagcgcaattgcagagccccctgtaacatacagatggaggaccctacctttaaggaaaattatcggttccacgcaatcaacggatacattatggatacactccctggccttgtgatggctcaggaccaacgaatcaggtggtacctcctcagcatgggttctaatgagaacatacactccattcacttttcaggacatgtgttcactgtccggaagaaagaagagtataagatggccctctacaatttgtatccaggcgtgtttgagaccgttgaaatgcttccctctaaagctggcatctggagagtagagtgcttgatcggagaacatcttcacgcaggtatgagcaccttgttcctcgtgtacagcaacaaatgtcagaacccacttggcatggccagtggacacattcgcgactttcagatcacagcatctggccagtatggacaatgggccccaaagttggctcgcctccattactccggtagcataaatgcgtggtccactaaagaacctttcagctggattaaggtcgatcttcttgcccccatgatcatccacggcattaagacacagggagcgaggcagaaattctcctccctctacatctcacagttcattattatgtatagtttggacggcaagaagtggcaaacttatagaggtaacagtactggaacactcatggtgttcttcggcaacgttgatagctctggcatcaaacacaacatctttaatcctcccataatagctcggtacatcagattgcatccgacccactacagcattaggagtacactccgaatggagcttatgggttgcgacttgaattcctgttcaatgccactcggaatggagtctaaagccatctctgatgcacagataaccgccagtagctactttacgaacatgtttgctacgtggtcaccctctaaggcaaggcttcatttgcaaggccggtctaatgcctggagacctcaggtgaacaacccgaaagaatggctccaggtggactttcagaagaccatgaaagtaacaggtgtcactactcagggagttaagtccttggataccagcatgtatgtgaaggagttccttatttcctcatcacaagatggccaccagtggaccctcttctttcagaatggtaaggtcaaagtgtttcagggcaatcaagacagcttcacacccgtggtgaacagtatcgatcctccactcttgacacgataccttcgaatccatccacagtcttgggttcaccagattgcattgcgcatggaagtacttggatgcgaggctcaggacctctac

SEQ ID NO: 614 - protein, 1457 aa, synthetic construct
  REGION 1..1457: note = Variant of human B-domain deleted Factor VIII
MQIELSTCFFLCLLRFCFSATRRYYLGAVELSWDYMQSDLGELPVDARFPPRVPKSFPFNTSVVYKKTLFVEFTDHLFNIAKPRPPWMGLLGPTIQAEVYDTVVITLKNMASHPVSLHAVGVSYWKASEGAEYDDQTSQREKEDDKVFPGGSHTYVWQVLKENGPMASDPLCLTYSYLSHVDLVKDLNSGLIGALLVCREGSLAKEKTQTLHKFILLFAVFDEGKSWHSETKNSLMQDRDAASARAWPKMHTVNGYVNRSLPGLIGCHRKSVYWHVIGMGTTPEVHSIFLEGHTFLVRNHRQASLEISPITFLTAQTLLMDLGQFLLFCHISSHQHDGMEAYVKVDSCPEEPQLRMKNNEEAEDYDDDLTDSEMDVVRFDDDNSPSFIQIRSVAKKHPKTWVHYIAAEEEDWDYAPLVLAPDDRSYKSQYLNNGPQRIGRKYKKVRFMAYTDETFKTREAIQHESGILGPLLYGEVGDTLLIIFKNQASRPYNIYPHGITDVRPLYSRRLPKGVKHLKDFPILPGEIFKYKWTVTVEDGPTKSDPRCLTRYYSSFVNMERDLASGLIGPLLICYKESVDQRGNQIMSDKRNVILFSVFDENRSWYLTENIQRFLPNPAGVQLEDPEFQASNIMHSINGYVFDSLQLSVCLHEVAYWYILSIGAQTDFLSVFFSGYTFKHKMVYEDTLTLFPFSGETVFMSMENPGLWILGCHNSDFRNRGMTALLKVSSCDKNTGDYYEDSYEDISAYLLSKNNAIEPRSFSQNPPVLKRHQREITRTTLQSDQEEIDYDDTISVEMKKEDFDIYDEDENQSPRSFQKKTRHYFIAAVERLWDYGMSSSPHVLRNRAQSGSVPQFKKVVFQEFTDGSFTQPLYRGELNEHLGLLGPYIRAEVEDNIMVTFRNQASRPYSFYSSLISYEEDQRQGAEPRKNFVKPNETKTYFWKVQHHMAPTKDEFDCKAWAYFSDVDLEKDVHSGLIGPLLVCHTNTLNPAHGRQVTVREFALFFTIFDETKSWYFTENMERNCRAPCNIQMEDPTFKENYRFHAINGYIMDTLPGLVMAQDQRIRWYLLSMGSNENIHSIHFSGHVFTVRKKEEYKMALYNLYPGVFETVEMLPSKAGIWRVECLIGEHLHAGMSTLFLVYSNKCQNPLGMASGHIRDFQITASGQYGQWAPKLARLHYSGSINAWSTKEPFSWIKVDLLAPMIIHGIKTQGARQKFSSLYISQFIIMYSLDGKKWQTYRGNSTGTLMVFFGNVDSSGIKHNIFNPPIIARYIRLHPTHYSIRSTLRMELMGCDLNSCSMPLGMESKAISDAQITASSYFTNMFATWSPSKARLHLQGRSNAWRPQVNNPKEWLQVDFQKTMKVTGVTTQGVKSLDTSMYVKEFLISSSQDGHQWTLFFQNGKVKVFQGNQDSFTPVVNSIDPPLLTRYLRIHPQSWVHQIALRMEVLGCEAQDLY

SEQ ID NO: 615 - DNA, 4371 bp, synthetic construct
  misc_feature 1..4371: note = Variant of human B-domain deleted Factor VIII
  source 1..4371: mol_type = other DNA
atgcagattgaactgtctacctgcttcttcctctgtttgctgaggttctgctttagcgccactagacggtactaccttggcgctgtggagctgtcctgggactatatgcagagtgatttgggagagcttcccgtcgacgcacgatttcctcctcgcgttccaaagtcatttcccttcaacacaagcgtggtgtacaagaagacgctcttcgtcgaattcaccgatcacctgttcaatatcgccaaacccagaccaccatggatgggtcttttggggcctaccatacaagcggaggtgtatgacacagttgttatcactctcaagaacatggcttctcatccggtaagtcttcacgcagtgggcgtgtcctactggaaagcttcagaaggagccgagtatgatgatcagacatcccagagggagaaagaagacgacaaggtatttccaggtgggtctcatacctatgtgtggcaagtgctcaaagagaatggccctatggcaagcgatccgctctgtttgacttacagctacctttcacacgttgacctcgtcaaggacctcaactccgggttgattggagccttgttggtatgcagggaaggatctcttgccaaagagaagacacagaccctccacaagtttatccttctctttgctgtgttcgatgagggcaaaagttggcatagcgaaacgaagaattccctcatgcaggatcgcgacgcagccagcgccagagcttggcccaagatgcacactgtgaacggatatgtcaataggtcacttcctggcttgattgggtgtcatcggaaaagtgtctactggcacgtgatcggaatggggacaacaccagaggtccactccatatttctcgaaggccataccttccttgttcgaaaccacagacaggcatccttggagatctctcccattacctttctcactgcccaaacgctccttatggacttgggtcagttccttctcttctgccatatcagctcacaccagcatgatggtatggaagcttatgtgaaagtccgcagttgtggtgaggagccacagttgcgcatgaagaataatgaagaagccgaggattacgacgacgatctcaccgattctgagatggacgtggtgaggtttgatgacgacaactctccctccttcattcaaatccggagcgtggcgaagaaacaccccaagacttgggtccactatatagcggcggaagaggaggattgggattacgctcctcttgtattggcaccagatgaccgctcatacaaaagccagtacctcaacaacggaccgcagagaattggccggaagtataagaaagtgcgatttatggcctatacagacgaaacctttaagacaagggaggccatccagcatgagagtgggattttgggacctcttctttacggcgaagttggtgataccctcctcatcatcttcaagaatcaagcttctcgcccctataacatttacccacacgggatcactgacgttaggcctttgtatagcagaagacttcccaaaggcgtgaagcatctcaaagacttccccattttgccaggcgagatctttaagtacaaatggaccgtcacagtggaagatggaccgactaaatcagaccctcgatgccttacgcggtactattcctccttcgtgaatatggagagagatttggcaagcggactcataggaccactcctcatctgttacaaggaatctgtagaccagaggggtaaccagattatgagtgataaacgcaatgtgatcctttttagcgtcttcgacgagaaccggtcctggtacttgaccgagaatatacaaaggttccttcccaaccccgcaggcgttcagttggaagaccctgagtttcaggccagcaatattatgcactcaatcaacggctatgtgtttgatagtctccagctttctgtttgcctccatgaagtagcctattggtacatcttgtcaattggtgctcaaacagacttcctctccgtcttcttctccggctacacctttaagcacaagatggtgtatgaggacactctcacactctttccattttctggagaaaccgtgttcatgagcatggagaatccaggcctttggatcttgggttgccacaacagtgattttcgcaatcggggaatgactgctctcctcaaagtcagcagctgtgataagaacacaggcgactattacgaagattcttacgaggacataagtgcctacttgttgtccaagaataacgccattgagcccagatcattctcccagaatcctcccgtgcttaaaaggcatcagcgcgaaatcaccagaactactcttcagtctgatcaagaggagattgactatgacgacaccataagcgtggaaatgaagaaggaggatttcgatatctatgacgaagatgagaaccagtctccgcggagctttcagaagaagacgcgacactacttcattgcagcagtcgaaaggctttgggactacggtatgtcatcatcccctcatgtgttgcgcaatagagctcagagtggaagtgttccacagttcaagaaagtcgtctttcaagagtttacagatggcagcttcacacagcctctctatcggggcgagcttaacgaacatttgggactccttggtccctatatccgagccgaagtggaggacaacattatggttacctttaggaatcaagcctctcgcccctacagcttctactcctccctcatcagttatgaggaggatcagagacaaggcgctgaaccacggaagaactttgtgaaaccgaatgagacgaagacctacttctggaaagtacagcaccacatggcccccacaaaagacgaattcgattgcaaagcatgggcgtatttttcagacgttgacttggagaaagatgtacattcaggacttattggtcctttgttggtgtgtcacactaacactctcaatccagcccatggcaggcaggtgacagtccaggaattcgctcttttctttaccatctttgatgagaccaagtcctggtacttcacggaaaacatggagcgcaattgcagagccccctgtaacatacagatggaggaccctacctttaaggaaaattatcggttccacgcaatcaacggatacattatggatacactccctggccttgtgatggctcaggaccaacgaatcaggtggtacctcctcagcatgggttctaatgagaacatacactccattcacttttcaggacatgtgttcactgtccggaagaaagaagagtataagatggccctctacaatttgtatccaggcgtgtttgagaccgttgaaatgcttccctctaaagctggcatctggagagtagagtgcttgatcggagaacatcttcacgcaggtatgagcaccttgttcctcgtgtacagcaacaaatgtcagaccccacttggcatggccagtggacacattcgcgactttcagatcacagcatctggccagtatggacaatgggccccaaagttggctcgcctccattactccggtagcataaatgcgtggtccactaaagaacctttcagctggattaaggtcgatcttcttgcccccatgatcatccacggcattaagacacagggagcgaggcagaaattctcctccctctacatctcacagttcattattatgtatagtttggacggcaagaagtggcaaacttatagaggtaacagtactggaacactcatggtgttcttcggcaacgttgatagctctggcatcaaacacaacatctttaatcctcccataatagctcggtacatcagattgcatccgacccactacagcattaggagtacactccgaatggagcttatgggttgcgacttgaattcctgttcaatgccactcggaatggagtctaaagccatctctgatgcacagataaccgccagtagctactttacgaacatgtttgctacgtggtcaccctctaaggcaaggcttcatttgcaaggccggtctaatgcctggagacctcaggtgaacaacccgaaagaatggctccaggtggactttcagaagaccatgaaagtaacaggtgtcactactcagggagttaagtccttggataccagcatgtatgtgaaggagttccttatttcctcatcacaagatggccaccagtggaccctcttctttcagaatggtaaggtcaaagtgtttcagggcaatcaagacagcttcacacccgtggtgaacagtcttgatcctccactcttgacacgataccttcgaatccatccacagtcttgggttcaccagattgcattgcgcatggaagtacttggatgcgaggctcaggacctctac

SEQ ID NO: 616 - protein, 1457 aa, synthetic construct
  REGION 1..1457: note = Variant of human B-domain deleted Factor VIII
MQIELSTCFFLCLLRFCFSATRRYYLGAVELSWDYMQSDLGELPVDARFPPRVPKSFPFNTSVVYKKTLFVEFTDHLFNIAKPRPPWMGLLGPTIQAEVYDTVVITLKNMASHPVSLHAVGVSYWKASEGAEYDDQTSQREKEDDKVFPGGSHTYVWQVLKENGPMASDPLCLTYSYLSHVDLVKDLNSGLIGALLVCREGSLAKEKTQTLHKFILLFAVFDEGKSWHSETKNSLMQDRDAASARAWPKMHTVNGYVNRSLPGLIGCHRKSVYWHVIGMGTTPEVHSIFLEGHTFLVRNHRQASLEISPITFLTAQTLLMDLGQFLLFCHISSHQHDGMEAYVKVRSCGEEPQLRMKNNEEAEDYDDDLTDSEMDVVRFDDDNSPSFIQIRSVAKKHPKTWVHYIAAEEEDWDYAPLVLAPDDRSYKSQYLNNGPQRIGRKYKKVRFMAYTDETFKTREAIQHESGILGPLLYGEVGDTLLIIFKNQASRPYNIYPHGITDVRPLYSRRLPKGVKHLKDFPILPGEIFKYKWTVTVEDGPTKSDPRCLTRYYSSFVNMERDLASGLIGPLLICYKESVDQRGNQIMSDKRNVILFSVFDENRSWYLTENIQRFLPNPAGVQLEDPEFQASNIMHSINGYVFDSLQLSVCLHEVAYWYILSIGAQTDFLSVFFSGYTFKHKMVYEDTLTLFPFSGETVFMSMENPGLWILGCHNSDFRNRGMTALLKVSSCDKNTGDYYEDSYEDISAYLLSKNNAIEPRSFSQNPPVLKRHQREITRTTLQSDQEEIDYDDTISVEMKKEDFDIYDEDENQSPRSFQKKTRHYFIAAVERLWDYGMSSSPHVLRNRAQSGSVPQFKKVVFQEFTDGSFTQPLYRGELNEHLGLLGPYIRAEVEDNIMVTFRNQASRPYSFYSSLISYEEDQRQGAEPRKNFVKPNETKTYFWKVQHHMAPTKDEFDCKAWAYFSDVDLEKDVHSGLIGPLLVCHTNTLNPAHGRQVTVQEFALFFTIFDETKSWYFTENMERNCRAPCNIQMEDPTFKENYRFHAINGYIMDTLPGLVMAQDQRIRWYLLSMGSNENIHSIHFSGHVFTVRKKEEYKMALYNLYPGVFETVEMLPSKAGIWRVECLIGEHLHAGMSTLFLVYSNKCQTPLGMASGHIRDFQITASGQYGQWAPKLARLHYSGSINAWSTKEPFSWIKVDLLAPMIIHGIKTQGARQKFSSLYISQFIIMYSLDGKKWQTYRGNSTGTLMVFFGNVDSSGIKHNIFNPPIIARYIRLHPTHYSIRSTLRMELMGCDLNSCSMPLGMESKAISDAQITASSYFTNMFATWSPSKARLHLQGRSNAWRPQVNNPKEWLQVDFQKTMKVTGVTTQGVKSLDTSMYVKEFLISSSQDGHQWTLFFQNGKVKVFQGNQDSFTPVVNSLDPPLLTRYLRIHPQSWVHQIALRMEVLGCEAQDLY

SEQ ID NO: 617 - DNA, 4371 bp, synthetic construct
  misc_feature 1..4371: note = Variant of human B-domain deleted Factor VIII
  source 1..4371: mol_type = other DNA
atgcagattgaactgtctacctgcttcttcctctgtttgctgaggttctgctttagcgccactagacggtactaccttggcgctgtggagctgtcctgggactatatgcagagtgatttgggagagcttcccgtcgacgcacgatttcctcctcgcgttccaaagtcatttcccttcaacacaagcgtggtgtacaagaagacgctcttcgtcgaattcaccgatcacctgttcaatatcgccaaacccagaccaccatggatgggtcttttggggcctaccatacaagcggaggtgtatgacacagttgttatcactctcaagaacatggcttctcatccggtaagtcttcacgcagtgggcgtgtcctactggaaagcttcagaaggagccgagtatgatgatcagacatcccagagggagaaagaagacgacaaggtatttccaggtgggtctcatacctatgtgtggcaagtgctcaaagagaatggccctatggcaagcgatccgctgtgtttgacttacagctacctttcacacgttgacctcgtcaaggacctcaactccgggttgattggagccttgttggtatgcagggaaggatctcttgccaaagagaagacacagaccctccacaagtttatccttctctttgctgtgttcgatgagggcaaaagttggcatagcgaaacgaagaattccctcatgcaggatcgcgacgcagccagcgccagagcttggcccaagatgcacactgtgaacggatatgtcaataggtcacttcctggcttgattgggtgtcatcggaaaagtgtctactggcacgtgatcggaatggggacaacaccagaggtccactccatatttctcgaaggccataccttccttgttcgaaaccacagacaggcatccttggggatctctcccattacctttctcactgcccaaacgctccttatggacttgggtcagttccttctcttctgccatatcagctcacaccagcatgatggtatggaagcttatgtgaaagtcgacagttgtggtgaggagccacagttgcgcatgaagaataatgaagaagccgaggattacgacgacgatctcaccgattctgagatggacgtggtgaggtttgatgacgacaactctccctccttcattcaaatccggagcgtggcgaagaaacaccccaagacttgggtccactatatagcggcggaagaggaggattgggattacgctcctcttgtattggcaccagatgaccgctcatacaaaagccagtacctcaacaacggaccgcagagaattggccggaagtataagaaagtgcgatttatggcctatacagacgaaacctttaagacaagggaggccatccagcatgagagtgggattttgggacctcttctttacggcgaagttggtgataccctcctcatcatcttcaagaatcaagcttctcgcccctataacatttacccacacgggatcactgacgttaggcctttgtatagcagaagacttcccaaaggcgtgaagcatctcaaagacttccccattttgccaggcgagatctttaagtacaaatggaccgtcacagtggaagatggaccgactaaatcagaccctcgatgccttacgcggtactattcctccttcgtgaatatggagagagatttggcaagcggactcataggaccactcctcatctgttacaaggaatctgtagaccagaggggtaaccagattatgagtgataaacgcaatgtgatcctttttagcgtcttcgacgagaaccggtcctggtacttgaccgagaatatacaaaggttccttcccaaccccgcaggcgttcagttggaagaccctgagtttcaggccagcaatattatgcactcaatcaacggctatgtgtttgatagtctccagctttctgtttgcctccatgaagtagcctattggtacatcttgtcaattggtgctcaaacagacttcctctccgtcttcttctccggctacacctttaagcacaagatggtgtatgaggacactctcacactctttccattttctggagaaaccgtgttcatgagcatggagaatccaggcctttggatcttgggttgccacaacagtgattttcgcaatcggggaatgactgctctcctcaaagtcagcagctgtgataagaacacaggcgactattacgaagattcttacgaggacataagtgcctacttgttgtccaagaataacgccattgagcccagatcattctcccagaatcctcccgtgcttaaaaggcatcagcgcgaaatcaccagaactactcttcagtctgatcaagaggagattgactatgacgacaccataagcgtggaaatgaagaaggaggatttcgatatctatgacgaagatgagaaccagtctccgcggagctttcagaagaagacgcgacactacttcattgcagcagtcgaaaggctttgggactacggtatgtcatcatcccctcatgtgttgcgcaatagagctcagagtggaagtgttccacagttcaagaaagtcgtctttcaagagtttacagatggcagcttcacacagcctctctatcggggcgagcttaacgaacatttgggactccttggtccctatatccgagccgaagtggaggacaacattatggttacctttaggaatcaagcctctcgcccctacagcttctactcctccctcatcagttatgaggaggatcagagacaaggcgctgaaccacggaagaactttgtgaaaccgaatgagacgaagacctacttctggaaagtacagcaccacatggcccccacaaaagacgaattcgattgcaaagcatgggcgtatttttcagacgttgacttggagaaagatgtacattcaggacttattggtcctttgttggtgtgtcacactaacactctcaatccagcccatggcaggcaggtgacagtccaggaattcgctcttttctttaccatctttgatgagaccaagtcctggtacttcacggaaaacatggagcgcaattgcagagccccctgtaacatacagatggaggaccctacctttaaggaaaattatcggttccacgcaatcaacggatacattatggatacactccctggccttgtgatggctcaggaccaacgaatcaggtggtacctcctcagcatgggttctaatgagaacatacactccattcacttttcaggacatgtgttcactgtccggaagaaagaagagtataagatggccctctacaatttgtatccaggcgtgtttgagaccgttgaaatgcttccctctaaagctggcatctggagagtagagtgcttgatcggagaacatcttcacgcaggtatgagcaccttgttcctcgtgtacagcaacaaatgtcagaccccacttggcatggccagtggacacattcgcgactttcagatcacagcatctggccagtatggacaatgggccccaaagttggctcgcctccattactccggtagcataaatgcgtggtccactaaagaacctttcagctggattaaggtcgatcttcttgcccccatgatcatccacggcattaagacacagggagcgaggcagaaattctcctccctctacatctcacagttcattattatgtatagtttggacggcaagaagtggcaaacttatagaggtaacagtactggaacactcatggtgttcttcggcaacgttgatagctctggcatcaaacacaacatctttaatcctcccataatagctcggtacatcagattgcatccgacccactacagcattaggagtacactccgaatggagcttatgggttgcgacttgaattcctgttcaatgccactcggaatggagtctaaagccatctctgatgcacagataaccgccagtagctactttacgaacatgtttgctacgtggtcaccctctaaggcaaggcttcatttgcaaggccggtctaatgcctggagacctcaggtgaacaacccgaaagaatggctccaggtggactttcagaagaccatgaaagtaacaggtgtcactactcagggagttaagtccttggataccagcatgtatgtgaaggagttccttatttcctcatcacaagatggccaccagtggaccctcttctttcagaatggtaaggtcaaagtgtttcagggcaatcaagacagcttcacacccgtggtgaacagtcttgatcctccactcttgacacgataccttcgaatccatccacagtcttgggttcaccagattgcattgcgcatggaagtacttggatgcgaggctcaggacctctac

SEQ ID NO: 618 - protein, 1457 aa, synthetic construct
  REGION 1..1457: note = Variant of human B-domain deleted Factor VIII
MQIELSTCFFLCLLRFCFSATRRYYLGAVELSWDYMQSDLGELPVDARFPPRVPKSFPFNTSVVYKKTLFVEFTDHLFNIAKPRPPWMGLLGPTIQAEVYDTVVITLKNMASHPVSLHAVGVSYWKASEGAEYDDQTSQREKEDDKVFPGGSHTYVWQVLKENGPMASDPLCLTYSYLSHVDLVKDLNSGLIGALLVCREGSLAKEKTQTLHKFILLFAVFDEGKSWHSETKNSLMQDRDAASARAWPKMHTVNGYVNRSLPGLIGCHRKSVYWHVIGMGTTPEVHSIFLEGHTFLVRNHRQASLGISPITFLTAQTLLMDLGQFLLFCHISSHQHDGMEAYVKVDSCGEEPQLRMKNNEEAEDYDDDLTDSEMDVVRFDDDNSPSFIQIRSVAKKHPKTWVHYIAAEEEDWDYAPLVLAPDDRSYKSQYLNNGPQRIGRKYKKVRFMAYTDETFKTREAIQHESGILGPLLYGEVGDTLLIIFKNQASRPYNIYPHGITDVRPLYSRRLPKGVKHLKDFPILPGEIFKYKWTVTVEDGPTKSDPRCLTRYYSSFVNMERDLASGLIGPLLICYKESVDQRGNQIMSDKRNVILFSVFDENRSWYLTENIQRFLPNPAGVQLEDPEFQASNIMHSINGYVFDSLQLSVCLHEVAYWYILSIGAQTDFLSVFFSGYTFKHKMVYEDTLTLFPFSGETVFMSMENPGLWILGCHNSDFRNRGMTALLKVSSCDKNTGDYYEDSYEDISAYLLSKNNAIEPRSFSQNPPVLKRHQREITRTTLQSDQEEIDYDDTISVEMKKEDFDIYDEDENQSPRSFQKKTRHYFIAAVERLWDYGMSSSPHVLRNRAQSGSVPQFKKVVFQEFTDGSFTQPLYRGELNEHLGLLGPYIRAEVEDNIMVTFRNQASRPYSFYSSLISYEEDQRQGAEPRKNFVKPNETKTYFWKVQHHMAPTKDEFDCKAWAYFSDVDLEKDVHSGLIGPLLVCHTNTLNPAHGRQVTVQEFALFFTIFDETKSWYFTENMERNCRAPCNIQMEDPTFKENYRFHAINGYIMDTLPGLVMAQDQRIRWYLLSMGSNENIHSIHFSGHVFTVRKKEEYKMALYNLYPGVFETVEMLPSKAGIWRVECLIGEHLHAGMSTLFLVYSNKCQTPLGMASGHIRDFQITASGQYGQWAPKLARLHYSGSINAWSTKEPFSWIKVDLLAPMIIHGIKTQGARQKFSSLYISQFIIMYSLDGKKWQTYRGNSTGTLMVFFGNVDSSGIKHNIFNPPIIARYIRLHPTHYSIRSTLRMELMGCDLNSCSMPLGMESKAISDAQITASSYFTNMFATWSPSKARLHLQGRSNAWRPQVNNPKEWLQVDFQKTMKVTGVTTQGVKSLDTSMYVKEFLISSSQDGHQWTLFFQNGKVKVFQGNQDSFTPVVNSLDPPLLTRYLRIHPQSWVHQIALRMEVLGCEAQDLY

SEQ ID NO: 619 - DNA, 4371 bp, synthetic construct
  misc_feature 1..4371: note = Variant of human B-domain deleted Factor VIII
  source 1..4371: mol_type = other DNA
atgcagattgaactgtctacctgcttcttcctctgtttgctgaggttctgctttagcgccactagacggtactaccttggcgctgtggagctgtcctgggactatatgcagagtgatttgggagagcttcccgtcgacgcacgatttcctcctcgcgttccaaagtcatttcccttcaacacaagccaagtgtacaagaagacgctcttcgtcgaattcaccgatcacctgttcaatatcgccaaacccagaccaccatggatgggtcttttggggcctaccatacaagcggaggtgtatgacacagttgttatcactctcaagaacatggcttctcatccggtaagtcttcacgcagtgggcgtgtcctactggaaagcttcagaaggagccgagtatgatgatcagacatcccagagggagaaagaagacgacaaggtatttccaggtgggtctcatacctatgtgtggcaagtgctcaaagagaatggccctatggcaagcgatccgccgtgtttgacttacagctacctttcacacgttgacctcgtcaaggacctcaactccgggttgattggagccttgttggtatgcagggaaggatctcttgccaaagagaagacacagaccctccacaagtttatccttctctttgctgtgttcgatgagggcaaaagttggcatagcgaaacgaagaattccctcatgcaggatcgcgacgcagccagcgccagagcttggcccaagatgcacactgtgaacggatatgtcaataggtcacttcctggcttgattgggtgtcatcggaaaagtgtctactggcacgtgatcggaatggggacaacaccagaggtccactccatatttctcgaaggccataccttccttgttcgaaaccacagacaggcatccttggagatctctcccattacctttctcactgcccaaacgctccttatggacttgggtcagttccttctcttctgccatatcagctcacaccagcatgatggtatggaagcttatgtgaaagtcgacagttgtcctgaggagccacagttgcgcatgaagaataatgaagaagccgaggattacgacgacgatctcaccgattctgagatggacgtggtgaggtttgatgacgacaactctccctccttcattcaaatccggagcgtggcgaagaaacaccccaagacttgggtccactatatagcggcggaagaggaggattgggattacgctcctcttgtattggcaccagatgaccgctcatacaaaagccagtacctcaacaacggaccgcagagaattggccggaagtataagaaagtgcgatttatggcctatacagacgaaacctttaagacaagggaggccatccagcatgagagtgggattttgggacctcttctttacggcgaagttggtgataccctcctcatcatcttcaagaatcaagcttctcgcccctataacatttacccacacgggatcactgacgttaggcctttgtatagcagaagacttcccaaaggcgtgaagcatctcaaagacttccccattttgccaggcgagatctttaagtacaaatggaccgtcacagtggaagatggaccgactaaatcagaccctcgatgccttacgcggtactattcctccttcgtgaatatggagagagatttggcaagcggactcataggaccactcctcatctgttacaaggaatctgtagaccagaggggtaaccagattatgagtgataaacgcaatgtgatcctttttagcgtcttcgacgagaaccggtcctggtacttgaccgagaatatacaaaggttccttcccaaccccgcaggcgttcagttggaagaccctgagtttcaggccagcaatattatgcactcaatcaacggctatgtgtttgatagtctccagctttctgtttgcctccatgaagtagcctattggtacatcttgtcaattggtgctcaaacagacttcctctccgtcttcttctccggctacacctttaagcacaagatggtgtatgaggacactctcacactctttccattttctggagaaaccgtgttcatgagcatggagaatccaggcctttggatcttgggttgccacaacagtgattttcgcaatcggggaatgactgctctcctcaaagtcagcagctgtgataagaacacaggcgactattacgaagattcttacgaggacataagtgcctacttgttgtccaagaataacgccattgagcccagatcattctcccagaatcctcccgtgcttaaaaggcatcagcgcgaaatcaccagaactactcttcagtctgatcaagaggagattgactatgacgacaccataagcgtggaaatgaagaaggaggatttcgatatctatgacgaagatgagaaccagtctccgcggagctttcagaagaagacgcgacactacttcattgcagcagtcgaaaggctttgggactacggtatgtcatcatcccctcatgtgttgcgcaatagagctcagagtggaagtgttccacagttcaagaaagtcgtctttcaagagtttacagatggcagcttcacacagcctctctatcggggcgagcttaacgaacatttgggactccttggtccctatatccgagccgaagtggaggacaacattatggttacctttaggaatcaagcctctcgcccctacagcttctactcctccctcatcagttatgaggaggatcagagacaaggcgctgaaccacggaagaactttgtgaaaccgaatgagacgaagacctacttctggaaagtacagcaccacatggcccccacaaaagacgaattcgattgcaaagcatgggcgtatttttcagacgttgacttggagaaagatgtacattcaggacttattggtcctttgttggtgtgtcacactaacactctcaatccagcccatggcaggcaggtgacagtccaagaattcgctcttttctttaccatctttgatgagaccaagtcctggtacttcacggaaaacatggagcgcaattgcagagccccctgtaacatacagatggaggaccctacctttaaggaaaattatcggttccacgcaatcaacggatacattatggatacactccctggccttgtgatggctcaggaccaacgaatcaggtggtacctcctcagcatgggttctaatgagaacatacactccattcacttttcaggacatgtgttcactgtccggaagaaagaagagtataagatggccctctacaatttgtatccaggcgtgtttgagaccgttgaaatgcttccctctaaagctggcatctggagagtagagtgcttgatcggagaacatcttcacgcaggtatgagcaccttgttcctcgtgtacagcaacaaatgtcagaacccacttagcatggccagtggacacattcgcgactttcagatcacagcatctggccagtatggacaatgggccccaaagttggctcgcctccattactccggtagcataaatgcgtggtccactaaagaacctttcagctggattaaggtcgatcttcttgcccccatgatcatccacggcattaagacacagggagcgaggcagaaattctcctccctctacatctcacagttcattattatgtatagtttggacggcaagaagtggcaaacttatagaggtaacagtactggaacactcatggtgttcttcggcaacgttgatagctctggcatcaaacacaacatctttaatcctcccataatagctcggtacatcagattgcatccgacccactacagcattaggagtacactccgaatggagcttatgggttgcgacttgaattcctgttcaatgccactcggaatggagtctaaagccatctctgatgcacagataaccgccagtagctactttacgaacatgtttgctacgtggtcaccctctaaggcaaggcttcatttgcaaggccggtctaatgcctggagacctcaggtgaacaacccgaaagaatggctccaggtggactttcagaagaccatgaaagtaacaggtgtcactactcagggagttaagtccttggataccagcatgtatgtgaaggagttccttatttcctcatcacaagatggccaccagtggaccctcttctttcagaatggtaaggtcaaagtgtttcagggcaatcaagacagcttcacacccgtggtgaacagtcttgatcctccactcttgacacgataccttcgaatccatccacagtcttgggttcaccagattgcattgcgcatggaagtacttggatgcgaggctcaggacctctac

SEQ ID NO: 620 - protein, 1457 aa, synthetic construct
  REGION 1..1457: note = Variant of human B-domain deleted Factor VIII
MQIELSTCFFLCLLRFCFSATRRYYLGAVELSWDYMQSDLGELPVDARFPPRVPKSFPFNTSQVYKKTLFVEFTDHLFNIAKPRPPWMGLLGPTIQAEVYDTVVITLKNMASHPVSLHAVGVSYWKASEGAEYDDQTSQREKEDDKVFPGGSHTYVWQVLKENGPMASDPPCLTYSYLSHVDLVKDLNSGLIGALLVCREGSLAKEKTQTLHKFILLFAVFDEGKSWHSETKNSLMQDRDAASARAWPKMHTVNGYVNRSLPGLIGCHRKSVYWHVIGMGTTPEVHSIFLEGHTFLVRNHRQASLEISPITFLTAQTLLMDLGQFLLFCHISSHQHDGMEAYVKVDSCPEEPQLRMKNNEEAEDYDDDLTDSEMDVVRFDDDNSPSFIQIRSVAKKHPKTWVHYIAAEEEDWDYAPLVLAPDDRSYKSQYLNNGPQRIGRKYKKVRFMAYTDETFKTREAIQHESGILGPLLYGEVGDTLLIIFKNQASRPYNIYPHGITDVRPLYSRRLPKGVKHLKDFPILPGEIFKYKWTVTVEDGPTKSDPRCLTRYYSSFVNMERDLASGLIGPLLICYKESVDQRGNQIMSDKRNVILFSVFDENRSWYLTENIQRFLPNPAGVQLEDPEFQASNIMHSINGYVFDSLQLSVCLHEVAYWYILSIGAQTDFLSVFFSGYTFKHKMVYEDTLTLFPFSGETVFMSMENPGLWILGCHNSDFRNRGMTALLKVSSCDKNTGDYYEDSYEDISAYLLSKNNAIEPRSFSQNPPVLKRHQREITRTTLQSDQEEIDYDDTISVEMKKEDFDIYDEDENQSPRSFQKKTRHYFIAAVERLWDYGMSSSPHVLRNRAQSGSVPQFKKVVFQEFTDGSFTQPLYRGELNEHLGLLGPYIRAEVEDNIMVTFRNQASRPYSFYSSLISYEEDQRQGAEPRKNFVKPNETKTYFWKVQHHMAPTKDEFDCKAWAYFSDVDLEKDVHSGLIGPLLVCHTNTLNPAHGRQVTVQEFALFFTIFDETKSWYFTENMERNCRAPCNIQMEDPTFKENYRFHAINGYIMDTLPGLVMAQDQRIRWYLLSMGSNENIHSIHFSGHVFTVRKKEEYKMALYNLYPGVFETVEMLPSKAGIWRVECLIGEHLHAGMSTLFLVYSNKCQNPLSMASGHIRDFQITASGQYGQWAPKLARLHYSGSINAWSTKEPFSWIKVDLLAPMIIHGIKTQGARQKFSSLYISQFIIMYSLDGKKWQTYRGNSTGTLMVFFGNVDSSGIKHNIFNPPIIARYIRLHPTHYSIRSTLRMELMGCDLNSCSMPLGMESKAISDAQITASSYFTNMFATWSPSKARLHLQGRSNAWRPQVNNPKEWLQVDFQKTMKVTGVTTQGVKSLDTSMYVKEFLISSSQDGHQWTLFFQNGKVKVFQGNQDSFTPVVNSLDPPLLTRYLRIHPQSWVHQIALRMEVLGCEAQDLY

SEQ ID NO: 621 - DNA, 4371 bp, synthetic construct
  misc_feature 1..4371: note = Variant of human B-domain deleted Factor VIII
  source 1..4371: mol_type = other DNA
atgcagattgaactgtctacctgcttcttcctctgtttgctgaggttctgctttagcgccactagacggtactaccttggcgctgtggagctgtcctgggactatatgcagagtgatttgggagagcttcccgtcgacgcacgatttcctcctcgcgttccaaagtcatttcccttcaacacaagcgttgtgtacaagaagacgctcttcgtcgaattcaccgatcacctgttcaatatcgccaaacccagaccaccatggatgggtcttttggggcctaccatacaagcggaggtgtatgacacagttgttatcactctcaagaacatggcttctcatccggtaagtcttcacgcagtgggcgtgtcctactggaaagcttcagaaggagccgagtatgatgatcagacatcccagagggagaaagaagacgacaaggtatttccaggtgggtctcatacctatgtgtggcaagtgctcaaagagaatggccctatggcaagcgatccgctctgtttgacttacagctacctttcacacgttgacctcgtcaaggacctcaactccgggttgattggagccttgttggtatgcagggaaggatctcttgccaaagagaagacacagaccctccacaagtttatccttctctttgctgtgttcgatgagggcaaaagttggcatagcgaaacgaagaattccctcatgcaggatcgcgacgcagccagcgccagagcttggcccaagatgcacactgtgaacggatatgtcaataggtcacttcctggcttgattgggtgtcatcggaaaagtgtctactggcacgtgatcggaatggggacaacaccagaggtccactccatatttctcgaaggccataccttccttgttcgaaaccacagacaggcatccttggggatctctcccattacctttctcactgcccaaacgctccttatggacttgggtcagttccttctcttctgccatatcagctcacaccagcatgatggtatggaagcttatgtgaaagtcgacagttgtccggaggagccacagttgcgcatgaagaataatgaagaagccgaggattacgacgacgatctcaccgattctgagatggacgtggtgaggtttgatgacgacaactctccctccttcattcaaatccggagcgtggcgaagaaacaccccaagacttgggtccactatatagcggcggaagaggaggattgggattacgctcctcttgtattggcaccagatgaccgctcatacaaaagccagtacctcaacaacggaccgcagagaattggccggaagtataagaaagtgcgatttatggcctatacagacgaaacctttaagacaagggaggccatccagcatgagagtgggattttgggacctcttctttacggcgaagttggtgataccctcctcatcatcttcaagaatcaagcttctcgcccctataacatttacccacacgggatcactgacgttaggcctttgtatagcagaagacttcccaaaggcgtgaagcatctcaaagacttccccattttgccaggcgagatctttaagtacaaatggaccgtcacagtggaagatggaccgactaaatcagaccctcgatgccttacgcggtactattcctccttcgtgaatatggagagagatttggcaagcggactcataggaccactcctcatctgttacaaggaatctgtagaccagaggggtaaccagattatgagtgataaacgcaatgtgatcctttttagcgtcttcgacgagaaccggtcctggtacttgaccgagaatatacaaaggttccttcccaaccccgcaggcgttcagttggaagaccctgagtttcaggccagcaatattatgcactcaatcaacggctatgtgtttgatagtctccagctttctgtttgcctccatgaagtagcctattggtacatcttgtcaattggtgctcaaacagacttcctctccgtcttcttctccggctacacctttaagcacaagatggtgtatgaggacactctcacactctttccattttctggagaaaccgtgttcatgagcatggagaatccaggcctttggatcttgggttgccacaacagtgattttcgcaatcggggaatgactgctctcctcaaagtcagcagctgtgataagaacacaggcgactattacgaagattcttacgaggacataagtgcctacttgttgtccaagaataacgccattgagcccagatcattctcccagaatcctcccgtgcttaaaaggcatcagcgcgaaatcaccagaactactcttcagtctgatcaagaggagattgactatgacgacaccataagcgtggaaatgaagaaggaggatttcgatatctatgacgaagatgagaaccagtctccgcggagctttcagaagaagacgcgacactacttcattgcagcagtcgaaaggctttgggactacggtatgtcatcatcccctcatgtgttgcgcaatagagctcagagtggaagtgttccacagttcaagaaagtcgtctttcaagagtttacagatggcagcttcacacagcctctctatcggggcgagcttaacgaacatttgggactccttggtccctatatccgagccgaagtggaggacaacattatggttacctttaggaatcaagcctctcgcccctacagcttctactcctccctcatcagttatgaggaggatcagagacaaggcgctgaaccacggaagaactttgtgaaaccgaatgagacgaagacctacttctggaaagtacagcaccacatggcccccacaaaagacgaattcgattgcaaagcatgggcgtatttttcagacgttgacttggagaaagatgtacattcaggacttattggtcctttgttggtgtgtcacactaacactctcaatccagcccatggcaggcaggtgacagtccaggaattcgctcttttctttaccatctttgatgagaccaagtcctggtacttcacggaaaacatggagcgcaattgcagagccccctgtaacatacagatggaggaccctacctttaaggaaaattatcggttccacgcaatcaacggatacattatggatacactccctggccttgtgatggctcaggaccaacgaatcaggtggtacctcctcagcatgggttctaatgagaacatacactccattcacttttcaggacatgtgttcactgtccggaagaaagaagagtataagatggccctctacaatttgtatccaggcgtgtttgagaccgttgaaatgcttccctctaaagctggcatctggagagtagagtgcttgatcggagaacatcttcacgcaggtatgagcaccttgttcctcgtgtacagcaacaaatgtcagaccccacttggcatggccagtggacacattcgcgactttcagatcacagcatctggccagtatggacaatgggccccaaagttggctcgcctccattactccggtagcataaatgcgtggtccactaaagaacctttcagctggattaaggtcgatcttcttgcccccatgatcatccacggcattaagacacagggagcgaggcagaaattctcctccctctacatctcacagttcattattatgtatagtttggacggcaagaagtggcaaacttatagaggtaacagtactggaacactcatggtgttcttcggcaacgttgatagctctggcatcaaacacaacatctttaatcctcccataatagctcggtacatcagattgcatccgacccactacagcattaggagtacactccgaatggagcttatgggttgcgacttgaattcctgttcaatgccactcggaatggagtctaaagccatctctgatgcacagataaccgccagtagctactttacgaacatgtttgctacgtggtcaccctctaaggcaaggcttcatttgcaaggccggtctaatgcctggagacctcaggtgaacaacccgaaagaatggctccaggtggactttcagaagaccatgaaagtaacaggtgtcactactcagggagttaagtccttggataccagcatgtatgtgaaggagttccttatttcctcatcacaagatggccaccagtggaccctcttctttcagaatggtaaggtcaaagtgtttcagggcaatcaagacagcttcacacccgtggtgaacagtcttgatcctccactcttgacacgataccttcgaatccatccacagtcttgggttcaccagattgcattgcgcatggaagtacttggatgcgaggctcaggacctctac

SEQ ID NO: 622 - protein, 1457 aa, synthetic construct
  REGION 1..1457: note = Variant of human B-domain deleted Factor VIII
MQIELSTCFFLCLLRFCFSATRRYYLGAVELSWDYMQSDLGELPVDARFPPRVPKSFPFNTSVVYKKTLFVEFTDHLFNIAKPRPPWMGLLGPTIQAEVYDTVVITLKNMASHPVSLHAVGVSYWKASEGAEYDDQTSQREKEDDKVFPGGSHTYVWQVLKENGPMASDPLCLTYSYLSHVDLVKDLNSGLIGALLVCREGSLAKEKTQTLHKFILLFAVFDEGKSWHSETKNSLMQDRDAASARAWPKMHTVNGYVNRSLPGLIGCHRKSVYWHVIGMGTTPEVHSIFLEGHTFLVRNHRQASLGISPITFLTAQTLLMDLGQFLLFCHISSHQHDGMEAYVKVDSCPEEPQLRMKNNEEAEDYDDDLTDSEMDVVRFDDDNSPSFIQIRSVAKKHPKTWVHYIAAEEEDWDYAPLVLAPDDRSYKSQYLNNGPQRIGRKYKKVRFMAYTDETFKTREAIQHESGILGPLLYGEVGDTLLIIFKNQASRPYNIYPHGITDVRPLYSRRLPKGVKHLKDFPILPGEIFKYKWTVTVEDGPTKSDPRCLTRYYSSFVNMERDLASGLIGPLLICYKESVDQRGNQIMSDKRNVILFSVFDENRSWYLTENIQRFLPNPAGVQLEDPEFQASNIMHSINGYVFDSLQLSVCLHEVAYWYILSIGAQTDFLSVFFSGYTFKHKMVYEDTLTLFPFSGETVFMSMENPGLWILGCHNSDFRNRGMTALLKVSSCDKNTGDYYEDSYEDISAYLLSKNNAIEPRSFSQNPPVLKRHQREITRTTLQSDQEEIDYDDTISVEMKKEDFDIYDEDENQSPRSFQKKTRHYFIAAVERLWDYGMSSSPHVLRNRAQSGSVPQFKKVVFQEFTDGSFTQPLYRGELNEHLGLLGPYIRAEVEDNIMVTFRNQASRPYSFYSSLISYEEDQRQGAEPRKNFVKPNETKTYFWKVQHHMAPTKDEFDCKAWAYFSDVDLEKDVHSGLIGPLLVCHTNTLNPAHGRQVTVQEFALFFTIFDETKSWYFTENMERNCRAPCNIQMEDPTFKENYRFHAINGYIMDTLPGLVMAQDQRIRWYLLSMGSNENIHSIHFSGHVFTVRKKEEYKMALYNLYPGVFETVEMLPSKAGIWRVECLIGEHLHAGMSTLFLVYSNKCQTPLGMASGHIRDFQITASGQYGQWAPKLARLHYSGSINAWSTKEPFSWIKVDLLAPMIIHGIKTQGARQKFSSLYISQFIIMYSLDGKKWQTYRGNSTGTLMVFFGNVDSSGIKHNIFNPPIIARYIRLHPTHYSIRSTLRMELMGCDLNSCSMPLGMESKAISDAQITASSYFTNMFATWSPSKARLHLQGRSNAWRPQVNNPKEWLQVDFQKTMKVTGVTTQGVKSLDTSMYVKEFLISSSQDGHQWTLFFQNGKVKVFQGNQDSFTPVVNSLDPPLLTRYLRIHPQSWVHQIALRMEVLGCEAQDLY

SEQ ID NO: 623 - DNA, 4371 bp, synthetic construct
  misc_feature 1..4371: note = Variant of human B-domain deleted Factor VIII
  source 1..4371: mol_type = other DNA
atgcagattgaactgtctacctgcttcttcctctgtttgctgaggttctgctttagcgccactagacggtactaccttggcgctgtggagctgtcctgggactatatgcagagtgatttgggagagcttcccgtcgacgcacgatttcctcctcgcgttccaaagtcatttcccttcaacacaagcgttgtgtacaagaagacgctcttcgtcgaattcaccgatcacctgttcaatatcgccaaacccagaccaccatggatgggtcttttggggcctaccatacaagcggaggtgtatgacacagttgttatcactctcaagaacatggcttctcatccggtaagtcttcacgcagtgggcgtgtcctactggaaagcttcagaaggagccgagtatgatgatcagacatcccagagggagaaagaagacgacaaggtatttccaggtgggtctcatacctatgtgtggcaagtgctcaaagagaatggccctatggcaagcgatccgctctgtttgacttacagctacctttcacacgttgacctcgtcaaggacctcaactccgggttgattggagccttgttggtatgcagggaaggatctcttgccaaagagaagacacagaccctccacaagtttatccttctctttgctgtgttcgatgagggcaaaagttggcatagcgaaacgaagaattccctcatgcaggatcgcgacgcagccagcgccagagcttggcccaagatgcacactgtgaacggatatgtcaataggtcacttcctggcttgattgggtgtcatcggaaaagtgtctactggcacgtgatcggaatggggacaacaccagaggtccactccatatttctcgaaggccataccttccttgttcgaaaccacagacaggcatccttggagatctctcccattacctttctcactgcccaaacgctccttatggacttgggtcagttccttctcttctgccatatcagctcacaccagcatgatggtatggaagcttatgtggaggtcgacagttgtggggaggagccacagcgtcgcatgaagaataatgaagaagccgaggattacgacgacgatctcaccgattctgagatggacgtggtgaggtttgatgacgacaactctccctccttcattcaaatccggagcgtggcgaagaaacaccccaagacttgggtccactatatagcggcggaagaggaggattgggattacgctcctcttgtattggcaccagatgaccgctcatacaaaagccagtacctcaacaacggaccgcagagaattggccggaagtataagaaagtgcgatttatggcctatacagacgaaacctttaagacaagggaggccatccagcatgagagtgggattttgggacctcttctttacggcgaagttggtgataccctcctcatcatcttcaagaatcaagcttctcgcccctataacatttacccacacgggatcactgacgttaggcctttgtatagcagaagacttcccaaaggcgtgaagcatctcaaagacttccccattttgccaggcgagatctttaagtacaaatggaccgtcacagtggaagatggaccgactaaatcagaccctcgatgccttacgcggtactattcctccttcgtgaatatggagagagatttggcaagcggactcataggaccactcctcatctgttacaaggaatctgtagaccagaggggtaaccagattatgagtgataaacgcaatgtgatcctttttagcgtcttcgacgagaaccggtcctggtacttgaccgagaatatacaaaggttccttcccaaccccgcaggcgttcagttggaagaccctgagtttcaggccagcaatattatgcactcaatcaacggctatgtgtttgatagtctccagctttctgtttgcctccatgaagtagcctattggtacatcttgtcaattggtgctcaaacagacttcctctccgtcttcttctccggctacacctttaagcacaagatggtgtatgaggacactctcacactctttccattttctggagaaaccgtgttcatgagcatggagaatccaggcctttggatcttgggttgccacaacagtgattttcgcaatcggggaatgactgctctcctcaaagtcagcagctgtgataagaacacaggcgactattacgaagattcttacgaggacataagtgcctacttgttgtccaagaataacgccattgagcccagatcattctcccagaatcctcccgtgcttaaaaggcatcagcgcgaaatcaccagaactactcttcagtctgatcaagaggagattgactatgacgacaccataagcgtggaaatgaagaaggaggatttcgatatctatgacgaagatgagaaccagtctccgcggagctttcagaagaagacgcgacactacttcattgcagcagtcgaaaggctttgggactacggtatgtcatcatcccctcatgtgttgcgcaatagagctcagagtggaagtgttccacagttcaagaaagtcgtctttcaagagtttacagatggcagcttcacacagcctctctatcggggcgagcttaacgaacatttgggactccttggtccctatatccgagccgaagtggaggacaacattatggttacctttaggaatcaagcctctcgcccctacagcttctactcctccctcatcagttatgaggaggatcagagacaaggcgctgaaccacggaagaactttgtgaaaccgaatgagacgaagacctacttctggaaagtacagcaccacatggcccccacaaaagacgaattcgattgcaaagcatgggcgtatttttcagacgttgacttggagaaagatgtacattcaggacttattggtcctttgttggtgtgtcacactaacactctcaatccagcccatggcaggcaggtgacagtccaggaattcgctcttttctttaccatctttgatgagaccaagtcctggtacttcacggaaaacatggagcgcaattgcagagccccctgtaacatacagatggaggaccctacctttaaggaaaattatcggttccacgcaatcaacggatacattatggatacactccctggccttgtgatggctcaggaccaacgaatcaggtggtacctcctcagcatgggttctaatgagaacatacactccattcacttttcaggacatgtgttcactgtccggaagaaagaagagtataagatggccctctacaatttgtatccaggcgtgtttgagaccgttgaaatgcttccctctaaagctggcatctggagagtagagtgcttgatcggagaacatcttcacgcaggtatgagcaccttgttcctcgtgtacagcaacaaatgtcagaccccacttggcatggccagtggacacattcgcgactttcagatcacagcatctggccagtatggacaatgggccccaaagttggctcgcctccattactccggtagcataaatgcgtggtccactaaagaacctttcagctggattaaggtcgatcttcttgcccccatgatcatccacggcattaagacacagggagcgaggcagaaattctcctccctctacatctcacagttcattattatgtatagtttggacggcaagaagtggcaaacttatagaggtaacagtactggaacactgatgacgttcttcggcaacgttgatagctctggcatcaaacacaacatctttaatcctcccataatagctcggtacatcagattgcatccgacccactacagcattaggagtacactccgaatggagcttatgggttgcgacttgaattcctgttcaatgccactcggaatggagtctaaagccatctctgatgcacagataaccgccagtagctactttacgaacatgtttgctacgtggtcaccctctaaggcaaggcttcatttgcaaggccggtctaatgcctggagacctcaggtgaacaacccgaaagaatggctccaggtggactttcagaagaccatgaaagtaacaggtgtcactactcagggagttaagtccttggataccagcatgtatgtgaaggagttccttatttcctcatcacaagatggccaccagtggaccctcttctttcagaatggtaaggtcaaagtgtttcagggcaatcaagacagcttcacacccgtggtgaacagtcttgatcctccactcttgacacgataccttcgaatccatccacagtcttgggttcaccagattgcattgcgcatggaagtacttggatgcgaggctcaggacctctac

SEQ ID NO: 624 - protein, 1457 aa, synthetic construct
  REGION 1..1457: note = Variant of human B-domain deleted Factor VIII
MQIELSTCFFLCLLRFCFSATRRYYLGAVELSWDYMQSDLGELPVDARFPPRVPKSFPFNTSVVYKKTLFVEFTDHLFNIAKPRPPWMGLLGPTIQAEVYDTVVITLKNMASHPVSLHAVGVSYWKASEGAEYDDQTSQREKEDDKVFPGGSHTYVWQVLKENGPMASDPLCLTYSYLSHVDLVKDLNSGLIGALLVCREGSLAKEKTQTLHKFILLFAVFDEGKSWHSETKNSLMQDRDAASARAWPKMHTVNGYVNRSLPGLIGCHRKSVYWHVIGMGTTPEVHSIFLEGHTFLVRNHRQASLEISPITFLTAQTLLMDLGQFLLFCHISSHQHDGMEAYVEVDSCGEEPQRRMKNNEEAEDYDDDLTDSEMDVVRFDDDNSPSFIQIRSVAKKHPKTWVHYIAAEEEDWDYAPLVLAPDDRSYKSQYLNNGPQRIGRKYKKVRFMAYTDETFKTREAIQHESGILGPLLYGEVGDTLLIIFKNQASRPYNIYPHGITDVRPLYSRRLPKGVKHLKDFPILPGEIFKYKWTVTVEDGPTKSDPRCLTRYYSSFVNMERDLASGLIGPLLICYKESVDQRGNQIMSDKRNVILFSVFDENRSWYLTENIQRFLPNPAGVQLEDPEFQASNIMHSINGYVFDSLQLSVCLHEVAYWYILSIGAQTDFLSVFFSGYTFKHKMVYEDTLTLFPFSGETVFMSMENPGLWILGCHNSDFRNRGMTALLKVSSCDKNTGDYYEDSYEDISAYLLSKNNAIEPRSFSQNPPVLKRHQREITRTTLQSDQEEIDYDDTISVEMKKEDFDIYDEDENQSPRSFQKKTRHYFIAAVERLWDYGMSSSPHVLRNRAQSGSVPQFKKVVFQEFTDGSFTQPLYRGELNEHLGLLGPYIRAEVEDNIMVTFRNQASRPYSFYSSLISYEEDQRQGAEPRKNFVKPNETKTYFWKVQHHMAPTKDEFDCKAWAYFSDVDLEKDVHSGLIGPLLVCHTNTLNPAHGRQVTVQEFALFFTIFDETKSWYFTENMERNCRAPCNIQMEDPTFKENYRFHAINGYIMDTLPGLVMAQDQRIRWYLLSMGSNENIHSIHFSGHVFTVRKKEEYKMALYNLYPGVFETVEMLPSKAGIWRVECLIGEHLHAGMSTLFLVYSNKCQTPLGMASGHIRDFQITASGQYGQWAPKLARLHYSGSINAWSTKEPFSWIKVDLLAPMIIHGIKTQGARQKFSSLYISQFIIMYSLDGKKWQTYRGNSTGTLMTFFGNVDSSGIKHNIFNPPIIARYIRLHPTHYSIRSTLRMELMGCDLNSCSMPLGMESKAISDAQITASSYFTNMFATWSPSKARLHLQGRSNAWRPQVNNPKEWLQVDFQKTMKVTGVTTQGVKSLDTSMYVKEFLISSSQDGHQWTLFFQNGKVKVFQGNQDSFTPVVNSLDPPLLTRYLRIHPQSWVHQIALRMEVLGCEAQDLY

SEQ ID NO: 625 - DNA, 4371 bp, synthetic construct
  misc_feature 1..4371: note = Variant of human B-domain deleted Factor VIII
  source 1..4371: mol_type = other DNA
atgcagattgaactgtctacctgcttcttcctctgtttgctgaggttctgctttagcgccactagacggtactaccttggcgctgtggagctgtcctgggactatatgcagagtgatttgggagagcttcccgtcgacgcacgatttcctcctcgcgttccaaagtcatttccctttaacacaagcggtgtgtacaagaagacgctcttcgtcgaattcaccgatcacctgttcaatatcgccaaacccagaccaccatggatgggtcttttggggcctaccatacaagcggaggtgtatgacacagttgttatcactctcaagaacatggcttctcatccggtaagtcttcacgcagtgggcgtgtcctactggaaagcttcagaaggagccgagtatgatgatcagacatcccagagggagaaagaagacgacaaggtatttccaggtgggtctcatacctatgtgtggcaagtgctcaaagagaatggccctatggcaagcgatccgctctgtttgacttacagctacctttcacacgttgacctcgtcaaggacctcaactccgggttgattggagccttgttggtatgcagggaaggatctcttgccaaagagaagacacagaccctccacaagtttatccttctctttgctgtgttcgatgagggcaaaagttggcatagcgaaacgaagaattccctcatgcaggatcgcgacgcagccagcgccagagcttggcccaagatgcacactgtgaacggatatgtcaataggtcacttcctggcttgattgggtgtcatcggaaaagtgtctactggcacgtgatcggaatggggacaacaccagaggtccactccatatttctcgaaggccataccttccttgttcgaaaccacagacaggcatccttggagatctctcccattacctttctcactgcccaaacgctccttatggacttgggtcagttccttctcttctgccatatcagctcacaccagcatgatggtatggaagcttatgtgaaagtcgacagttgtcctgaggagccacagttgcgcatgaagaataatgaagaagccgaggattacgacgacgatctcaccgattctgagatggacgtggtgaggtttgatgacgacaactctccctccttcattcaaatccggagcgtggcgaagaaacaccccaagacttgggtccactatatagcggcggaagaggaggattgggattacgctcctcttgtattggcaccagatgaccgctcatacaaaagccagtacctcaacaacggaccgcagagaattggccggaagtataagaaagtgcgatttatggcctatacagacgaaacctttaagacaagggaggccatccagcatgagagtgggattttgggacctcttctttacggcgaagttggtgataccctcctcatcatcttcaagaatcaagcttctcgcccctataacatttacccacacgggatcactgacgttaggcctttgtatagcagaagacttcccaaaggcgtgaagcatctcaaagacttccccattttgccaggcgagatctttaagtacaaatggaccgtcacagtggaagatggaccgactaaatcagaccctcgatgccttacgcggtactattcctccttcgtgaatatggagagagatttggcaagcggactcataggaccactcctcatctgttacaaggaatctgtagaccagaggggtaaccagattatgagtgataaacgcaatgtgatcctttttagcgtcttcgacgagaaccggtcctggtacttgaccgagaatatacaaaggttccttcccaaccccgcaggcgttcagttggaagaccctgagtttcaggccagcaatattatgcactcaatcaacggctatgtgtttgatagtctccagctttctgtttgcctccatgaagtagcctattggtacatcttgtcaattggtgctcaaacagacttcctctccgtcttcttctccggctacacctttaagcacaagatggtgtatgaggacactctcacactctttccattttctggagaaaccgtgttcatgagcatggagaatccaggcctttggatcttgggttgccacaacagtgattttcgcaatcggggaatgactgctctcctcaaagtcagcagctgtgataagaacacaggcgactattacgaagattcttacgaggacataagtgcctacttgttgtccaagaataacgccattgagcccagatcattctcccagaatcctcccgtgcttaaaaggcatcagcgcgaaatcaccagaactactcttcagtctgatcaagaggagattgactatgacgacaccataagcgtggaaatgaagaaggaggatttcgatatctatgacgaagatgagaaccagtctccgcggagctttcagaagaagacgcgacactacttcattgcagcagtcgaaaggctttgggactacggtatgtcatcatcccctcatgtgttgcgcaatagagctcagagtggaagtgttccacagttcaagaaagtcgtctttcaagagtttacagatggcagcttcacacagcctctctatcggggcgagcttaacgaacatttgggactccttggtccctatatccgagccgaagtggaggacaacattatggttacctttaggaatcaagcctctcgcccctacagcttctactcctccctcatcagttatgaggaggatcagagacaaggcgctgaaccacggaagaactttgtgaaaccgaatgagacgaagacctacttctggaaagtacagcaccacatggcccccacaaaagacgaattcgattgcaaagcatgggcgtatttttcagacgttgacttggagaaagatgtacattcaggacttattggtcctttgttggtgtgtcacactaacactctcaatccagcccatggcaggcaggtgacagtccaggaattcgctcttttctttaccatctttgatgagaccaagtcctggtacttcacggaaaacatggagcgcaattgcagagccccctgtaacatacagatggaggaccctacctttaaggaaaattatcggttccacgcaatcaacggatacattatggatacactccctggccttgtgatggctcaggaccaacgaatcaggtggtacctcctcagcatgggttctaatgagaacatacactccattcacttttcaggacatgtgttcactgtccggaagaaagaagagtataagatggccctctacaatttgtatccaggcgtgtttgagaccgttgaaatgcttccctctaaagctggcatctggagagtagagtgcttgatcggagaacatcttcacgcaggtatgagcaccttgttcctcgtgtacagcaacaaatgtcagaccccacttggcatggccagtggacacattcgcgactttcagatcacagcatctggccagtatggacaatgggccccaaagttggctcgcctccattactccggtagcataaatgcgtggtccactaaagaacctttcagctggattaaggtcgatcttcttgcccccatgatcatccacggcattaagacacagggagcgaggcagaaattctcctccctctacatctcacagttcattattatgtatagtttggacggcaagaagtggcaaacttatagaggtaacagtactggaacactcatggtgttcttcggcaacgttgatagctctggcatcaaacacaacatctttaatcctcccataatagctcggtacatcagattgcatccgacccactacagcattaggagtacactccgaatggagcttatgggttgcgacttgaattcctgttcaatgccactcggaatggagtctaaagccatctctgatgcacagataaccgccagtagctactttacgaacatgtttgctacgtggtcaccctctaaggcaaggcttcatttgcaaggccggtctaatgcctggagacctcaggtgaacaacccgaaagaatggctccaggtggactttcagaagaccatgaaagtaacaggtgtcactactcagggagttaagtccttggataccagcatgtatgtgaaggagttccttatttcctcatcacaagatggccaccagtggaccctcttctttcagaatggtaaggtcaaagtgtttcagggcaatcaagacagcttcacacccgtggtgaacagtcttgatcctccactcttgacacgataccttcgaatccatccacagtcttgggttcaccagattgcattgcgcatggaagtacttggatgcgaggctcaggacctctac

SEQ ID NO: 626 - protein, 1457 aa, synthetic construct
  REGION 1..1457: note = Variant of human B-domain deleted Factor VIII
MQIELSTCFFLCLLRFCFSATRRYYLGAVELSWDYMQSDLGELPVDARFPPRVPKSFPFNTSGVYKKTLFVEFTDHLFNIAKPRPPWMGLLGPTIQAEVYDTVVITLKNMASHPVSLHAVGVSYWKASEGAEYDDQTSQREKEDDKVFPGGSHTYVWQVLKENGPMASDPLCLTYSYLSHVDLVKDLNSGLIGALLVCREGSLAKEKTQTLHKFILLFAVFDEGKSWHSETKNSLMQDRDAASARAWPKMHTVNGYVNRSLPGLIGCHRKSVYWHVIGMGTTPEVHSIFLEGHTFLVRNHRQASLEISPITFLTAQTLLMDLGQFLLFCHISSHQHDGMEAYVKVDSCPEEPQLRMKNNEEAEDYDDDLTDSEMDVVRFDDDNSPSFIQIRSVAKKHPKTWVHYIAAEEEDWDYAPLVLAPDDRSYKSQYLNNGPQRIGRKYKKVRFMAYTDETFKTREAIQHESGILGPLLYGEVGDTLLIIFKNQASRPYNIYPHGITDVRPLYSRRLPKGVKHLKDFPILPGEIFKYKWTVTVEDGPTKSDPRCLTRYYSSFVNMERDLASGLIGPLLICYKESVDQRGNQIMSDKRNVILFSVFDENRSWYLTENIQRFLPNPAGVQLEDPEFQASNIMHSINGYVFDSLQLSVCLHEVAYWYILSIGAQTDFLSVFFSGYTFKHKMVYEDTLTLFPFSGETVFMSMENPGLWILGCHNSDFRNRGMTALLKVSSCDKNTGDYYEDSYEDISAYLLSKNNAIEPRSFSQNPPVLKRHQREITRTTLQSDQEEIDYDDTISVEMKKEDFDIYDEDENQSPRSFQKKTRHYFIAAVERLWDYGMSSSPHVLRNRAQSGSVPQFKKVVFQEFTDGSFTQPLYRGELNEHLGLLGPYIRAEVEDNIMVTFRNQASRPYSFYSSLISYEEDQRQGAEPRKNFVKPNETKTYFWKVQHHMAPTKDEFDCKAWAYFSDVDLEKDVHSGLIGPLLVCHTNTLNPAHGRQVTVQEFALFFTIFDETKSWYFTENMERNCRAPCNIQMEDPTFKENYRFHAINGYIMDTLPGLVMAQDQRIRWYLLSMGSNENIHSIHFSGHVFTVRKKEEYKMALYNLYPGVFETVEMLPSKAGIWRVECLIGEHLHAGMSTLFLVYSNKCQTPLGMASGHIRDFQITASGQYGQWAPKLARLHYSGSINAWSTKEPFSWIKVDLLAPMIIHGIKTQGARQKFSSLYISQFIIMYSLDGKKWQTYRGNSTGTLMVFFGNVDSSGIKHNIFNPPIIARYIRLHPTHYSIRSTLRMELMGCDLNSCSMPLGMESKAISDAQITASSYFTNMFATWSPSKARLHLQGRSNAWRPQVNNPKEWLQVDFQKTMKVTGVTTQGVKSLDTSMYVKEFLISSSQDGHQWTLFFQNGKVKVFQGNQDSFTPVVNSLDPPLLTRYLRIHPQSWVHQIALRMEVLGCEAQDLY

SEQ ID NO: 627 - DNA, 4371 bp, synthetic construct
  misc_feature 1..4371: note = Variant of human B-domain deleted Factor VIII
  source 1..4371: mol_type = other DNA
atgcagattgaactgtctacctgcttcttcctctgtttgctgaggttctgctttagcgccactagacggtactaccttggcgctgtggagctgtcctgggactatatgcagagtgatttgggagagcttcccgtcgacgcacgatttcctcctcgcgttccaaagtcatttcccttcaacacaagcgtggtgtacaagaagacgctcttcgtcgaattcaccgatcacctgttcaatatcgccaaacccagaccaccatggatgggtcttttggggcctaccatacaagcggaggtgtatgacacagttgttatcactctcaagaacatggcttctcatccggtaagtcttcacgcagtgggcgtgtcctactggaaagcttcagaaggagccgagtatgatgatcagacatcccagagggagaaagaagacgacaaggtatttccaggtgggtctcatacctatgtgtggcaagtgctcaaagagaatggccctatggcaagcgatccgctctgtttgacttacagctacctttcacacgttgacctcgtcaaggacctcaactccgggttgattggagccttgttggtatgcagggaaggatctcttgccaaagagaagacacagaccctccacaagtttatccttctctttgctgtgttcgatgagggcaaaagttggcatagcgaaacgaagaattccctcatgcaggatcgcgacgcagccagcgccagagcttggcccaagatgcacactgtgaacggatatgtcaataggtcacttcctggcttgattgggtgtcatcggaaaagtgtctactggcacgtgatcggaatggggacaacaccagaggtccactccatatttctcgaaggccataccttccttgttcgaaaccacagacaggcatccttggagatctctcccattacctttctcactgcccaaacgctccttatggacttgggtcagttccttctcttctgccatatcagctcacaccagcatgatggtatggaagcttatgtgaaagtcgacagttgtcctgaggagccacagttgcgcatgaagaataatgaagaagccgaggattacgacgacgatctcaccgattctgagatggacgtggtgaggtttgatgacgacaactctccctccttcattcaaatccggagcgtggcgaagaaacaccccaagacttgggtccactatatagcggcggaagaggaggattgggattacgctcctcttgtattggcaccagatgaccgctcatacaaaagccagtacctcaacaacggaccgcagagaattggccggaagtataagaaagtgcgatttatggcctatacagacgaaacctttaagacaagggaggccatccagcatgagagtgggattttgggacctcttctttacggcgaagttggtgataccctcctcatcatcttcaagaatcaagcttctcgcccctataacatttacccacacgggatcactgacgttaggcctttgtatagcagaagacttcccaaaggcgtgaagcatctcaaagacttccccattttgccaggcgagatctttaagtacaaatggaccgtcacagtggaagatggaccgactaaatcagaccctcgatgccttacgcggtactattcctccttcgtgaatatggagagagatttggcaagcggactcataggaccactcctcatctgttacaaggaatctgtagaccagaggggtaaccagattatgagtgataaacgcaatgtgatcctttttagcgtcttcgacgagaaccggtcctggtacttgaccgagaatatacaaaggttccttcccaaccccgcaggcgttcagttggaagaccctgagtttcaggccagcaatattatgcactcaatcaacggctatgtgtttgatagtctccagctttctgtttgcctccatgaagtagcctattggtacatcttgtcaattggtgctcaaacagacttcctctccgtcttcttctccggctacacctttaagcacaagatggtgtatgaggacactctcacactctttccattttctggagaaaccgtgttcatgagcatggagaatccaggcctttggatcttgggttgccacaacagtgattttcgcaatcggggaatgactgctctcctcaaagtcagcagctgtgataagaacacaggcgactattacgaagattcttacgaggacataagtgcctacttgttgtccaagaataacgccattgagcccagatcattctcccagaatcctcccgtgcttaaaaggcatcagcgcgaaatcaccagaactactcttcagtctgatcaagaggagattgactatgacgacaccataagcgtggaaatgaagaaggaggatttcgatatctatgacgaagatgagaaccagtctccgcggagctttcagaagaagacgcgacactacttcattgcagcagtcgaaaggctttgggactacggtatgtcatcatcccctcatgtgttgcgcaatagagctcagagtggaagtgttccacagttcaagaaagtcgtctttcaagagtttacagatggcagcttcacacagcctctctatcggggcgagcttaacgaacatttgggactccttggtccctatatccgagccgaagtggaggacaacattatggttacctttaggaatcaagcctctcgcccctacagcttctactcctccctcatcagttatgaggaggatcagagacaaggcgctgaaccacggaagaactttgtgaaaccgaatgagacgaagacctacttctggaaagtacagcaccacatggcccccacaaaagacgaattcgattgcaaagcatgggcgtatttttcagacgttgacttggagaaagatgtacattcaggacttattggtcctttgttggtgtgtcacactaacactctcaatccagcccatggcaggcaggtgacagtccaggaattcgctcttttctttaccatctttgatgagaccaagtcctggtacttcacggaaaacatggagcgcaattgcagagccccctgtaacatacagatggaggaccctacctttaaggaaaattatcggttccacgcaatcaacggatacattatggatacactccctggccttgtgatggctcaggaccaacgaatcaggtggtacctcctcagcatgggttctaatgagaacatacactccattcacttttcaggacatgtgttcactgtccggaagaaagaagagtataagatggccctctacaatttgtatccaggcgtgtttgagaccgttgaaatgcttccctctaaagctggcatctggagagtagagtgcttgatcggagaacatcttcacgcaggtatgagcaccttgttcctcgtgtacagcaacaaatgtcagaccccacttggcatggccagtggacacattcgcgactttcagatcacagcatctggccagtatggacaatgggccccaaagttggctcgcctccattactccggtagcataaatgcgtggtccactaaagaacctttcagctggattaaggtcgatcttcttgcccccatgatcatccacggcattaagacacagggagcgaggcagaaattctcctccctctacatctcacagttcattattatgtatagtttggacggcaagaagtggcaaacttatagaggtaacagtactggaacactgatgacgttcttcggcaacgttgatagctctggcatcaaacacaacatctttaatcctcccataatagctcggtacatcagattgcatccgacccactacagcattaggagtacactccgaatggagcttatgggttgcgacttgaattcctgttcaatgccactcggaatggagtctaaagccatctctgatgcacagataaccgccagtagctactttacgaacatgtttgctacgtggtcaccctctaaggcaaggcttcatttgcaaggccggtctaatgcctggagacctcaggtgaacaacccgaaagaatggctccaggtggactttcagaagaccatgaaagtaacaggtgtcactactcagggagttaagtccttggataccagcatgtatgtgaaggagttccttatttcctcatcacaagatggccaccagtggaccctcttctttcagaatggtaaggtcaaagtgtttcagggcaatcaagacagcttcacacccgtggtgaacagtcttgatcctccactcttgacacgataccttcgaatccatccacagtcttgggttcaccagattgcattgcgcatggaagtacttggatgcgaggctcaggacctctac

SEQ ID NO: 628 - protein, 1457 aa, synthetic construct
  REGION 1..1457: note = Variant of human B-domain deleted Factor VIII
MQIELSTCFFLCLLRFCFSATRRYYLGAVELSWDYMQSDLGELPVDARFPPRVPKSFPFNTSVVYKKTLFVEFTDHLFNIAKPRPPWMGLLGPTIQAEVYDTVVITLKNMASHPVSLHAVGVSYWKASEGAEYDDQTSQREKEDDKVFPGGSHTYVWQVLKENGPMASDPLCLTYSYLSHVDLVKDLNSGLIGALLVCREGSLAKEKTQTLHKFILLFAVFDEGKSWHSETKNSLMQDRDAASARAWPKMHTVNGYVNRSLPGLIGCHRKSVYWHVIGMGTTPEVHSIFLEGHTFLVRNHRQASLEISPITFLTAQTLLMDLGQFLLFCHISSHQHDGMEAYVKVDSCPEEPQLRMKNNEEAEDYDDDLTDSEMDVVRFDDDNSPSFIQIRSVAKKHPKTWVHYIAAEEEDWDYAPLVLAPDDRSYKSQYLNNGPQRIGRKYKKVRFMAYTDETFKTREAIQHESGILGPLLYGEVGDTLLIIFKNQASRPYNIYPHGITDVRPLYSRRLPKGVKHLKDFPILPGEIFKYKWTVTVEDGPTKSDPRCLTRYYSSFVNMERDLASGLIGPLLICYKESVDQRGNQIMSDKRNVILFSVFDENRSWYLTENIQRFLPNPAGVQLEDPEFQASNIMHSINGYVFDSLQLSVCLHEVAYWYILSIGAQTDFLSVFFSGYTFKHKMVYEDTLTLFPFSGETVFMSMENPGLWILGCHNSDFRNRGMTALLKVSSCDKNTGDYYEDSYEDISAYLLSKNNAIEPRSFSQNPPVLKRHQREITRTTLQSDQEEIDYDDTISVEMKKEDFDIYDEDENQSPRSFQKKTRHYFIAAVERLWDYGMSSSPHVLRNRAQSGSVPQFKKVVFQEFTDGSFTQPLYRGELNEHLGLLGPYIRAEVEDNIMVTFRNQASRPYSFYSSLISYEEDQRQGAEPRKNFVKPNETKTYFWKVQHHMAPTKDEFDCKAWAYFSDVDLEKDVHSGLIGPLLVCHTNTLNPAHGRQVTVQEFALFFTIFDETKSWYFTENMERNCRAPCNIQMEDPTFKENYRFHAINGYIMDTLPGLVMAQDQRIRWYLLSMGSNENIHSIHFSGHVFTVRKKEEYKMALYNLYPGVFETVEMLPSKAGIWRVECLIGEHLHAGMSTLFLVYSNKCQTPLGMASGHIRDFQITASGQYGQWAPKLARLHYSGSINAWSTKEPFSWIKVDLLAPMIIHGIKTQGARQKFSSLYISQFIIMYSLDGKKWQTYRGNSTGTLMTFFGNVDSSGIKHNIFNPPIIARYIRLHPTHYSIRSTLRMELMGCDLNSCSMPLGMESKAISDAQITASSYFTNMFATWSPSKARLHLQGRSNAWRPQVNNPKEWLQVDFQKTMKVTGVTTQGVKSLDTSMYVKEFLISSSQDGHQWTLFFQNGKVKVFQGNQDSFTPVVNSLDPPLLTRYLRIHPQSWVHQIALRMEVLGCEAQDLY

SEQ ID NO: 629 - DNA, 4371 bp, synthetic construct
  misc_feature 1..4371: note = Variant of human B-domain deleted Factor VIII
  source 1..4371: mol_type = other DNA
atgcagattgaactgtctacctgcttcttcctctgtttgctgaggttctgctttagcgccactagacggtactaccttggcgctgtggagctgtcctgggactatatgcagagtgatttgggagagcttcccgtcgacgcacgatttcctcctcgcgttccaaagtcatttccctttaacacaagccgtgtgtacaagaagacgctcttcgtcgaattcaccgatcacctgttcaatatcgccaaacccagaccaccatggatgggtcttttggggcctaccatacaagcggaggtgtatgacacagttgttatcactctcaagaacatggcttctcatccggtaagtcttcacgcagtgggcgtgtcctactggaaagcttcagaaggagccgagtatgatgatcagacatcccagagggagaaagaagacgacaaggtatttccaggtgggtctcatacctatgtgtggcaagtgctcaaagagaatggccctatggcaagcgatccgctctgtttgacttacagctacctttcacacgttgacctcgtcaaggacctcaactccgggttgattggagccttgttggtatgcagggaaggatctcttgccaaagagaagacacagaccctccacaagtttatccttctctttgctgtgttcgatgagggcaaaagttggcatagcgaaacgaagaattccctcatgcaggatcgcgacgcagccagcgccagagcttggcccaagatgcacactgtgaacggatatgtcaataggtcacttcctggcttgattgggtgtcatcggaaaagtgtctactggcacgtgatcggaatggggacaacaccagaggtccactccatatttctcgaaggccataccttccttgttcgaaaccacagacaggcatccttggggatctctcccattacctttctcactgcccaaacgctccttatggacttgggtcagttccttctcttctgccatatcagctcacaccagcatgatggtatggaagcttatgtggaggtcgacagttgtggggaggagccacagcgtcgcatgaagaataatgaagaagccgaggattacgacgacgatctcaccgattctgagatggacgtggtgaggtttgatgacgacaactctccctccttcattcaaatccggagcgtggcgaagaaacaccccaagacttgggtccactatatagcggcggaagaggaggattgggattacgctcctcttgtattggcaccagatgaccgctcatacaaaagccagtacctcaacaacggaccgcagagaattggccggaagtataagaaagtgcgatttatggcctatacagacgaaacctttaagacaagggaggccatccagcatgagagtgggattttgggacctcttctttacggcgaagttggtgataccctcctcatcatcttcaagaatcaagcttctcgcccctataacatttacccacacgggatcactgacgttagccctttgtatagcagaagacttcccaaaggcgtgaagcatctcaaagacttccccattttgccaggcgagatctttaagtacaaatggaccgtcacagtggaagatggaccgactaaatcagaccctcgatgccttacgcggtactattcctccttcgtgaatatggagagagatttggcaagcggactcataggaccactcctcatctgttacaaggaatctgtagaccagaggggtaaccagattatgagtgataaacgcaatgtgatcctttttagcgtcttcgacgagaaccggtcctggtacttgaccgagaatatacaaaggttccttcccaaccccgcaggcgttcagttggaagaccctgagtttcaggccagcaatattatgcactcaatcaacggctatgtgtttgatagtctccagctttctgtttgcctccatgaagtagcctattggtacatcttgtcaattggtgctcaaacagacttcctctccgtcttcttctccggctacacctttaagcacaagatggtgtatgaggacactctcacactctttccattttctggagaaaccgtgttcatgagcatggagaatccaggcctgtggattttgggttgccacaacagtgattttcgcaatcggggaatgactgctctcctcaaagtcagcagctgtgataagaacacaggcgactattacgaagattcttacgaggacataagtgcctacttgttgtccaagaataacgccattgagcccagatcattctcccagaatcctcccgtgcttaaaaggcatcagcgcgaaatcaccagaactactcttcagtctgatcaagaggagattgactatgacgacaccataagcgtggaaatgaagaaggaggatttcgatatctatgacgaagatgagaaccagtctccgcggagctttcagaagaagacgcgacactacttcattgcagcagtcgaaaggctttgggactacggtatgtcatcatcccctcatgtgttgcgcaatagagctcagagtggaagtgttccacagttcaagaaagtcgtctttcaagagtttacagatggcagcttcacacagcctctctatcggggcgagcttaacgaacatttgggactccttggtccctatatccgagccgaagtggaggacaacattatggttacctttaggaatcaagcctctcgcccctacagcttctactcctccctcatcagttatgaggaggatcagagacaaggcgctgaaccacggaagaactttgtgaaaccgaatgagacgaagacctacttctggaaagtacagcaccacatggcccccacaaaagacgaattcgattgcaaagcatgggcgtatttttcagacgttgacttggagaaagatgtacattcaggacttattggtcctttgttggtgtgtcacactaacactctcaatccagcccatggcaggcaggtgacagtccaggaattcgctcttttctttaccatctttgatgagaccaagtcctggtacttcacggaaaacatggagcgcaattgcagagccccctgtaacatacagatggaggaccctacctttaaggaaaattatcggttccacgcaatcaacggatacattatggatacactccctggccttgtgatggctcaggaccaacgaatcaggtggtacctcctcagcatgggttctaatgagaacatacactccattcacttttcaggacatgtgttcactgtccggaagaaagaagagtataagatggccctctacaatttgtatccaggcgtgtttgagaccgttgaaatgcttccctctaaagctggcatctggagagtagagtgcttgatcggagaacatcttcacgcaggtatgagcaccttgttcctcgtgtacagcaacaaatgtcagaccccacttggcatggccagtggacacattcgcgactttcagatcacagcatctggccagtatggacaatgggccccaaagttggctcgcctccattactccggtagcataaatgcgtggtccactaaagaacctttcagctggattaaggtcgatcttcttgcccccatgatcatccacggcattaagacacagggagcgaggcagaaattctcctccctctacatctcacagttcattattatgtatagtttggacggcaagaagtggcaaacttatagaggtaacagtactggaacacgcatggttttcttcggcaacgttgatagctctggcatcaaacacaacatctttaatcctcccataatagctcggtacatcagattgcatccgacccactacagcattaggagtacactccgaatggagcttatgggttgcgacttgaattcctgttcaatgccactcggaatggagtctaaagccatctctgatgcacagataaccgccagtagctactttacgaacatgtttgctacgtggtcaccctctaaggcaaggcttcatttgcaaggccggtctaatgcctggagacctcaggtgaacaacccgaaagaatggctccaggtggactttcagaagaccatgaaagtaacaggtgtcactactcagggagttaagtccttggataccagcatgtatgtgaaggagttccttatttcctcatcacaagatggccaccagtggaccctcttctttcagaatggtaaggtcaaagtgtttcagggcaatcaagacagcttcacacccgtggtgaacagtcttgatcctccactcttgacacgataccttcgaatccatccacagtcttgggttcaccagattgcattgcgcatggaagtacttggatgcgaggctcaggacctctac

SEQ ID NO: 630 - protein, 1457 aa, synthetic construct
  REGION 1..1457: note = Variant of human B-domain deleted Factor VIII
MQIELSTCFFLCLLRFCFSATRRYYLGAVELSWDYMQSDLGELPVDARFPPRVPKSFPFNTSRVYKKTLFVEFTDHLFNIAKPRPPWMGLLGPTIQAEVYDTVVITLKNMASHPVSLHAVGVSYWKASEGAEYDDQTSQREKEDDKVFPGGSHTYVWQVLKENGPMASDPLCLTYSYLSHVDLVKDLNSGLIGALLVCREGSLAKEKTQTLHKFILLFAVFDEGKSWHSETKNSLMQDRDAASARAWPKMHTVNGYVNRSLPGLIGCHRKSVYWHVIGMGTTPEVHSIFLEGHTFLVRNHRQASLGISPITFLTAQTLLMDLGQFLLFCHISSHQHDGMEAYVEVDSCGEEPQRRMKNNEEAEDYDDDLTDSEMDVVRFDDDNSPSFIQIRSVAKKHPKTWVHYIAAEEEDWDYAPLVLAPDDRSYKSQYLNNGPQRIGRKYKKVRFMAYTDETFKTREAIQHESGILGPLLYGEVGDTLLIIFKNQASRPYNIYPHGITDVSPLYSRRLPKGVKHLKDFPILPGEIFKYKWTVTVEDGPTKSDPRCLTRYYSSFVNMERDLASGLIGPLLICYKESVDQRGNQIMSDKRNVILFSVFDENRSWYLTENIQRFLPNPAGVQLEDPEFQASNIMHSINGYVFDSLQLSVCLHEVAYWYILSIGAQTDFLSVFFSGYTFKHKMVYEDTLTLFPFSGETVFMSMENPGLWILGCHNSDFRNRGMTALLKVSSCDKNTGDYYEDSYEDISAYLLSKNNAIEPRSFSQNPPVLKRHQREITRTTLQSDQEEIDYDDTISVEMKKEDFDIYDEDENQSPRSFQKKTRHYFIAAVERLWDYGMSSSPHVLRNRAQSGSVPQFKKVVFQEFTDGSFTQPLYRGELNEHLGLLGPYIRAEVEDNIMVTFRNQASRPYSFYSSLISYEEDQRQGAEPRKNFVKPNETKTYFWKVQHHMAPTKDEFDCKAWAYFSDVDLEKDVHSGLIGPLLVCHTNTLNPAHGRQVTVQEFALFFTIFDETKSWYFTENMERNCRAPCNIQMEDPTFKENYRFHAINGYIMDTLPGLVMAQDQRIRWYLLSMGSNENIHSIHFSGHVFTVRKKEEYKMALYNLYPGVFETVEMLPSKAGIWRVECLIGEHLHAGMSTLFLVYSNKCQTPLGMASGHIRDFQITASGQYGQWAPKLARLHYSGSINAWSTKEPFSWIKVDLLAPMIIHGIKTQGARQKFSSLYISQFIIMYSLDGKKWQTYRGNSTGTRMVFFGNVDSSGIKHNIFNPPIIARYIRLHPTHYSIRSTLRMELMGCDLNSCSMPLGMESKAISDAQITASSYFTNMFATWSPSKARLHLQGRSNAWRPQVNNPKEWLQVDFQKTMKVTGVTTQGVKSLDTSMYVKEFLISSSQDGHQWTLFFQNGKVKVFQGNQDSFTPVVNSLDPPLLTRYLRIHPQSWVHQIALRMEVLGCEAQDLY

SEQ ID NO: 631 - DNA, 4371 bp, synthetic construct
  misc_feature 1..4371: note = Variant of human B-domain deleted Factor VIII
  source 1..4371: mol_type = other DNA
atgcagattgaactgtctacctgcttcttcctctgtttgctgaggttctgctttagcgccactagacggtactaccttggcgctgtggagctgtcctgggactatatgcagagtgatttgggagagcttcccgtcgacgcacgatttcctcctcgcgttccaaagtcatttcccgataacacaagcagtgtgtacaagaagacgctcttcgtcgaattcaccgatcacctgttcaatatcgccaaacccagaccaccatggatgggtcttttggggcctaccatacaagcggaggtgtatgacacagttgttatcactctcaagaacatggcttctcatccggtaagtcttcacgcagtgggcgtgtcctactggaaagcttcagaaggagccgagtatgatgatcagacatcccagagggagaaagaagacgacaaggtatttccaggtgggtctcatacctatgtgtggcaagtgctcaaagagaatggccctatggcaagcgatccgctctgtttgacttacagctacctttcacacgttgacctcgtcaaggacctcaactccgggttgattggagccttgttggtatgcagggaaggatctcttgccaaagagaagacacagaccctccacaagtttatccttctctttgctgtgttcgatgagggcaaaagttggcatagcgaaacgaagaattccctcatgcaggatcgcgacgcagccagcgccagagcttggcccaagatgcacactgtgaacggatatgtcaataggtcacttcctggcttgattgggtgtcatcggaaaagtgtctactggcacgtgatcggaatggggacaacaccagaggtccactccatatttctcgaaggccataccttccttgttcgaaaccacagacaggcatccttggagatctctcccattacctttctcactgcccaaacgctccttatggacttgggtcagttccttctcttctgccatatcccgtcacaccagcatgatggtatggaagcttatgtgaaggtcgacagttgtggggaggagccacagctgcgcatgaagaataatgaagaagccgaggattacgacgacgatctcaccgattctgagatggacgtggtgaggtttgatgacgacaactctccctccttcattcaaatccggagcgtggcgaagaaacaccccaagacttgggtccactatatagcggcggaagaggaggattgggattacgctcctcttgtattggcaccagatgaccgctcatacaaaagccagtacctcaacaacggaccgcagagaattggccggaagtataagaaagtgcgatttatggcctatacagacgaaacctttaagacaagggaggccatccagcatgagagtgggattttgggacctcttctttacggcgaagttggtgataccctcctcatcatcttcaagaatcaagcttctcgcccctataacatttacccacacgggatcactgacgttagccctttgtatagcagaagacttcccaaaggcgtgaagcatctcaaagacttccccattttgccaggcgagatctttaagtacaaatggaccgtcacagtggaagatggaccgactaaatcagaccctcgatgccttacgcggtactattcctccttcgtgaatatggagagagatttggcaagcggactcataggaccactcctcatctgttacaaggaatctgtagaccagaggggtaaccagattatgagtgataaacgcaatgtgatcctttttagcgtcttcgacgagaaccggtcctggtacttgaccgagaatatacaaaggttccttcccaaccccgcaggcgttcagttggaagaccctgagtttcaggccagcaatattatgcactcaatcaacggctatgtgtttgatagtctccagctttctgtttgcctccatgaagtagcctattggtacatcttgtcaattggtgctcaaacagacttcctctccgtcttcttctccggctacacctttaagcacaagatggtgtatgaggacactctcacactctttccattttctggagaaaccgtgttcatgagcatggagaatccaggcatgtggaaattgggttgccacaacagtgattttcgcaatcggggaatgactgctctcctcaaagtcagcagctgtgataagaacacaggcgactattacgaagattcttacgaggacataagtgcctacttgttgtccaagaataacgccattgagcccagatcattctcccagaatcctcccgtgcttaaaaggcatcagcgcgaaatcaccagaactactcttcagtctgatcaagaggagattgactatgacgacaccataagcgtggaaatgaagaaggaggatttcgatatctatgacgaagatgagaaccagtctccgcggagctttcagaagaagacgcgacactacttcattgcagcagtcgaaaggctttgggactacggtatgtcatcatcccctcatgtgttgcgcaatagagctcagagtggaagtgttccacagttcaagaaagtcgtctttcaagagtttacagatggcagcttcacacagcctctctatcggggcgagcttaacgaacatttgggactccttggtccctatatccgagccgaagtggaggacaacattatggttacctttaggaatcaagcctctcgcccctacagcttctactcctccctcatcagttatgaggaggatcagagacaaggcgctgaaccacggaagaactttgtgaaaccgaatgagacgaagacctacttctggaaagtacagcaccacatggcccccacaaaagacgaattcgattgcaaagcatgggcgtatttttcagacgttgacttggagaaagatgtacattcaggacttattggtcctttgttggtgtgtcacactaacactctcaatccagcccatggcaggcaggtgacagtccaggaattcgctcttttctttaccatctttgatgagaccaagtcctggtacttcacggaaaacatggagcgcaattgcagagccccctgtaacatacagatggaggaccctacctttaaggaaaattatcggttccacgcaatcaacggatacattatggatacactccctggccttgtgatggctcaggaccaacgaatcaggtggtacctcctcagcatgggttctaatgagaacatacactccattcacttttcaggacatgtgttcactgtccggaagaaagaagagtataagatggccctctacaatttgtatccaggcgtgtttgagaccgttgaaatgcttccctctaaagctggcatctggagagtagagtgcttgatcggagaacatcttcacgcaggtatgagcaccttgttcctcgtgtacagcaacaaatgtcagaccccacttggcatggccagtggacacattcgcgactttcagatcacagcatctggccagtatggacaatgggccccaaagttggctcgcctccattactccggtagcataaatgcgtggtccactaaagaacctttcagctggattaaggtcgatcttcttgcccccatgatcatccacggcattaagacacagggagcgaggcagaaattctcctccctctacatctcacagttcattattatgtatagtttggacggcaagaagtggcaaacttatagaggtaacagtactggaacactgatggttttcttcggcaacgttgatagctctggcatcaaacacaacatctttaatcctcccataatagctcggtacatcagattgcatccgacccactacagcattaggagtacactccgaatggagcttatgggttgcgacttgaattcctgttcaatgccactcggaatggagtctaaagccatctctgatgcacagataaccgccagtagctactttacgaacatgtttgctacgtggtcaccctctaaggcaaggcttcatttgcaaggccggtctaatgcctggagacctcaggtgaacaacccgaaagaatggctccaggtggactttcagaagaccatgaaagtaacaggtgtcactactcagggagttaagtccttggataccagcatgtatgtgaaggagttccttatttcctcatcacaagatggccaccagtggaccctcttctttcagaatggtaaggtcaaagtgtttcagggcaatcaagacagcttcacacccgtggtgaacagtcttgatcctccactcttgacacgataccttcgaatccatccacagtcttgggttcaccagattgcattgcgcatggaagtacttggatgcgaggctcaggacctctac

SEQ ID NO: 632 - protein, 1457 aa, synthetic construct
  REGION 1..1457: note = Variant of human B-domain deleted Factor VIII
MQIELSTCFFLCLLRFCFSATRRYYLGAVELSWDYMQSDLGELPVDARFPPRVPKSFPDNTSSVYKKTLFVEFTDHLFNIAKPRPPWMGLLGPTIQAEVYDTVVITLKNMASHPVSLHAVGVSYWKASEGAEYDDQTSQREKEDDKVFPGGSHTYVWQVLKENGPMASDPLCLTYSYLSHVDLVKDLNSGLIGALLVCREGSLAKEKTQTLHKFILLFAVFDEGKSWHSETKNSLMQDRDAASARAWPKMHTVNGYVNRSLPGLIGCHRKSVYWHVIGMGTTPEVHSIFLEGHTFLVRNHRQASLEISPITFLTAQTLLMDLGQFLLFCHIPSHQHDGMEAYVKVDSCGEEPQLRMKNNEEAEDYDDDLTDSEMDVVRFDDDNSPSFIQIRSVAKKHPKTWVHYIAAEEEDWDYAPLVLAPDDRSYKSQYLNNGPQRIGRKYKKVRFMAYTDETFKTREAIQHESGILGPLLYGEVGDTLLIIFKNQASRPYNIYPHGITDVSPLYSRRLPKGVKHLKDFPILPGEIFKYKWTVTVEDGPTKSDPRCLTRYYSSFVNMERDLASGLIGPLLICYKESVDQRGNQIMSDKRNVILFSVFDENRSWYLTENIQRFLPNPAGVQLEDPEFQASNIMHSINGYVFDSLQLSVCLHEVAYWYILSIGAQTDFLSVFFSGYTFKHKMVYEDTLTLFPFSGETVFMSMENPGMWKLGCHNSDFRNRGMTALLKVSSCDKNTGDYYEDSYEDISAYLLSKNNAIEPRSFSQNPPVLKRHQREITRTTLQSDQEEIDYDDTISVEMKKEDFDIYDEDENQSPRSFQKKTRHYFIAAVERLWDYGMSSSPHVLRNRAQSGSVPQFKKVVFQEFTDGSFTQPLYRGELNEHLGLLGPYIRAEVEDNIMVTFRNQASRPYSFYSSLISYEEDQRQGAEPRKNFVKPNETKTYFWKVQHHMAPTKDEFDCKAWAYFSDVDLEKDVHSGLIGPLLVCHTNTLNPAHGRQVTVQEFALFFTIFDETKSWYFTENMERNCRAPCNIQMEDPTFKENYRFHAINGYIMDTLPGLVMAQDQRIRWYLLSMGSNENIHSIHFSGHVFTVRKKEEYKMALYNLYPGVFETVEMLPSKAGIWRVECLIGEHLHAGMSTLFLVYSNKCQTPLGMASGHIRDFQITASGQYGQWAPKLARLHYSGSINAWSTKEPFSWIKVDLLAPMIIHGIKTQGARQKFSSLYISQFIIMYSLDGKKWQTYRGNSTGTLMVFFGNVDSSGIKHNIFNPPIIARYIRLHPTHYSIRSTLRMELMGCDLNSCSMPLGMESKAISDAQITASSYFTNMFATWSPSKARLHLQGRSNAWRPQVNNPKEWLQVDFQKTMKVTGVTTQGVKSLDTSMYVKEFLISSSQDGHQWTLFFQNGKVKVFQGNQDSFTPVVNSLDPPLLTRYLRIHPQSWVHQIALRMEVLGCEAQDLY

SEQ ID NO: 633 - DNA, 4371 bp, synthetic construct
  misc_feature 1..4371: note = Variant of human B-domain deleted Factor VIII
  source 1..4371: mol_type = other DNA
atgcagattgaactgtctacctgcttcttcctctgtttgctgaggttctgctttagcgccactagacggtactaccttggcgctgtggagctgtcctgggactatatgcagagtgatttgggagagcttcccgtcgacgcacgatttcctcctcgcgttccaaagtcatttccctttaacacaagcagtgtgtacaagaagacgctcttcgtcgaattcaccgatcacctgttcaatatcgccaaacccagaccaccatggatgggtcttttggggcctaccatacaagcggaggtgtatgacacagttgttatcactctcaagaacatggcttctcatccggtaagtcttcacgcagtgggcgtgtcctactggaaagcttcagaaggagccgagtatgatgatcagacatcccagagggagaaagaagacgacaaggtatttccaggtgggtctcatacctatgtgtggcaagtgctcaaagagaatggccctatggcaagcgatccgctctgtttgacttacagctacctttcacacgttgacctcgtcaaggacctcaactccgggttgattggagccttgttggtatgcagggaaggatctcttgccaaagagaagacacagaccctccacaagtttatccttctctttgctgtgttcgatgagggcaaaagttggcatagcgaaacgaagaattccctcatgcaggatcgcgacgcagccagcgccagagcttggcccaagatgcacactgtgaacggatatgtcaataggtcacttcctggcttgattgggtgtcatcggaaaagtgtctactggcacgtgatcggaatggggacaacaccagaggtccactccatatttctcgaaggccataccttccttgttcgaaaccacagacaggcatccttggggatctctcccattacctttctcactgcccaaacgctccttatggacttgggtcagttccttctcttctgccatatcagctcacaccagcatgatggtatggaagcttatgtggcggtcgacagttgtggggaggagccacagcgtcgcatgaagaataatgaagaagccgaggattacgacgacgatctcaccgattctgagatggacgtggtgaggtttgatgacgacaactctccctccttcattcaaatccggagcgtggcgaagaaacaccccaagacttgggtccactatatagcggcggaagaggaggattgggattacgctcctcttgtattggcaccagatgaccgctcatacaaaagccagtacctcaacaacggaccgcagagaattggccggaagtataagaaagtgcgatttatggcctatacagacgaaacctttaagacaagggaggccatccagcatgagagtgggattttgggacctcttctttacggcgaagttggtgataccctcctcatcatcttcaagaatcaagcttctcgcccctataacatttacccacacgggatcactgacgttaggcctttgtatagcagaagacttcccaaaggcgtgaagcatctcaaagacttccccattttgccaggcgagatctttaagtacaaatggaccgtcacagtggaagatggaccgactaaatcagaccctcgatgccttacgcggtactattcctccttcgtgaatatggagagagatttggcaagcggactcataggaccactcctcatctgttacaaggaatctgtagaccagaggggtaaccagattatgagtgataaacgcaatgtgatcctttttagcgtcttcgacgagaaccggtcctggtacttgaccgagaatatacaaaggttccttcccaaccccgcaggcgttcagttggaagaccctgagtttcaggccagcaatattatgcactcaatcaacggctatgtgtttgatagtctccagctttctgtttgcctccatgaagtagcctattggtacatcttgtcaattggtgctcaaacagacttcctctccgtcttcttctccggctacacctttaagcacaagatggtgtatgaggacactctcacactctttccattttctggagaaaccgtgttcatgagcatggagaatccaggcatgtggattttgggttgccacaacagtgattttcgcaatcggggaatgactgctctcctcaaagtcagcagctgtgataagaacacaggcgactattacgaagattcttacgaggacataagtgcctacttgttgtccaagaataacgccattgagcccagatcattctcccagaatcctcccgtgcttaaaaggcatcagcgcgaaatcaccagaactactcttcagtctgatcaagaggagattgactatgacgacaccataagcgtggaaatgaagaaggaggatttcgatatctatgacgaagatgagaaccagtctccgcggagctttcagaagaagacgcgacactacttcattgcagcagtcgaaaggctttgggactacggtatgtcatcatcccctcatgtgttgcgcaatagagctcagagtggaagtgttccacagttcaagaaagtcgtctttcaagagtttacagatggcagcttcacacagcctctctatcggggcgagcttaacgaacatttgggactccttggtccctatatccgagccgaagtggaggacaacattatggttacctttaggaatcaagcctctcgcccctacagcttctactcctccctcatcagttatgaggaggatcagagacaaggcgctgaaccacggaagaactttgtgaaaccgaatgagacgaagacctacttctggaaagtacagcaccacatggcccccacaaaagacgaattcgattgcaaagcatgggcgtatttttcagacgttgacttggagaaagatgtacattcaggacttattggtcctttgttggtgtgtcacactaacactctcaatccagcccatggcaggcaggtgacagtccaggaattcgctcttttctttaccatctttgatgagaccaagtcctggtacttcacggaaaacatggagcgcaattgcagagccccctgtaacatacagatggaggaccctacctttaaggaaaattatcggttccacgcaatcaacggatacattatggatacactccctggccttgtgatggctcaggaccaacgaatcaggtggtacctcctcagcatgggttctaatgagaacatacactccattcacttttcaggacatgtgttcactgtccggaagaaagaagagtataagatggccctctacaatttgtatccaggcgtgtttgagaccgttgaaatgcttccctctaaagctggcatctggagagtagagtgcttgatcggagaacatcttcacgcaggtatgagcaccttgttcctcgtgtacagcaacaaatgtcagaccccacttggcatggccagtggacacattcgcgactttcagatcacagcatctggccagtatggacaatgggccccaaagttggctcgcctccattactccggtagcataaatgcgtggtccactaaagaacctttcagctggattaaggtcgatcttcttgcccccatgatcatccacggcattaagacacagggagcgaggcagaaattctcctccctctacatctcacagttcattattatgtatagtttggacggcaagaagtggcaaacttatagaggtaacagtactggaacacgcatggttttcttcggcaacgttgatagctctggcatcaaacacaacatctttaatcctcccataatagctcggtacatcagattgcatccgacccactacagcattaggagtacactccgaatggagcttatgggttgcgacttgaattcctgttcaatgccactcggaatggagtctaaagccatctctgatgcacagataaccgccagtagctactttacgaacatgtttgctacgtggtcaccctctaaggcaaggcttcatttgcaaggccggtctaatgcctggagacctcaggtgaacaacccgaaagaatggctccaggtggactttcagaagaccatgaaagtaacaggtgtcactactcagggagttaagtccttggataccagcatgtatgtgaaggagttccttatttcctcatcacaagatggccaccagtggaccctcttctttcagaatggtaaggtcaaagtgtttcagggcaatcaagacagcttcacacccgtggtgaacagtcttgatcctccactcttgacacgataccttcgaatccatccacagtcttgggttcaccagattgcattgcgcatggaagtacttggatgcgaggctcaggacctctac

SEQ ID NO: 634 - protein, 1457 aa, synthetic construct
  REGION 1..1457: note = Variant of human B-domain deleted Factor VIII
MQIELSTCFFLCLLRFCFSATRRYYLGAVELSWDYMQSDLGELPVDARFPPRVPKSFPFNTSSVYKKTLFVEFTDHLFNIAKPRPPWMGLLGPTIQAEVYDTVVITLKNMASHPVSLHAVGVSYWKASEGAEYDDQTSQREKEDDKVFPGGSHTYVWQVLKENGPMASDPLCLTYSYLSHVDLVKDLNSGLIGALLVCREGSLAKEKTQTLHKFILLFAVFDEGKSWHSETKNSLMQDRDAASARAWPKMHTVNGYVNRSLPGLIGCHRKSVYWHVIGMGTTPEVHSIFLEGHTFLVRNHRQASLGISPITFLTAQTLLMDLGQFLLFCHISSHQHDGMEAYVAVDSCGEEPQRRMKNNEEAEDYDDDLTDSEMDVVRFDDDNSPSFIQIRSVAKKHPKTWVHYIAAEEEDWDYAPLVLAPDDRSYKSQYLNNGPQRIGRKYKKVRFMAYTDETFKTREAIQHESGILGPLLYGEVGDTLLIIFKNQASRPYNIYPHGITDVRPLYSRRLPKGVKHLKDFPILPGEIFKYKWTVTVEDGPTKSDPRCLTRYYSSFVNMERDLASGLIGPLLICYKESVDQRGNQIMSDKRNVILFSVFDENRSWYLTENIQRFLPNPAGVQLEDPEFQASNIMHSINGYVFDSLQLSVCLHEVAYWYILSIGAQTDFLSVFFSGYTFKHKMVYEDTLTLFPFSGETVFMSMENPGMWILGCHNSDFRNRGMTALLKVSSCDKNTGDYYEDSYEDISAYLLSKNNAIEPRSFSQNPPVLKRHQREITRTTLQSDQEEIDYDDTISVEMKKEDFDIYDEDENQSPRSFQKKTRHYFIAAVERLWDYGMSSSPHVLRNRAQSGSVPQFKKVVFQEFTDGSFTQPLYRGELNEHLGLLGPYIRAEVEDNIMVTFRNQASRPYSFYSSLISYEEDQRQGAEPRKNFVKPNETKTYFWKVQHHMAPTKDEFDCKAWAYFSDVDLEKDVHSGLIGPLLVCHTNTLNPAHGRQVTVQEFALFFTIFDETKSWYFTENMERNCRAPCNIQMEDPTFKENYRFHAINGYIMDTLPGLVMAQDQRIRWYLLSMGSNENIHSIHFSGHVFTVRKKEEYKMALYNLYPGVFETVEMLPSKAGIWRVECLIGEHLHAGMSTLFLVYSNKCQTPLGMASGHIRDFQITASGQYGQWAPKLARLHYSGSINAWSTKEPFSWIKVDLLAPMIIHGIKTQGARQKFSSLYISQFIIMYSLDGKKWQTYRGNSTGTRMVFFGNVDSSGIKHNIFNPPIIARYIRLHPTHYSIRSTLRMELMGCDLNSCSMPLGMESKAISDAQITASSYFTNMFATWSPSKARLHLQGRSNAWRPQVNNPKEWLQVDFQKTMKVTGVTTQGVKSLDTSMYVKEFLISSSQDGHQWTLFFQNGKVKVFQGNQDSFTPVVNSLDPPLLTRYLRIHPQSWVHQIALRMEVLGCEAQDLY

SEQ ID NO: 635 - DNA, 4371 bp, synthetic construct
  misc_feature 1..4371: note = Variant of human B-domain deleted Factor VIII
  source 1..4371: mol_type = other DNA
atgcagattgaactgtctacctgcttcttcctctgtttgctgaggttctgctttagcgccactagacggtactaccttggcgctgtggagctgtcctgggactatatgcagagtgatttgggagagcttcccgtcgacgcacgatttcctcctcgcgttccaaagtcatttcccttcaacacaagcgtggtgtacaagaagacgctcttcgtcgaattcaccgatcacctgttcaatatcgccaaacccagaccaccatggatgggtcttttggggcctaccatacaagcggaggtgtatgacacagttgttatcactctcaagaacatggcttctcatccggtaagtcttcacgcagtgggcgtgtcctactggaaagcttcagaaggagccgagtatgatgatcagacatcccagagggagaaagaagacgacaaggtatttccaggtgggtctcatacctatgtgtggcaagtgctcaaagagaatggccctatggcaagcgatccgctctgtttgacttacagctacctttcacacgttgacctcgtcaaggacctcaactccgggttgattggagccttgttggtatgcagggaaggatctcttgccaaagagaagacacagaccctccacaagtttatccttctctttgctgtgttcgatgagggcaaaagttggcatagcgaaacgaagaattccctcatgcaggatcgcgacgcagccagcgccagagcttggcccaagatgcacactgtgaacggatatgtcaataggtcacttcctggcttgattgggtgtcatcggaaaagtgtctactggcacgtgatcggaatggggacaacaccagaggtccactccatatttctcgaaggccataccttccttgttcgaaaccacagacaggcatccttggagatctctcccattacctttctcactgcccaaacgctccttatggacttgggtcagttccttctcttctgccatatcagctcacaccagcatgatggtatggaagcttatgtgaaagtcgacagttgtcctgaggagccacagttgcgcatgaagaataatgaagaagccgaggattacgacgacgatctcaccgattctgagatggacgtggtgaggtttgatgacgacaactctccctccttcattcaaatccggagcgtggcgaagaaacaccccaagacttgggtccactatatagcggcggaagaggaggattgggattacgctcctcttgtattggcaccagatgaccgctcatacaaaagccagtacctcaacaacggaccgcagagaattggccggaagtataagaaagtgcgatttatggcctatacagacgaaacctttaagacaagggaggccatccagcatgagagtgggattttgggacctcttctttacggcgaagttggtgataccctcctcatcatcttcaagaatcaagcttctcgcccctataacatttacccacacgggatcactgacgttaggcctttgtatagcagaagacttcccaaaggcgtgaagcatctcaaagacttccccattttgccaggcgagatctttaagtacaaatggaccgtcacagtggaagatggaccgactaaatcagaccctcgatgccttacgcggtactattcctccttcgtgaatatggagagagatttggcaagcggactcataggaccactcctcatctgttacaaggaatctgtagaccagaggggtaaccagattatgagtgataaacgcaatgtgatcctttttagcgtcttcgacgagaaccggtcctggtacttgaccgagaatatacaaaggttccttcccaaccccgcaggcgttcagttggaagaccctgagtttcaggccagcaatattatgcactcaatcaacggctatgtgtttgatagtctccagctttctgtttgcctccatgaagtagcctattggtacatcttgtcaattggtgctcaaacagacttcctctccgtcttcttctccggctacacctttaagcacaagatggtgtatgaggacactctcacactctttccattttctggagaaaccgtgttcatgagcatggagaatccaggcctttggatcttgggttgccacaacagtgattttcgcaatcggggaatgactgctctcctcaaagtcagcagctgtgataagaacacaggcgactattacgaagattcttacgaggacataagtgcctacttgttgtccaagaataacgccattgagcccagatcattctcccagaatcctcccgtgcttaaaaggcatcagcgcgaaatcaccagaactactcttcagtctgatcaagaggagattgactatgacgacaccataagcgtggaaatgaagaaggaggatttcgatatctatgacgaagatgagaaccagtctccgcggagctttcagaagaagacgcgacactacttcattgcagcagtcgaaaggctttgggactacggtatgtcatcatcccctcatgtgttgcgcaatagagctcagagtggaagtgttccacagttcaagaaagtcgtctttcaagagtttacagatggcagcttcacacagcctctctatcggggcgagcttaacgaacatttgggactccttggtccctatatccgagccgaagtggaggacaacattatggttacctttaggaatcaagcctctcgcccctacagcttctactcctccctcatcagttatgaggaggatcagagacaaggcgctgaaccacggaagaactttgtgaaaccgaatgagacgaagacctacttctggaaagtacagcaccacatggcccccacaaaagacgaattcgattgcaaagcatgggcgtatttttcagacgttgacttggagaaagatgtacattcaggacttattggtcctttgttggtgtgtcacactaacactctcaatccagcccatggcaggcaggtgacagtccaggaattcgctcttttctttaccatctttgatgagaccaagtcctggtacttcacggaaaacatggagcgcaattgcagagccccctgtaacatacagatggaggaccctacctttaaggaaaattatcggttccacgcaatcaacggatacattatggatacactccctggccttgtgatggctcaggaccaacgaatcaggtggtacctcctcagcatgggttctaatgagaacatacactccattcacttttcaggacatgtgttcactgtccggaagaaagaagagtataagatggccctctacaatttgtatccaggcgtgtttgagaccgttgaaatgcttccctctaaagctggcatctggagagtagagtgcttgatcggagaacatcttcacgcaggtatgagcaccttgttcctcgtgtacagcaacaaatgtcagaccccacttggcatggccagtggacacattcgcgactttcagatcacagcatctggccagtatggacaatgggccccaaagttggctcgcctccattactccggtagcataaatgcgtggtccactaaagaacctttcagctggattaaggtcgatcttcttgcccccatgatcatccacggcattaagacacagggagcgaggcagaaattctcctccctctacatctcacagttcattattatgtatagtttggacggcaagaagtggcaaacttatagaggtaacagtactggaacacgcatggttttcttcggcaacgttgatagctctggcatcaaacacaacatctttaatcctcccataatagctcggtacatcagattgcatccgacccactacagcattaggagtacactccgaatggagcttatgggttgcgacttgaattcctgttcaatgccactcggaatggagtctaaagccatctctgatgcacagataaccgccagtagctactttacgaacatgtttgctacgtggtcaccctctaaggcaaggcttcatttgcaaggccggtctaatgcctggagacctcaggtgaacaacccgaaagaatggctccaggtggactttcagaagaccatgaaagtaacaggtgtcactactcagggagttaagtccttggataccagcatgtatgtgaaggagttccttatttcctcatcacaagatggccaccagtggaccctcttctttcagaatggtaaggtcaaagtgtttcagggcaatcaagacagcttcacacccgtggtgaacagtcttgatcctccactcttgacacgataccttcgaatccatccacagtcttgggttcaccagattgcattgcgcatggaagtacttggatgcgaggctcaggacctctac

SEQ ID NO: 636 - protein, 1457 aa, synthetic construct
  REGION 1..1457: note = Variant of human B-domain deleted Factor VIII
MQIELSTCFFLCLLRFCFSATRRYYLGAVELSWDYMQSDLGELPVDARFPPRVPKSFPFNTSVVYKKTLFVEFTDHLFNIAKPRPPWMGLLGPTIQAEVYDTVVITLKNMASHPVSLHAVGVSYWKASEGAEYDDQTSQREKEDDKVFPGGSHTYVWQVLKENGPMASDPLCLTYSYLSHVDLVKDLNSGLIGALLVCREGSLAKEKTQTLHKFILLFAVFDEGKSWHSETKNSLMQDRDAASARAWPKMHTVNGYVNRSLPGLIGCHRKSVYWHVIGMGTTPEVHSIFLEGHTFLVRNHRQASLEISPITFLTAQTLLMDLGQFLLFCHISSHQHDGMEAYVKVDSCPEEPQLRMKNNEEAEDYDDDLTDSEMDVVRFDDDNSPSFIQIRSVAKKHPKTWVHYIAAEEEDWDYAPLVLAPDDRSYKSQYLNNGPQRIGRKYKKVRFMAYTDETFKTREAIQHESGILGPLLYGEVGDTLLIIFKNQASRPYNIYPHGITDVRPLYSRRLPKGVKHLKDFPILPGEIFKYKWTVTVEDGPTKSDPRCLTRYYSSFVNMERDLASGLIGPLLICYKESVDQRGNQIMSDKRNVILFSVFDENRSWYLTENIQRFLPNPAGVQLEDPEFQASNIMHSINGYVFDSLQLSVCLHEVAYWYILSIGAQTDFLSVFFSGYTFKHKMVYEDTLTLFPFSGETVFMSMENPGLWILGCHNSDFRNRGMTALLKVSSCDKNTGDYYEDSYEDISAYLLSKNNAIEPRSFSQNPPVLKRHQREITRTTLQSDQEEIDYDDTISVEMKKEDFDIYDEDENQSPRSFQKKTRHYFIAAVERLWDYGMSSSPHVLRNRAQSGSVPQFKKVVFQEFTDGSFTQPLYRGELNEHLGLLGPYIRAEVEDNIMVTFRNQASRPYSFYSSLISYEEDQRQGAEPRKNFVKPNETKTYFWKVQHHMAPTKDEFDCKAWAYFSDVDLEKDVHSGLIGPLLVCHTNTLNPAHGRQVTVQEFALFFTIFDETKSWYFTENMERNCRAPCNIQMEDPTFKENYRFHAINGYIMDTLPGLVMAQDQRIRWYLLSMGSNENIHSIHFSGHVFTVRKKEEYKMALYNLYPGVFETVEMLPSKAGIWRVECLIGEHLHAGMSTLFLVYSNKCQTPLGMASGHIRDFQITASGQYGQWAPKLARLHYSGSINAWSTKEPFSWIKVDLLAPMIIHGIKTQGARQKFSSLYISQFIIMYSLDGKKWQTYRGNSTGTRMVFFGNVDSSGIKHNIFNPPIIARYIRLHPTHYSIRSTLRMELMGCDLNSCSMPLGMESKAISDAQITASSYFTNMFATWSPSKARLHLQGRSNAWRPQVNNPKEWLQVDFQKTMKVTGVTTQGVKSLDTSMYVKEFLISSSQDGHQWTLFFQNGKVKVFQGNQDSFTPVVNSLDPPLLTRYLRIHPQSWVHQIALRMEVLGCEAQDLY

SEQ ID NO: 637 - DNA, 4371 bp, synthetic construct
  misc_feature 1..4371: note = Variant of human B-domain deleted Factor VIII
  source 1..4371: mol_type = other DNA
atgcagattgaactgtctacctgcttcttcctctgtttgctgaggttctgctttagcgccactagacggtactaccttggcgctgtggagctgtcctgggactatatgcagagtgatttgggagagcttcccgtcgacgcacgatttcctcctcgcgttccaaagtcatttcccgataacacaagcggtgtgtacaagaagacgctcttcgtcgaattcaccgatcacctgttcaatatcgccaaacccagaccaccatggatgggtcttttggggcctaccatacaagcggaggtgtatgacacagttgttatcactctcaagaacatggcttctcatccggtaagtcttcacgcagtgggcgtgtcctactggaaagcttcagaaggagccgagtatgatgatcagacatcccagagggagaaagaagacgacaaggtatttccaggtgggtctcatacctatgtgtggcaagtgctcaaagagaatggccctatggcaagcgatccgctctgtttgacttacagctacctttcacacgttgacctcgtcaaggacctcaactccgggttgattggagccttgttggtatgcagggaaggatctcttgccaaagagaagacacagaccctccacaagtttatccttctctttgctgtgttcgatgagggcaaaagttggcatagcgaaacgaagaattccctcatgcaggatcgcgacgcagccagcgccagagcttggcccaagatgcacactgtgaacggatatgtcaataggtcacttcctggcttgattgggtgtcatcggaaaagtgtctactggcacgtgatcggaatggggacaacaccagaggtccactccatatttctcgaaggccataccttccttgttcgaaaccacagacaggcatccttggagatctctcccattacctttctcactgcccaaacgctccttatggacttgggtcagttccttctcttctgccatatcagctcacaccagcatgatggtatggaagcttatgtgaaggtcgacagttgtccagaggagccacagttgcgcatgaagaataatgaagaagccgaggattacgacgacgatctcaccgattctgagatggacgtggtgaggtttgatgacgacaactctccctccttcattcaaatccggagcgtggcgaagaaacaccccaagacttgggtccactatatagcggcggaagaggaggattgggattacgctcctcttgtattggcaccagatgaccgctcatacaaaagccagtacctcaacaacggaccgcagagaattggccggaagtataagaaagtgcgatttatggcctatacagacgaaacctttaagacaagggaggccatccagcatgagagtgggattttgggacctcttctttacggcgaagttggtgataccctcctcatcatcttcaagaatcaagcttctcgcccctataacatttacccacacgggatcactgacgttaggcctttgtatagcagaagacttcccaaaggcgtgaagcatctcaaagacttccccattttgccaggcgagatctttaagtacaaatggaccgtcacagtggaagatggaccgactaaatcagaccctcgatgccttacgcggtactattcctccttcgtgaatatggagagagatttggcaagcggactcataggaccactcctcatctgttacaaggaatctgtagaccagaggggtaaccagattatgagtgataaacgcaatgtgatcctttttagcgtcttcgacgagaaccggtcctggtacttgaccgagaatatacaaaggttccttcccaaccccgcaggcgttcagttggaagaccctgagtttcaggccagcaatattatgcactcaatcaacggctatgtgtttgatagtctccagctttctgtttgcctccatgaagtagcctattggtacatcttgtcaattggtgctcaaacagacttcctctccgtcttcttctccggctacacctttaagcacaagatggtgtatgaggacactctcacactctttccattttctggagaaaccgtgttcatgagcatggagaatccaggcctttggatcttgggttgccacaacagtgattttcgcaatcggggaatgactgctctcctcaaagtcagcagctgtgataagaacacaggcgactattacgaagattcttacgaggacataagtgcctacttgttgtccaagaataacgccattgagcccagatcattctcccagaatcctcccgtgcttaaaaggcatcagcgcgaaatcaccagaactactcttcagtctgatcaagaggagattgactatgacgacaccataagcgtggaaatgaagaaggaggatttcgatatctatgacgaagatgagaaccagtctccgcggagctttcagaagaagacgcgacactacttcattgcagcagtcgaaaggctttgggactacggtatgtcatcatcccctcatgtgttgcgcaatagagctcagagtggaagtgttccacagttcaagaaagtcgtctttcaagagtttacagatggcagcttcacacagcctctctatcggggcgagcttaacgaacatttgggactccttggtccctatatccgagccgaagtggaggacaacattatggttacctttaggaatcaagcctctcgcccctacagcttctactcctccctcatcagttatgaggaggatcagagacaaggcgctgaaccacggaagaactttgtgaaaccgaatgagacgaagacctacttctggaaagtacagcaccacatggcccccacaaaagacgaattcgattgcaaagcatgggcgtatttttcagacgttgacttggagaaagatgtacattcaggacttattggtcctttgttggtgtgtcacactaacactctcaatccagcccatggcaggcaggtgacagtccaggaattcgctcttttctttaccatctttgatgagaccaagtcctggtacttcacggaaaacatggagcgcaattgcagagccccctgtaacatacagatggaggaccctacctttaaggaaaattatcggttccacgcaatcaacggatacattatggatacactccctggccttgtgatggctcaggaccaacgaatcaggtggtacctcctcagcatgggttctaatgagaacatacactccattcacttttcaggacatgtgttcactgtccggaagaaagaagagtataagatggccctctacaatttgtatccaggcgtgtttgagaccgttgaaatgcttccctctaaagctggcatctggagagtagagtgcttgatcggagaacatcttcacgcaggtatgagcaccttgttcctcgtgtacagcaacaaatgtcagaccccacttggcatggccagtggacacattcgcgactttcagatcacagcatctggccagtatggacaatgggccccaaagttggctcgcctccattactccggtagcataaatgcgtggtccactaaagaacctttcagctggattaaggtcgatcttcttgcccccatgatcatccacggcattaagacacagggagcgaggcagaaattctcctccctctacatctcacagttcattattatgtatagtttggacggcaagaagtggcaaacttatagaggtaacagtactggaacactcatggtgttcttcggcaacgttgatagctctggcatcaaacacaacatctttaatcctcccataatagctcggtacatcagattgcatccgacccactacagcattaggagtacactccgaatggagcttatgggttgcgacttgaattcctgttcaatgccactcggaatggagtctaaagccatctctgatgcacagataaccgccagtagctactttacgaacatgtttgctacgtggtcaccctctaaggcaaggcttcatttgcaaggccggtctaatgcctggagacctcaggtgaacaacccgaaagaatggctccaggtggactttcagaagaccatgaaagtaacaggtgtcactactcagggagttaagtccttggataccagcatgtatgtgaaggagttccttatttcctcatcacaagatggccaccagtggaccctcttctttcagaatggtaaggtcaaagtgtttcagggcaatcaagacagcttcacacccgtggtgaacagtcttgatcctccactcttgacacgataccttcgaatccatccacagtcttgggttcaccagattgcattgcgcatggaagtacttggatgcgaggctcaggacctctac

SEQ ID NO: 638 - protein, 1457 aa, synthetic construct
  REGION 1..1457: note = Variant of human B-domain deleted Factor VIII
MQIELSTCFFLCLLRFCFSATRRYYLGAVELSWDYMQSDLGELPVDARFPPRVPKSFPDNTSGVYKKTLFVEFTDHLFNIAKPRPPWMGLLGPTIQAEVYDTVVITLKNMASHPVSLHAVGVSYWKASEGAEYDDQTSQREKEDDKVFPGGSHTYVWQVLKENGPMASDPLCLTYSYLSHVDLVKDLNSGLIGALLVCREGSLAKEKTQTLHKFILLFAVFDEGKSWHSETKNSLMQDRDAASARAWPKMHTVNGYVNRSLPGLIGCHRKSVYWHVIGMGTTPEVHSIFLEGHTFLVRNHRQASLEISPITFLTAQTLLMDLGQFLLFCHISSHQHDGMEAYVKVDSCPEEPQLRMKNNEEAEDYDDDLTDSEMDVVRFDDDNSPSFIQIRSVAKKHPKTWVHYIAAEEEDWDYAPLVLAPDDRSYKSQYLNNGPQRIGRKYKKVRFMAYTDETFKTREAIQHESGILGPLLYGEVGDTLLIIFKNQASRPYNIYPHGITDVRPLYSRRLPKGVKHLKDFPILPGEIFKYKWTVTVEDGPTKSDPRCLTRYYSSFVNMERDLASGLIGPLLICYKESVDQRGNQIMSDKRNVILFSVFDENRSWYLTENIQRFLPNPAGVQLEDPEFQASNIMHSINGYVFDSLQLSVCLHEVAYWYILSIGAQTDFLSVFFSGYTFKHKMVYEDTLTLFPFSGETVFMSMENPGLWILGCHNSDFRNRGMTALLKVSSCDKNTGDYYEDSYEDISAYLLSKNNAIEPRSFSQNPPVLKRHQREITRTTLQSDQEEIDYDDTISVEMKKEDFDIYDEDENQSPRSFQKKTRHYFIAAVERLWDYGMSSSPHVLRNRAQSGSVPQFKKVVFQEFTDGSFTQPLYRGELNEHLGLLGPYIRAEVEDNIMVTFRNQASRPYSFYSSLISYEEDQRQGAEPRKNFVKPNETKTYFWKVQHHMAPTKDEFDCKAWAYFSDVDLEKDVHSGLIGPLLVCHTNTLNPAHGRQVTVQEFALFFTIFDETKSWYFTENMERNCRAPCNIQMEDPTFKENYRFHAINGYIMDTLPGLVMAQDQRIRWYLLSMGSNENIHSIHFSGHVFTVRKKEEYKMALYNLYPGVFETVEMLPSKAGIWRVECLIGEHLHAGMSTLFLVYSNKCQTPLGMASGHIRDFQITASGQYGQWAPKLARLHYSGSINAWSTKEPFSWIKVDLLAPMIIHGIKTQGARQKFSSLYISQFIIMYSLDGKKWQTYRGNSTGTLMVFFGNVDSSGIKHNIFNPPIIARYIRLHPTHYSIRSTLRMELMGCDLNSCSMPLGMESKAISDAQITASSYFTNMFATWSPSKARLHLQGRSNAWRPQVNNPKEWLQVDFQKTMKVTGVTTQGVKSLDTSMYVKEFLISSSQDGHQWTLFFQNGKVKVFQGNQDSFTPVVNSLDPPLLTRYLRIHPQSWVHQIALRMEVLGCEAQDLY

SEQ ID NO: 639 - DNA, 4371 bp, synthetic construct
  misc_feature 1..4371: note = Variant of human B-domain deleted Factor VIII
  source 1..4371: mol_type = other DNA
atgcagattgaactgtctacctgcttcttcctctgtttgctgaggttctgctttagcgccactagacggtactaccttggcgctgtggagctgtcctgggactatatgcagagtgatttgggagagcttcccgtcgacgcacgatttcctcctcgcgttccaaagtcatttcccttcaacacaagcgtggtgtacaagaagacgctcttcgtcgaattcaccgatcacctgttcaatatcgccaaacccagaccaccatggatgggtcttttggggcctaccatacaagcggaggtgtatgacacagttgttatcactctcaagaacatggcttctcatccggtaagtcttcacgcagtgggcgtgtcctactggaaagcttcagaaggagccgagtatgatgatcagacatcccagagggagaaagaagacgacaaggtatttccaggtgggtctcatacctatgtgtggcaagtgctcaaagagaatggccctatggcaagcgatccgctctgtttgacttacagctacctttcacacgttgacctcgtcaaggacctcaactccgggttgattggagccttgttggtatgcagggaaggatctcttgccaaagagaagacacagaccctccacaagtttatccttctctttgctgtgttcgatgagggcaaaagttggcatagcgaaacgaagaattccctcatgcaggatcgcgacgcagccagcgccagagcttggcccaagatgcacactgtgaacggatatgtcaataggtcacttcctggcttgattgggtgtcatcggaaaagtgtctactggcacgtgatcggaatggggacaacaccagaggtccactccatatttctcgaaggccataccttccttgttcgaaaccacagacaggcatccttggagatctctcccattacctttctcactgcccaaacgctccttatggacttgggtcagttccttctcttctgccatatcccgtcacaccagcatgatggtatggaagcttatgtgaaggtcgacagttgtccagaggagccacagctgcgcatgaagaataatgaagaagccgaggattacgacgacgatctcaccgattctgagatggacgtggtgaggtttgatgacgacaactctccctccttcattcaaatccggagcgtggcgaagaaacaccccaagacttgggtccactatatagcggcggaagaggaggattgggattacgctcctcttgtattggcaccagatgaccgctcatacaaaagccagtacctcaacaacggaccgcagagaattggccggaagtataagaaagtgcgatttatggcctatacagacgaaacctttaagacaagggaggccatccagcatgagagtgggattttgggacctcttctttacggcgaagttggtgataccctcctcatcatcttcaagaatcaagcttctcgcccctataacatttacccacacgggatcactgacgttaggcctttgtatagcagaagacttcccaaaggcgtgaagcatctcaaagacttccccattttgccaggcgagatctttaagtacaaatggaccgtcacagtggaagatggaccgactaaatcagaccctcgatgccttacgcggtactattcctccttcgtgaatatggagagagatttggcaagcggactcataggaccactcctcatctgttacaaggaatctgtagaccagaggggtaaccagattatgagtgataaacgcaatgtgatcctttttagcgtcttcgacgagaaccggtcctggtacttgaccgagaatatacaaaggttccttcccaaccccgcaggcgttcagttggaagaccctgagtttcaggccagcaatattatgcactcaatcaacggctatgtgtttgatagtctccagctttctgtttgcctccatgaagtagcctattggtacatcttgtcaattggtgctcaaacagacttcctctccgtcttcttctccggctacacctttaagcacaagatggtgtatgaggacactctcacactctttccattttctggagaaaccgtgttcatgagcatggagaatccaggcatgtggaaattgggttgccacaacagtgattttcgcaatcggggaatgactgctctcctcaaagtcagcagctgtgataagaacacaggcgactattacgaagattcttacgaggacataagtgcctacttgttgtccaagaataacgccattgagcccagatcattctcccagaatcctcccgtgcttaaaaggcatcagcgcgaaatcaccagaactactcttcagtctgatcaagaggagattgactatgacgacaccataagcgtggaaatgaagaaggaggatttcgatatctatgacgaagatgagaaccagtctccgcggagctttcagaagaagacgcgacactacttcattgcagcagtcgaaaggctttgggactacggtatgtcatcatcccctcatgtgttgcgcaatagagctcagagtggaagtgttccacagttcaagaaagtcgtctttcaagagtttacagatggcagcttcacacagcctctctatcggggcgagcttaacgaacatttgggactccttggtccctatatccgagccgaagtggaggacaacattatggttacctttaggaatcaagcctctcgcccctacagcttctactcctccctcatcagttatgaggaggatcagagacaaggcgctgaaccacggaagaactttgtgaaaccgaatgagacgaagacctacttctggaaagtacagcaccacatggcccccacaaaagacgaattcgattgcaaagcatgggcgtatttttcagacgttgacttggagaaagatgtacattcaggacttattggtcctttgttggtgtgtcacactaacactctcaatccagcccatggcaggcaggtgacagtccaggaattcgctcttttctttaccatctttgatgagaccaagtcctggtacttcacggaaaacatggagcgcaattgcagagccccctgtaacatacagatggaggaccctacctttaaggaaaattatcggttccacgcaatcaacggatacattatggatacactccctggccttgtgatggctcaggaccaacgaatcaggtggtacctcctcagcatgggttctaatgagaacatacactccattcacttttcaggacatgtgttcactgtccggaagaaagaagagtataagatggccctctacaatttgtatccaggcgtgtttgagaccgttgaaatgcttccctctaaagctggcatctggagagtagagtgcttgatcggagaacatcttcacgcaggtatgagcaccttgttcctcgtgtacagcaacaaatgtcagaccccacttggcatggccagtggacacattcgcgactttcagatcacagcatctggccagtatggacaatgggccccaaagttggctcgcctccattactccggtagcataaatgcgtggtccactaaagaacctttcagctggattaaggtcgatcttcttgcccccatgatcatccacggcattaagacacagggagcgaggcagaaattctcctccctctacatctcacagttcattattatgtatagtttggacggcaagaagtggcaaacttatagaggtaacagtactggaacacgcatgacgttcttcggcaacgttgatagctctggcatcaaacacaacatctttaatcctcccataatagctcggtacatcagattgcatccgacccactacagcattaggagtacactccgaatggagcttatgggttgcgacttgaattcctgttcaatgccactcggaatggagtctaaagccatctctgatgcacagataaccgccagtagctactttacgaacatgtttgctacgtggtcaccctctaaggcaaggcttcatttgcaaggccggtctaatgcctggagacctcaggtgaacaacccgaaagaatggctccaggtggactttcagaagaccatgaaagtaacaggtgtcactactcagggagttaagtccttggataccagcatgtatgtgaaggagttccttatttcctcatcacaagatggccaccagtggaccctcttctttcagaatggtaaggtcaaagtgtttcagggcaatcaagacagcttcacacccgtggtgaacagtcttgatcctccactcttgacacgataccttcgaatccatccacagtcttgggttcaccagattgcattgcgcatggaagtacttggatgcgaggctcaggacctctac

SEQ ID NO: 640 - protein, 1457 aa, synthetic construct
  REGION 1..1457: note = Variant of human B-domain deleted Factor VIII
MQIELSTCFFLCLLRFCFSATRRYYLGAVELSWDYMQSDLGELPVDARFPPRVPKSFPFNTSVVYKKTLFVEFTDHLFNIAKPRPPWMGLLGPTIQAEVYDTVVITLKNMASHPVSLHAVGVSYWKASEGAEYDDQTSQREKEDDKVFPGGSHTYVWQVLKENGPMASDPLCLTYSYLSHVDLVKDLNSGLIGALLVCREGSLAKEKTQTLHKFILLFAVFDEGKSWHSETKNSLMQDRDAASARAWPKMHTVNGYVNRSLPGLIGCHRKSVYWHVIGMGTTPEVHSIFLEGHTFLVRNHRQASLEISPITFLTAQTLLMDLGQFLLFCHIPSHQHDGMEAYVKVDSCPEEPQLRMKNNEEAEDYDDDLTDSEMDVVRFDDDNSPSFIQIRSVAKKHPKTWVHYIAAEEEDWDYAPLVLAPDDRSYKSQYLNNGPQRIGRKYKKVRFMAYTDETFKTREAIQHESGILGPLLYGEVGDTLLIIFKNQASRPYNIYPHGITDVRPLYSRRLPKGVKHLKDFPILPGEIFKYKWTVTVEDGPTKSDPRCLTRYYSSFVNMERDLASGLIGPLLICYKESVDQRGNQIMSDKRNVILFSVFDENRSWYLTENIQRFLPNPAGVQLEDPEFQASNIMHSINGYVFDSLQLSVCLHEVAYWYILSIGAQTDFLSVFFSGYTFKHKMVYEDTLTLFPFSGETVFMSMENPGMWKLGCHNSDFRNRGMTALLKVSSCDKNTGDYYEDSYEDISAYLLSKNNAIEPRSFSQNPPVLKRHQREITRTTLQSDQEEIDYDDTISVEMKKEDFDIYDEDENQSPRSFQKKTRHYFIAAVERLWDYGMSSSPHVLRNRAQSGSVPQFKKVVFQEFTDGSFTQPLYRGELNEHLGLLGPYIRAEVEDNIMVTFRNQASRPYSFYSSLISYEEDQRQGAEPRKNFVKPNETKTYFWKVQHHMAPTKDEFDCKAWAYFSDVDLEKDVHSGLIGPLLVCHTNTLNPAHGRQVTVQEFALFFTIFDETKSWYFTENMERNCRAPCNIQMEDPTFKENYRFHAINGYIMDTLPGLVMAQDQRIRWYLLSMGSNENIHSIHFSGHVFTVRKKEEYKMALYNLYPGVFETVEMLPSKAGIWRVECLIGEHLHAGMSTLFLVYSNKCQTPLGMASGHIRDFQITASGQYGQWAPKLARLHYSGSINAWSTKEPFSWIKVDLLAPMIIHGIKTQGARQKFSSLYISQFIIMYSLDGKKWQTYRGNSTGTRMTFFGNVDSSGIKHNIFNPPIIARYIRLHPTHYSIRSTLRMELMGCDLNSCSMPLGMESKAISDAQITASSYFTNMFATWSPSKARLHLQGRSNAWRPQVNNPKEWLQVDFQKTMKVTGVTTQGVKSLDTSMYVKEFLISSSQDGHQWTLFFQNGKVKVFQGNQDSFTPVVNSLDPPLLTRYLRIHPQSWVHQIALRMEVLGCEAQDLY

SEQ ID NO: 641 - DNA, 4371 bp, synthetic construct
  misc_feature 1..4371: note = Variant of human B-domain deleted Factor VIII
  source 1..4371: mol_type = other DNA
atgcagattgaactgtctacctgcttcttcctctgtttgctgaggttctgctttagcgccactagacggtactaccttggcgctgtggagctgtcctgggactatatgcagagtgatttgggagagcttcccgtcgacgcacgatttcctcctcgcgttccaaagtcatttcccttcaacacaagcgtggtgtacaagaagacgctcttcgtcgaattcaccgatcacctgttcaatatcgccaaacccagaccaccatggatgggtcttttggggcctaccatacaagcggaggtgtatgacacagttgttatcactctcaagaacatggcttctcatccggtaagtcttcacgcagtgggcgtgtcctactggaaagcttcagaaggagccgagtatgatgatcagacatcccagagggagaaagaagacgacaaggtatttccaggtgggtctcatacctatgtgtggcaagtgctcaaagagaatggccctatggcaagcgatccgctctgtttgacttacagctacctttcacacgttgacctcgtcaaggacctcaactccgggttgattggagccttgttggtatgcagggaaggatctcttgccaaagagaagacacagaccctccacaagtttatccttctctttgctgtgttcgatgagggcaaaagttggcatagcgaaacgaagaattccctcatgcaggatcgcgacgcagccagcgccagagcttggcccaagatgcacactgtgaacggatatgtcaataggtcacttcctggcttgattgggtgtcatcggaaaagtgtctactggcacgtgatcggaatggggacaacaccagaggtccactccatatttctcgaaggccataccttccttgttcgaaaccacagacaggcatccttggagatctctcccattacctttctcactgcccaaacgctccttatggacttgggtcagttccttctcttctgccatatcagctcacaccagcatgatggtatggaagcttatgtgaaggtcgacagttgtccagaggagccacagctgcgcatgaagaataatgaagaagccgaggattacgacgacgatctcaccgattctgagatggacgtggtgaggtttgatgacgacaactctccctccttcattcaaatccggagcgtggcgaagaaacaccccaagacttgggtccactatatagcggcggaagaggaggattgggattacgctcctcttgtattggcaccagatgaccgctcatacaaaagccagtacctcaacaacggaccgcagagaattggccggaagtataagaaagtgcgatttatggcctatacagacgaaacctttaagacaagggaggccatccagcatgagagtgggattttgggacctcttctttacggcgaagttggtgataccctcctcatcatcttcaagaatcaagcttctcgcccctataacatttacccacacgggatcactgacgttagccctttgtatagcagaagacttcccaaaggcgtgaagcatctcaaagacttccccattttgccaggcgagatctttaagtacaaatggaccgtcacagtggaagatggaccgactaaatcagaccctcgatgccttacgcggtactattcctccttcgtgaatatggagagagatttggcaagcggactcataggaccactcctcatctgttacaaggaatctgtagaccagaggggtaaccagattatgagtgataaacgcaatgtgatcctttttagcgtcttcgacgagaaccggtcctggtacttgaccgagaatatacaaaggttccttcccaaccccgcaggcgttcagttggaagaccctgagtttcaggccagcaatattatgcactcaatcaacggctatgtgtttgatagtctccagctttctgtttgcctccatgaagtagcctattggtacatcttgtcaattggtgctcaaacagacttcctctccgtcttcttctccggctacacctttaagcacaagatggtgtatgaggacactctcacactctttccattttctggagaaaccgtgttcatgagcatggagaatccaggcctttggatcttgggttgccacaacagtgattttcgcaatcggggaatgactgctctcctcaaagtcagcagctgtgataagaacacaggcgactattacgaagattcttacgaggacataagtgcctacttgttgtccaagaataacgccattgagcccagatcattctcccagaatcctcccgtgcttaaaaggcatcagcgcgaaatcaccagaactactcttcagtctgatcaagaggagattgactatgacgacaccataagcgtggaaatgaagaaggaggatttcgatatctatgacgaagatgagaaccagtctccgcggagctttcagaagaagacgcgacactacttcattgcagcagtcgaaaggctttgggactacggtatgtcatcatcccctcatgtgttgcgcaatagagctcagagtggaagtgttccacagttcaagaaagtcgtctttcaagagtttacagatggcagcttcacacagcctctctatcggggcgagcttaacgaacatttgggactccttggtccctatatccgagccgaagtggaggacaacattatggttacctttaggaatcaagcctctcgcccctacagcttctactcctccctcatcagttatgaggaggatcagagacaaggcgctgaaccacggaagaactttgtgaaaccgaatgagacgaagacctacttctggaaagtacagcaccacatggcccccacaaaagacgaattcgattgcaaagcatgggcgtatttttcagacgttgacttggagaaagatgtacattcaggacttattggtcctttgttggtgtgtcacactaacactctcaatccagcccatggcaggcaggtgacagtccaggaattcgctcttttctttaccatctttgatgagaccaagtcctggtacttcacggaaaacatggagcgcaattgcagagccccctgtaacatacagatggaggaccctacctttaaggaaaattatcggttccacgcaatcaacggatacattatggatacactccctggccttgtgatggctcaggaccaacgaatcaggtggtacctcctcagcatgggttctaatgagaacatacactccattcacttttcaggacatgtgttcactgtccggaagaaagaagagtataagatggccctctacaatttgtatccaggcgtgtttgagaccgttgaaatgcttccctctaaagctggcatctggagagtagagtgcttgatcggagaacatcttcacgcaggtatgagcaccttgttcctcgtgtacagcaacaaatgtcagaccccacttggcatggccagtggacacattcgcgactttcagatcacagcatctggccagtatggacaatgggccccaaagttggctcgcctccattactccggtagcataaatgcgtggtccactaaagaacctttcagctggattaaggtcgatcttcttgcccccatgatcatccacggcattaagacacagggagcgaggcagaaattctcctccctctacatctcacagttcattattatgtatagtttggacggcaagaagtggcaaacttatagaggtaacagtactggaacactgatggttttcttcggcaacgttgatagctctggcatcaaacacaacatctttaatcctcccataatagctcggtacatcagattgcatccgacccactacagcattaggagtacactccgaatggagcttatgggttgcgacttgaattcctgttcaatgccactcggaatggagtctaaagccatctctgatgcacagataaccgccagtagctactttacgaacatgtttgctacgtggtcaccctctaaggcaaggcttcatttgcaaggccggtctaatgcctggagacctcaggtgaacaacccgaaagaatggctccaggtggactttcagaagaccatgaaagtaacaggtgtcactactcagggagttaagtccttggataccagcatgtatgtgaaggagttccttatttcctcatcacaagatggccaccagtggaccctcttctttcagaatggtaaggtcaaagtgtttcagggcaatcaagacagcttcacacccgtggtgaacagtcttgatcctccactcttgacacgataccttcgaatccatccacagtcttgggttcaccagattgcattgcgcatggaagtacttggatgcgaggctcaggacctctac

SEQ ID NO: 642 - protein, 1457 aa, synthetic construct
  REGION 1..1457: note = Variant of human B-domain deleted Factor VIII
MQIELSTCFFLCLLRFCFSATRRYYLGAVELSWDYMQSDLGELPVDARFPPRVPKSFPFNTSVVYKKTLFVEFTDHLFNIAKPRPPWMGLLGPTIQAEVYDTVVITLKNMASHPVSLHAVGVSYWKASEGAEYDDQTSQREKEDDKVFPGGSHTYVWQVLKENGPMASDPLCLTYSYLSHVDLVKDLNSGLIGALLVCREGSLAKEKTQTLHKFILLFAVFDEGKSWHSETKNSLMQDRDAASARAWPKMHTVNGYVNRSLPGLIGCHRKSVYWHVIGMGTTPEVHSIFLEGHTFLVRNHRQASLEISPITFLTAQTLLMDLGQFLLFCHISSHQHDGMEAYVKVDSCPEEPQLRMKNNEEAEDYDDDLTDSEMDVVRFDDDNSPSFIQIRSVAKKHPKTWVHYIAAEEEDWDYAPLVLAPDDRSYKSQYLNNGPQRIGRKYKKVRFMAYTDETFKTREAIQHESGILGPLLYGEVGDTLLIIFKNQASRPYNIYPHGITDVSPLYSRRLPKGVKHLKDFPILPGEIFKYKWTVTVEDGPTKSDPRCLTRYYSSFVNMERDLASGLIGPLLICYKESVDQRGNQIMSDKRNVILFSVFDENRSWYLTENIQRFLPNPAGVQLEDPEFQASNIMHSINGYVFDSLQLSVCLHEVAYWYILSIGAQTDFLSVFFSGYTFKHKMVYEDTLTLFPFSGETVFMSMENPGLWILGCHNSDFRNRGMTALLKVSSCDKNTGDYYEDSYEDISAYLLSKNNAIEPRSFSQNPPVLKRHQREITRTTLQSDQEEIDYDDTISVEMKKEDFDIYDEDENQSPRSFQKKTRHYFIAAVERLWDYGMSSSPHVLRNRAQSGSVPQFKKVVFQEFTDGSFTQPLYRGELNEHLGLLGPYIRAEVEDNIMVTFRNQASRPYSFYSSLISYEEDQRQGAEPRKNFVKPNETKTYFWKVQHHMAPTKDEFDCKAWAYFSDVDLEKDVHSGLIGPLLVCHTNTLNPAHGRQVTVQEFALFFTIFDETKSWYFTENMERNCRAPCNIQMEDPTFKENYRFHAINGYIMDTLPGLVMAQDQRIRWYLLSMGSNENIHSIHFSGHVFTVRKKEEYKMALYNLYPGVFETVEMLPSKAGIWRVECLIGEHLHAGMSTLFLVYSNKCQTPLGMASGHIRDFQITASGQYGQWAPKLARLHYSGSINAWSTKEPFSWIKVDLLAPMIIHGIKTQGARQKFSSLYISQFIIMYSLDGKKWQTYRGNSTGTLMVFFGNVDSSGIKHNIFNPPIIARYIRLHPTHYSIRSTLRMELMGCDLNSCSMPLGMESKAISDAQITASSYFTNMFATWSPSKARLHLQGRSNAWRPQVNNPKEWLQVDFQKTMKVTGVTTQGVKSLDTSMYVKEFLISSSQDGHQWTLFFQNGKVKVFQGNQDSFTPVVNSLDPPLLTRYLRIHPQSWVHQIALRMEVLGCEAQDLY

SEQ ID NO: 643 - DNA, 4371 bp, synthetic construct
  misc_feature 1..4371: note = Variant of human B-domain deleted Factor VIII
  source 1..4371: mol_type = other DNA
atgcagattgaactgtctacctgcttcttcctctgtttgctgaggttctgctttagcgccactagacggtactaccttggcgctgtggagctgtcctgggactatatgcagagtgatttgggagagcttcccgtcgacgcacgatttcctcctcgcgttccaaagtcatttcccgataacacaagccgtgtgtacaagaagacgctcttcgtcgaattcaccgatcacctgttcaatatcgccaaacccagaccaccatggatgggtcttttggggcctaccatacaagcggaggtgtatgacacagttgttatcactctcaagaacatggcttctcatccggtaagtcttcacgcagtgggcgtgtcctactggaaagcttcagaaggagccgagtatgatgatcagacatcccagagggagaaagaagacgacaaggtatttccaggtgggtctcatacctatgtgtggcaagtgctcaaagagaatggccctatggcaagcgatccgctctgtttgacttacagctacctttcacacgttgacctcgtcaaggacctcaactccgggttgattggagccttgttggtatgcagggaaggatctcttgccaaagagaagacacagaccctccacaagtttatccttctctttgctgtgttcgatgagggcaaaagttggcatagcgaaacgaagaattccctcatgcaggatcgcgacgcagccagcgccagagcttggcccaagatgcacactgtgaacggatatgtcaataggtcacttcctggcttgattgggtgtcatcggaaaagtgtctactggcacgtgatcggaatggggacaacaccagaggtccactccatatttctcgaaggccataccttccttgttcgaaaccacagacaggcatccttggagatctctcccattacctttctcactgcccaaacgctccttatggacttgggtcagttccttctcttctgccatatcagctcacaccagcatgatggtatggaagcttatgtgaaggtcgacagttgtggggaggagccacagcgtcgcatgaagaataatgaagaagccgaggattacgacgacgatctcaccgattctgagatggacgtggtgaggtttgatgacgacaactctccctccttcattcaaatccggagcgtggcgaagaaacaccccaagacttgggtccactatatagcggcggaagaggaggattgggattacgctcctcttgtattggcaccagatgaccgctcatacaaaagccagtacctcaacaacggaccgcagagaattggccggaagtataagaaagtgcgatttatggcctatacagacgaaacctttaagacaagggaggccatccagcatgagagtgggattttgggacctcttctttacggcgaagttggtgataccctcctcatcatcttcaagaatcaagcttctcgcccctataacatttacccacacgggatcactgacgttcgccctttgtatagcagaagacttcccaaaggcgtgaagcatctcaaagacttccccattttgccaggcgagatctttaagtacaaatggaccgtcacagtggaagatggaccgactaaatcagaccctcgatgccttacgcggtactattcctccttcgtgaatatggagagagatttggcaagcggactcataggaccactcctcatctgttacaaggaatctgtagaccagaggggtaaccagattatgagtgataaacgcaatgtgatcctttttagcgtcttcgacgagaaccggtcctggtacttgaccgagaatatacaaaggttccttcccaaccccgcaggcgttcagttggaagaccctgagtttcaggccagcaatattatgcactcaatcaacggctatgtgtttgatagtctccagctttctgtttgcctccatgaagtagcctattggtacatcttgtcaattggtgctcaaacagacttcctctccgtcttcttctccggctacacctttaagcacaagatggtgtatgaggacactctcacactctttccattttctggagaaaccgtgttcatgagcatggagaatccaggcctgtggattttgggttgccacaacagtgattttcgcaatcggggaatgactgctctcctcaaagtcagcagctgtgataagaacacaggcgactattacgaagattcttacgaggacataagtgcctacttgttgtccaagaataacgccattgagcccagatcattctcccagaatcctcccgtgcttaaaaggcatcagcgcgaaatcaccagaactactcttcagtctgatcaagaggagattgactatgacgacaccataagcgtggaaatgaagaaggaggatttcgatatctatgacgaagatgagaaccagtctccgcggagctttcagaagaagacgcgacactacttcattgcagcagtcgaaaggctttgggactacggtatgtcatcatcccctcatgtgttgcgcaatagagctcagagtggaagtgttccacagttcaagaaagtcgtctttcaagagtttacagatggcagcttcacacagcctctctatcggggcgagcttaacgaacatttgggactccttggtccctatatccgagccgaagtggaggacaacattatggttacctttaggaatcaagcctctcgcccctacagcttctactcctccctcatcagttatgaggaggatcagagacaaggcgctgaaccacggaagaactttgtgaaaccgaatgagacgaagacctacttctggaaagtacagcaccacatggcccccacaaaagacgaattcgattgcaaagcatgggcgtatttttcagacgttgacttggagaaagatgtacattcaggacttattggtcctttgttggtgtgtcacactaacactctcaatccagcccatggcaggcaggtgacagtccaggaattcgctcttttctttaccatctttgatgagaccaagtcctggtacttcacggaaaacatggagcgcaattgcagagccccctgtaacatacagatggaggaccctacctttaaggaaaattatcggttccacgcaatcaacggatacattatggatacactccctggccttgtgatggctcaggaccaacgaatcaggtggtacctcctcagcatgggttctaatgagaacatacactccattcacttttcaggacatgtgttcactgtccggaagaaagaagagtataagatggccctctacaatttgtatccaggcgtgtttgagaccgttgaaatgcttccctctaaagctggcatctggagagtagagtgcttgatcggagaacatcttcacgcaggtatgagcaccttgttcctcgtgtacagcaacaaatgtcagaccccacttggcatggccagtggacacattcgcgactttcagatcacagcatctggccagtatggacaatgggccccaaagttggctcgcctccattactccggtagcataaatgcgtggtccactaaagaacctttcagctggattaaggtcgatcttcttgcccccatgatcatccacggcattaagacacagggagcgaggcagaaattctcctccctctacatctcacagttcattattatgtatagtttggacggcaagaagtggcaaacttatagaggtaacagtactggaacactcatggtgttcttcggcaacgttgatagctctggcatcaaacacaacatctttaatcctcccataatagctcggtacatcagattgcatccgacccactacagcattaggagtacactccgaatggagcttatgggttgcgacttgaattcctgttcaatgccactcggaatggagtctaaagccatctctgatgcacagataaccgccagtagctactttacgaacatgtttgctacgtggtcaccctctaaggcaaggcttcatttgcaaggccggtctaatgcctggagacctcaggtgaacaacccgaaagaatggctccaggtggactttcagaagaccatgaaagtaacaggtgtcactactcagggagttaagtccttggataccagcatgtatgtgaaggagttccttatttcctcatcacaagatggccaccagtggaccctcttctttcagaatggtaaggtcaaagtgtttcagggcaatcaagacagcttcacacccgtggtgaacagtcttgatcctccactcttgacacgataccttcgaatccatccacagtcttgggttcaccagattgcattgcgcatggaagtacttggatgcgaggctcaggacctctac

SEQ ID NO: 644 - protein, 1457 aa, synthetic construct
  REGION 1..1457: note = Variant of human B-domain deleted Factor VIII
MQIELSTCFFLCLLRFCFSATRRYYLGAVELSWDYMQSDLGELPVDARFPPRVPKSFPDNTSRVYKKTLFVEFTDHLFNIAKPRPPWMGLLGPTIQAEVYDTVVITLKNMASHPVSLHAVGVSYWKASEGAEYDDQTSQREKEDDKVFPGGSHTYVWQVLKENGPMASDPLCLTYSYLSHVDLVKDLNSGLIGALLVCREGSLAKEKTQTLHKFILLFAVFDEGKSWHSETKNSLMQDRDAASARAWPKMHTVNGYVNRSLPGLIGCHRKSVYWHVIGMGTTPEVHSIFLEGHTFLVRNHRQASLEISPITFLTAQTLLMDLGQFLLFCHISSHQHDGMEAYVKVDSCGEEPQRRMKNNEEAEDYDDDLTDSEMDVVRFDDDNSPSFIQIRSVAKKHPKTWVHYIAAEEEDWDYAPLVLAPDDRSYKSQYLNNGPQRIGRKYKKVRFMAYTDETFKTREAIQHESGILGPLLYGEVGDTLLIIFKNQASRPYNIYPHGITDVRPLYSRRLPKGVKHLKDFPILPGEIFKYKWTVTVEDGPTKSDPRCLTRYYSSFVNMERDLASGLIGPLLICYKESVDQRGNQIMSDKRNVILFSVFDENRSWYLTENIQRFLPNPAGVQLEDPEFQASNIMHSINGYVFDSLQLSVCLHEVAYWYILSIGAQTDFLSVFFSGYTFKHKMVYEDTLTLFPFSGETVFMSMENPGLWILGCHNSDFRNRGMTALLKVSSCDKNTGDYYEDSYEDISAYLLSKNNAIEPRSFSQNPPVLKRHQREITRTTLQSDQEEIDYDDTISVEMKKEDFDIYDEDENQSPRSFQKKTRHYFIAAVERLWDYGMSSSPHVLRNRAQSGSVPQFKKVVFQEFTDGSFTQPLYRGELNEHLGLLGPYIRAEVEDNIMVTFRNQASRPYSFYSSLISYEEDQRQGAEPRKNFVKPNETKTYFWKVQHHMAPTKDEFDCKAWAYFSDVDLEKDVHSGLIGPLLVCHTNTLNPAHGRQVTVQEFALFFTIFDETKSWYFTENMERNCRAPCNIQMEDPTFKENYRFHAINGYIMDTLPGLVMAQDQRIRWYLLSMGSNENIHSIHFSGHVFTVRKKEEYKMALYNLYPGVFETVEMLPSKAGIWRVECLIGEHLHAGMSTLFLVYSNKCQTPLGMASGHIRDFQITASGQYGQWAPKLARLHYSGSINAWSTKEPFSWIKVDLLAPMIIHGIKTQGARQKFSSLYISQFIIMYSLDGKKWQTYRGNSTGTLMVFFGNVDSSGIKHNIFNPPIIARYIRLHPTHYSIRSTLRMELMGCDLNSCSMPLGMESKAISDAQITASSYFTNMFATWSPSKARLHLQGRSNAWRPQVNNPKEWLQVDFQKTMKVTGVTTQGVKSLDTSMYVKEFLISSSQDGHQWTLFFQNGKVKVFQGNQDSFTPVVNSLDPPLLTRYLRIHPQSWVHQIALRMEVLGCEAQDLY

SEQ ID NO: 645 - DNA, 4371 bp, synthetic construct
  misc_feature 1..4371: note = Variant of human B-domain deleted Factor VIII
  source 1..4371: mol_type = other DNA
atgcagattgaactgtctacctgcttcttcctctgtttgctgaggttctgctttagcgccactagacggtactaccttggcgctgtggagctgtcctgggactatatgcagagtgatttgggagagcttcccgtcgacgcacgatttcctcctcgcgttccaaagtcatttcccgataacacaagcgttgtgtacaagaagacgctcttcgtcgaattcaccgatcacctgttcaatatcgccaaacccagaccaccatggatgggtcttttggggcctaccatacaagcggaggtgtatgacacagttgttatcactctcaagaacatggcttctcatccggtaagtcttcacgcagtgggcgtgtcctactggaaagcttcagaaggagccgagtatgatgatcagacatcccagagggagaaagaagacgacaaggtatttccaggtgggtctcatacctatgtgtggcaagtgctcaaagagaatggccctatggcaagcgatccgctctgtttgacttacagctacctttcacacgttgacctcgtcaaggacctcaactccgggttgattggagccttgttggtatgcagggaaggatctcttgccaaagagaagacacagaccctccacaagtttatccttctctttgctgtgttcgatgagggcaaaagttggcatagcgaaacgaagaattccctcatgcaggatcgcgacgcagccagcgccagagcttggcccaagatgcacactgtgaacggatatgtcaataggtcacttcctggcttgattgggtgtcatcggaaaagtgtctactggcacgtgatcggaatggggacaacaccagaggtccactccatatttctcgaaggccataccttccttgttcgaaaccacagacaggcatccttggagatctctcccattacctttctcactgcccaaacgctccttatggacttgggtcagttccttctcttctgccatatcagctcacaccagcatgatggtatggaagcttatgtgaaggtcgacagttgtggggaggagccacagctgcgcatgaagaataatgaagaagccgaggattacgacgacgatctcaccgattctgagatggacgtggtgaggtttgatgacgacaactctccctccttcattcaaatccggagcgtggcgaagaaacaccccaagacttgggtccactatatagcggcggaagaggaggattgggattacgctcctcttgtattggcaccagatgaccgctcatacaaaagccagtacctcaacaacggaccgcagagaattggccggaagtataagaaagtgcgatttatggcctatacagacgaaacctttaagacaagggaggccatccagcatgagagtgggattttgggacctcttctttacggcgaagttggtgataccctcctcatcatcttcaagaatcaagcttctcgcccctataacatttacccacacgggatcactgacgttaggcctttgtatagcagaagacttcccaaaggcgtgaagcatctcaaagacttccccattttgccaggcgagatctttaagtacaaatggaccgtcacagtggaagatggaccgactaaatcagaccctcgatgccttacgcggtactattcctccttcgtgaatatggagagagatttggcaagcggactcataggaccactcctcatctgttacaaggaatctgtagaccagaggggtaaccagattatgagtgataaacgcaatgtgatcctttttagcgtcttcgacgagaaccggtcctggtacttgaccgagaatatacaaaggttccttcccaaccccgcaggcgttcagttggaagaccctgagtttcaggccagcaatattatgcactcaatcaacggctatgtgtttgatagtctccagctttctgtttgcctccatgaagtagcctattggtacatcttgtcaattggtgctcaaacagacttcctctccgtcttcttctccggctacacctttaagcacaagatggtgtatgaggacactctcacactctttccattttctggagaaaccgtgttcatgagcatggagaatccaggcctgtggaaattgggttgccacaacagtgattttcgcaatcggggaatgactgctctcctcaaagtcagcagctgtgataagaacacaggcgactattacgaagattcttacgaggacataagtgcctacttgttgtccaagaataacgccattgagcccagatcattctcccagaatcctcccgtgcttaaaaggcatcagcgcgaaatcaccagaactactcttcagtctgatcaagaggagattgactatgacgacaccataagcgtggaaatgaagaaggaggatttcgatatctatgacgaagatgagaaccagtctccgcggagctttcagaagaagacgcgacactacttcattgcagcagtcgaaaggctttgggactacggtatgtcatcatcccctcatgtgttgcgcaatagagctcagagtggaagtgttccacagttcaagaaagtcgtctttcaagagtttacagatggcagcttcacacagcctctctatcggggcgagcttaacgaacatttgggactccttggtccctatatccgagccgaagtggaggacaacattatggttacctttaggaatcaagcctctcgcccctacagcttctactcctccctcatcagttatgaggaggatcagagacaaggcgctgaaccacggaagaactttgtgaaaccgaatgagacgaagacctacttctggaaagtacagcaccacatggcccccacaaaagacgaattcgattgcaaagcatgggcgtatttttcagacgttgacttggagaaagatgtacattcaggacttattggtcctttgttggtgtgtcacactaacactctcaatccagcccatggcaggcaggtgacagtccaggaattcgctcttttctttaccatctttgatgagaccaagtcctggtacttcacggaaaacatggagcgcaattgcagagccccctgtaacatacagatggaggaccctacctttaaggaaaattatcggttccacgcaatcaacggatacattatggatacactccctggccttgtgatggctcaggaccaacgaatcaggtggtacctcctcagcatgggttctaatgagaacatacactccattcacttttcaggacatgtgttcactgtccggaagaaagaagagtataagatggccctctacaatttgtatccaggcgtgtttgagaccgttgaaatgcttccctctaaagctggcatctggagagtagagtgcttgatcggagaacatcttcacgcaggtatgagcaccttgttcctcgtgtacagcaacaaatgtcagaccccacttggcatggccagtggacacattcgcgactttcagatcacagcatctggccagtatggacaatgggccccaaagttggctcgcctccattactccggtagcataaatgcgtggtccactaaagaacctttcagctggattaaggtcgatcttcttgcccccatgatcatccacggcattaagacacagggagcgaggcagaaattctcctccctctacatctcacagttcattattatgtatagtttggacggcaagaagtggcaaacttatagaggtaacagtactggaacactcatggtgttcttcggcaacgttgatagctctggcatcaaacacaacatctttaatcctcccataatagctcggtacatcagattgcatccgacccactacagcattaggagtacactccgaatggagcttatgggttgcgacttgaattcctgttcaatgccactcggaatggagtctaaagccatctctgatgcacagataaccgccagtagctactttacgaacatgtttgctacgtggtcaccctctaaggcaaggcttcatttgcaaggccggtctaatgcctggagacctcaggtgaacaacccgaaagaatggctccaggtggactttcagaagaccatgaaagtaacaggtgtcactactcagggagttaagtccttggataccagcatgtatgtgaaggagttccttatttcctcatcacaagatggccaccagtggaccctcttctttcagaatggtaaggtcaaagtgtttcagggcaatcaagacagcttcacacccgtggtgaacagtcttgatcctccactcttgacacgataccttcgaatccatccacagtcttgggttcaccagattgcattgcgcatggaagtacttggatgcgaggctcaggacctctac

SEQ ID NO: 646 - protein, 1457 aa, synthetic construct
  REGION 1..1457: note = Variant of human B-domain deleted Factor VIII
MQIELSTCFFLCLLRFCFSATRRYYLGAVELSWDYMQSDLGELPVDARFPPRVPKSFPDNTSVVYKKTLFVEFTDHLFNIAKPRPPWMGLLGPTIQAEVYDTVVITLKNMASHPVSLHAVGVSYWKASEGAEYDDQTSQREKEDDKVFPGGSHTYVWQVLKENGPMASDPLCLTYSYLSHVDLVKDLNSGLIGALLVCREGSLAKEKTQTLHKFILLFAVFDEGKSWHSETKNSLMQDRDAASARAWPKMHTVNGYVNRSLPGLIGCHRKSVYWHVIGMGTTPEVHSIFLEGHTFLVRNHRQASLEISPITFLTAQTLLMDLGQFLLFCHISSHQHDGMEAYVKVDSCGEEPQLRMKNNEEAEDYDDDLTDSEMDVVRFDDDNSPSFIQIRSVAKKHPKTWVHYIAAEEEDWDYAPLVLAPDDRSYKSQYLNNGPQRIGRKYKKVRFMAYTDETFKTREAIQHESGILGPLLYGEVGDTLLIIFKNQASRPYNIYPHGITDVRPLYSRRLPKGVKHLKDFPILPGEIFKYKWTVTVEDGPTKSDPRCLTRYYSSFVNMERDLASGLIGPLLICYKESVDQRGNQIMSDKRNVILFSVFDENRSWYLTENIQRFLPNPAGVQLEDPEFQASNIMHSINGYVFDSLQLSVCLHEVAYWYILSIGAQTDFLSVFFSGYTFKHKMVYEDTLTLFPFSGETVFMSMENPGLWKLGCHNSDFRNRGMTALLKVSSCDKNTGDYYEDSYEDISAYLLSKNNAIEPRSFSQNPPVLKRHQREITRTTLQSDQEEIDYDDTISVEMKKEDFDIYDEDENQSPRSFQKKTRHYFIAAVERLWDYGMSSSPHVLRNRAQSGSVPQFKKVVFQEFTDGSFTQPLYRGELNEHLGLLGPYIRAEVEDNIMVTFRNQASRPYSFYSSLISYEEDQRQGAEPRKNFVKPNETKTYFWKVQHHMAPTKDEFDCKAWAYFSDVDLEKDVHSGLIGPLLVCHTNTLNPAHGRQVTVQEFALFFTIFDETKSWYFTENMERNCRAPCNIQMEDPTFKENYRFHAINGYIMDTLPGLVMAQDQRIRWYLLSMGSNENIHSIHFSGHVFTVRKKEEYKMALYNLYPGVFETVEMLPSKAGIWRVECLIGEHLHAGMSTLFLVYSNKCQTPLGMASGHIRDFQITASGQYGQWAPKLARLHYSGSINAWSTKEPFSWIKVDLLAPMIIHGIKTQGARQKFSSLYISQFIIMYSLDGKKWQTYRGNSTGTLMVFFGNVDSSGIKHNIFNPPIIARYIRLHPTHYSIRSTLRMELMGCDLNSCSMPLGMESKAISDAQITASSYFTNMFATWSPSKARLHLQGRSNAWRPQVNNPKEWLQVDFQKTMKVTGVTTQGVKSLDTSMYVKEFLISSSQDGHQWTLFFQNGKVKVFQGNQDSFTPVVNSLDPPLLTRYLRIHPQSWVHQIALRMEVLGCEAQDLY

SEQ ID NO: 647 - DNA, 4371 bp, synthetic construct
  misc_feature 1..4371: note = Variant of human B-domain deleted Factor VIII
  source 1..4371: mol_type = other DNA
atgcagattgaactgtctacctgcttcttcctctgtttgctgaggttctgctttagcgccactagacggtactaccttggcgctgtggagctgtcctgggactatatgcagagtgatttgggagagcttcccgtcgacgcacgatttcctcctcgcgttccaaagtcatttcccgataacacaagcgttgtgtacaagaagacgctcttcgtcgaattcaccgatcacctgttcaatatcgccaaacccagaccaccatggatgggtcttttggggcctaccatacaagcggaggtgtatgacacagttgttatcactctcaagaacatggcttctcatccggtaagtcttcacgcagtgggcgtgtcctactggaaagcttcagaaggagccgagtatgatgatcagacatcccagagggagaaagaagacgacaaggtatttccaggtgggtctcatacctatgtgtggcaagtgctcaaagagaatggccctatggcaagcgatccgctctgtttgacttacagctacctttcacacgttgacctcgtcaaggacctcaactccgggttgattggagccttgttggtatgcagggaaggatctcttgccaaagagaagacacagaccctccacaagtttatccttctctttgctgtgttcgatgagggcaaaagttggcatagcgaaacgaagaattccctcatgcaggatcgcgacgcagccagcgccagagcttggcccaagatgcacactgtgaacggatatgtcaataggtcacttcctggcttgattgggtgtcatcggaaaagtgtctactggcacgtgatcggaatggggacaacaccagaggtccactccatatttctcgaaggccataccttccttgttcgaaaccacagacaggcatccttggggatctctcccattacctttctcactgcccaaacgctccttatggacttgggtcagttccttctcttctgccatatcagctcacaccagcatgatggtatggaagcttatgtggaggtcgacagttgtccagaggagccacagctgcgcatgaagaataatgaagaagccgaggattacgacgacgatctcaccgattctgagatggacgtggtgaggtttgatgacgacaactctccctccttcattcaaatccggagcgtggcgaagaaacaccccaagacttgggtccactatatagcggcggaagaggaggattgggattacgctcctcttgtattggcaccagatgaccgctcatacaaaagccagtacctcaacaacggaccgcagagaattggccggaagtataagaaagtgcgatttatggcctatacagacgaaacctttaagacaagggaggccatccagcatgagagtgggattttgggacctcttctttacggcgaagttggtgataccctcctcatcatcttcaagaatcaagcttctcgcccctataacatttacccacacgggatcactgacgttcgccctttgtatagcagaagacttcccaaaggcgtgaagcatctcaaagacttccccattttgccaggcgagatctttaagtacaaatggaccgtcacagtggaagatggaccgactaaatcagaccctcgatgccttacgcggtactattcctccttcgtgaatatggagagagatttggcaagcggactcataggaccactcctcatctgttacaaggaatctgtagaccagaggggtaaccagattatgagtgataaacgcaatgtgatcctttttagcgtcttcgacgagaaccggtcctggtacttgaccgagaatatacaaaggttccttcccaaccccgcaggcgttcagttggaagaccctgagtttcaggccagcaatattatgcactcaatcaacggctatgtgtttgatagtctccagctttctgtttgcctccatgaagtagcctattggtacatcttgtcaattggtgctcaaacagacttcctctccgtcttcttctccggctacacctttaagcacaagatggtgtatgaggacactctcacactctttccattttctggagaaaccgtgttcatgagcatggagaatccaggcctttggatcttgggttgccacaacagtgattttcgcaatcggggaatgactgctctcctcaaagtcagcagctgtgataagaacacaggcgactattacgaagattcttacgaggacataagtgcctacttgttgtccaagaataacgccattgagcccagatcattctcccagaatcctcccgtgcttaaaaggcatcagcgcgaaatcaccagaactactcttcagtctgatcaagaggagattgactatgacgacaccataagcgtggaaatgaagaaggaggatttcgatatctatgacgaagatgagaaccagtctccgcggagctttcagaagaagacgcgacactacttcattgcagcagtcgaaaggctttgggactacggtatgtcatcatcccctcatgtgttgcgcaatagagctcagagtggaagtgttccacagttcaagaaagtcgtctttcaagagtttacagatggcagcttcacacagcctctctatcggggcgagcttaacgaacatttgggactccttggtccctatatccgagccgaagtggaggacaacattatggttacctttaggaatcaagcctctcgcccctacagcttctactcctccctcatcagttatgaggaggatcagagacaaggcgctgaaccacggaagaactttgtgaaaccgaatgagacgaagacctacttctggaaagtacagcaccacatggcccccacaaaagacgaattcgattgcaaagcatgggcgtatttttcagacgttgacttggagaaagatgtacattcaggacttattggtcctttgttggtgtgtcacactaacactctcaatccagcccatggcaggcaggtgacagtccaggaattcgctcttttctttaccatctttgatgagaccaagtcctggtacttcacggaaaacatggagcgcaattgcagagccccctgtaacatacagatggaggaccctacctttaaggaaaattatcggttccacgcaatcaacggatacattatggatacactccctggccttgtgatggctcaggaccaacgaatcaggtggtacctcctcagcatgggttctaatgagaacatacactccattcacttttcaggacatgtgttcactgtccggaagaaagaagagtataagatggccctctacaatttgtatccaggcgtgtttgagaccgttgaaatgcttccctctaaagctggcatctggagagtagagtgcttgatcggagaacatcttcacgcaggtatgagcaccttgttcctcgtgtacagcaacaaatgtcagaccccacttggcatggccagtggacacattcgcgactttcagatcacagcatctggccagtatggacaatgggccccaaagttggctcgcctccattactccggtagcataaatgcgtggtccactaaagaacctttcagctggattaaggtcgatcttcttgcccccatgatcatccacggcattaagacacagggagcgaggcagaaattctcctccctctacatctcacagttcattattatgtatagtttggacggcaagaagtggcaaacttatagaggtaacagtactggaacacgcatggttttcttcggcaacgttgatagctctggcatcaaacacaacatctttaatcctcccataatagctcggtacatcagattgcatccgacccactacagcattaggagtacactccgaatggagcttatgggttgcgacttgaattcctgttcaatgccactcggaatggagtctaaagccatctctgatgcacagataaccgccagtagctactttacgaacatgtttgctacgtggtcaccctctaaggcaaggcttcatttgcaaggccggtctaatgcctggagacctcaggtgaacaacccgaaagaatggctccaggtggactttcagaagaccatgaaagtaacaggtgtcactactcagggagttaagtccttggataccagcatgtatgtgaaggagttccttatttcctcatcacaagatggccaccagtggaccctcttctttcagaatggtaaggtcaaagtgtttcagggcaatcaagacagcttcacacccgtggtgaacagtcttgatcctccactcttgacacgataccttcgaatccatccacagtcttgggttcaccagattgcattgcgcatggaagtacttggatgcgaggctcaggacctctac

SEQ ID NO: 648 - protein, 1457 aa, synthetic construct
  REGION 1..1457: note = Variant of human B-domain deleted Factor VIII
MQIELSTCFFLCLLRFCFSATRRYYLGAVELSWDYMQSDLGELPVDARFPPRVPKSFPDNTSVVYKKTLFVEFTDHLFNIAKPRPPWMGLLGPTIQAEVYDTVVITLKNMASHPVSLHAVGVSYWKASEGAEYDDQTSQREKEDDKVFPGGSHTYVWQVLKENGPMASDPLCLTYSYLSHVDLVKDLNSGLIGALLVCREGSLAKEKTQTLHKFILLFAVFDEGKSWHSETKNSLMQDRDAASARAWPKMHTVNGYVNRSLPGLIGCHRKSVYWHVIGMGTTPEVHSIFLEGHTFLVRNHRQASLGISPITFLTAQTLLMDLGQFLLFCHISSHQHDGMEAYVEVDSCPEEPQLRMKNNEEAEDYDDDLTDSEMDVVRFDDDNSPSFIQIRSVAKKHPKTWVHYIAAEEEDWDYAPLVLAPDDRSYKSQYLNNGPQRIGRKYKKVRFMAYTDETFKTREAIQHESGILGPLLYGEVGDTLLIIFKNQASRPYNIYPHGITDVRPLYSRRLPKGVKHLKDFPILPGEIFKYKWTVTVEDGPTKSDPRCLTRYYSSFVNMERDLASGLIGPLLICYKESVDQRGNQIMSDKRNVILFSVFDENRSWYLTENIQRFLPNPAGVQLEDPEFQASNIMHSINGYVFDSLQLSVCLHEVAYWYILSIGAQTDFLSVFFSGYTFKHKMVYEDTLTLFPFSGETVFMSMENPGLWILGCHNSDFRNRGMTALLKVSSCDKNTGDYYEDSYEDISAYLLSKNNAIEPRSFSQNPPVLKRHQREITRTTLQSDQEEIDYDDTISVEMKKEDFDIYDEDENQSPRSFQKKTRHYFIAAVERLWDYGMSSSPHVLRNRAQSGSVPQFKKVVFQEFTDGSFTQPLYRGELNEHLGLLGPYIRAEVEDNIMVTFRNQASRPYSFYSSLISYEEDQRQGAEPRKNFVKPNETKTYFWKVQHHMAPTKDEFDCKAWAYFSDVDLEKDVHSGLIGPLLVCHTNTLNPAHGRQVTVQEFALFFTIFDETKSWYFTENMERNCRAPCNIQMEDPTFKENYRFHAINGYIMDTLPGLVMAQDQRIRWYLLSMGSNENIHSIHFSGHVFTVRKKEEYKMALYNLYPGVFETVEMLPSKAGIWRVECLIGEHLHAGMSTLFLVYSNKCQTPLGMASGHIRDFQITASGQYGQWAPKLARLHYSGSINAWSTKEPFSWIKVDLLAPMIIHGIKTQGARQKFSSLYISQFIIMYSLDGKKWQTYRGNSTGTRMVFFGNVDSSGIKHNIFNPPIIARYIRLHPTHYSIRSTLRMELMGCDLNSCSMPLGMESKAISDAQITASSYFTNMFATWSPSKARLHLQGRSNAWRPQVNNPKEWLQVDFQKTMKVTGVTTQGVKSLDTSMYVKEFLISSSQDGHQWTLFFQNGKVKVFQGNQDSFTPVVNSLDPPLLTRYLRIHPQSWVHQIALRMEVLGCEAQDLY

SEQ ID NO: 649 - DNA, 4371 bp, synthetic construct
  misc_feature 1..4371: note = Variant of human B-domain deleted Factor VIII
  source 1..4371: mol_type = other DNA
atgcagattgaactgtctacctgcttcttcctctgtttgctgaggttctgctttagcgccactagacggtactaccttggcgctgtggagctgtcctgggactatatgcagagtgatttgggagagcttcccgtcgacgcacgatttcctcctcgcgttccaaagtcatttccctttaacacaagcgttgtgtacaagaagacgctcttcgtcgaattcaccgatcacctgttcaatatcgccaaacccagaccaccatggatgggtcttttggggcctaccatacaagcggaggtgtatgacacagttgttatcactctcaagaacatggcttctcatccggtaagtcttcacgcagtgggcgtgtcctactggaaagcttcagaaggagccgagtatgatgatcagacatcccagagggagaaagaagacgacaaggtatttccaggtgggtctcatacctatgtgtggcaagtgctcaaagagaatggccctatggcaagcgatccgctctgtttgacttacagctacctttcacacgttgacctcgtcaaggacctcaactccgggttgattggagccttgttggtatgcagggaaggatctcttgccaaagagaagacacagaccctccacaagtttatccttctctttgctgtgttcgatgagggcaaaagttggcatagcgaaacgaagaattccctcatgcaggatcgcgacgcagccagcgccagagcttggcccaagatgcacactgtgaacggatatgtcaataggtcacttcctggcttgattgggtgtcatcggaaaagtgtctactggcacgtgatcggaatggggacaacaccagaggtccactccatatttctcgaaggccataccttccttgttcgaaaccacagacaggcatccttggagatctctcccattacctttctcactgcccaaacgctccttatggacttgggtcagttccttctcttctgccatatcagctcacaccagcatgatggtatggaagcttatgtggaggtcgacagttgtccagaggagccacagctgcgcatgaagaataatgaagaagccgaggattacgacgacgatctcaccgattctgagatggacgtggtgaggtttgatgacgacaactctccctccttcattcaaatccggagcgtggcgaagaaacaccccaagacttgggtccactatatagcggcggaagaggaggattgggattacgctcctcttgtattggcaccagatgaccgctcatacaaaagccagtacctcaacaacggaccgcagagaattggccggaagtataagaaagtgcgatttatggcctatacagacgaaacctttaagacaagggaggccatccagcatgagagtgggattttgggacctcttctttacggcgaagttggtgataccctcctcatcatcttcaagaatcaagcttctcgcccctataacatttacccacacgggatcactgacgttaggcctttgtatagcagaagacttcccaaaggcgtgaagcatctcaaagacttccccattttgccaggcgagatctttaagtacaaatggaccgtcacagtggaagatggaccgactaaatcagaccctcgatgccttacgcggtactattcctccttcgtgaatatggagagagatttggcaagcggactcataggaccactcctcatctgttacaaggaatctgtagaccagaggggtaaccagattatgagtgataaacgcaatgtgatcctttttagcgtcttcgacgagaaccggtcctggtacttgaccgagaatatacaaaggttccttcccaaccccgcaggcgttcagttggaagaccctgagtttcaggccagcaatattatgcactcaatcaacggctatgtgtttgatagtctccagctttctgtttgcctccatgaagtagcctattggtacatcttgtcaattggtgctcaaacagacttcctctccgtcttcttctccggctacacctttaagcacaagatggtgtatgaggacactctcacactctttccattttctggagaaaccgtgttcatgagcatggagaatccaggcctttggatcttgggttgccacaacagtgattttcgcaatcggggaatgactgctctcctcaaagtcagcagctgtgataagaacacaggcgactattacgaagattcttacgaggacataagtgcctacttgttgtccaagaataacgccattgagcccagatcattctcccagaatcctcccgtgcttaaaaggcatcagcgcgaaatcaccagaactactcttcagtctgatcaagaggagattgactatgacgacaccataagcgtggaaatgaagaaggaggatttcgatatctatgacgaagatgagaaccagtctccgcggagctttcagaagaagacgcgacactacttcattgcagcagtcgaaaggctttgggactacggtatgtcatcatcccctcatgtgttgcgcaatagagctcagagtggaagtgttccacagttcaagaaagtcgtctttcaagagtttacagatggcagcttcacacagcctctctatcggggcgagcttaacgaacatttgggactccttggtccctatatccgagccgaagtggaggacaacattatggttacctttaggaatcaagcctctcgcccctacagcttctactcctccctcatcagttatgaggaggatcagagacaaggcgctgaaccacggaagaactttgtgaaaccgaatgagacgaagacctacttctggaaagtacagcaccacatggcccccacaaaagacgaattcgattgcaaagcatgggcgtatttttcagacgttgacttggagaaagatgtacattcaggacttattggtcctttgttggtgtgtcacactaacactctcaatccagcccatggcaggcaggtgacagtccaggaattcgctcttttctttaccatctttgatgagaccaagtcctggtacttcacggaaaacatggagcgcaattgcagagccccctgtaacatacagatggaggaccctacctttaaggaaaattatcggttccacgcaatcaacggatacattatggatacactccctggccttgtgatggctcaggaccaacgaatcaggtggtacctcctcagcatgggttctaatgagaacatacactccattcacttttcaggacatgtgttcactgtccggaagaaagaagagtataagatggccctctacaatttgtatccaggcgtgtttgagaccgttgaaatgcttccctctaaagctggcatctggagagtagagtgcttgatcggagaacatcttcacgcaggtatgagcaccttgttcctcgtgtacagcaacaaatgtcagaccccacttggcatggccagtggacacattcgcgactttcagatcacagcatctggccagtatggacaatgggccccaaagttggctcgcctccattactccggtagcataaatgcgtggtccactaaagaacctttcagctggattaaggtcgatcttcttgcccccatgatcatccacggcattaagacacagggagcgaggcagaaattctcctccctctacatctcacagttcattattatgtatagtttggacggcaagaagtggcaaacttatagaggtaacagtactggaacacgcatgacgttcttcggcaacgttgatagctctggcatcaaacacaacatctttaatcctcccataatagctcggtacatcagattgcatccgacccactacagcattaggagtacactccgaatggagcttatgggttgcgacttgaattcctgttcaatgccactcggaatggagtctaaagccatctctgatgcacagataaccgccagtagctactttacgaacatgtttgctacgtggtcaccctctaaggcaaggcttcatttgcaaggccggtctaatgcctggagacctcaggtgaacaacccgaaagaatggctccaggtggactttcagaagaccatgaaagtaacaggtgtcactactcagggagttaagtccttggataccagcatgtatgtgaaggagttccttatttcctcatcacaagatggccaccagtggaccctcttctttcagaatggtaaggtcaaagtgtttcagggcaatcaagacagcttcacacccgtggtgaacagtcttgatcctccactcttgacacgataccttcgaatccatccacagtcttgggttcaccagattgcattgcgcatggaagtacttggatgcgaggctcaggacctctac

SEQ ID NO: 650 - protein, 1457 aa, synthetic construct
  REGION 1..1457: note = Variant of human B-domain deleted Factor VIII
MQIELSTCFFLCLLRFCFSATRRYYLGAVELSWDYMQSDLGELPVDARFPPRVPKSFPFNTSVVYKKTLFVEFTDHLFNIAKPRPPWMGLLGPTIQAEVYDTVVITLKNMASHPVSLHAVGVSYWKASEGAEYDDQTSQREKEDDKVFPGGSHTYVWQVLKENGPMASDPLCLTYSYLSHVDLVKDLNSGLIGALLVCREGSLAKEKTQTLHKFILLFAVFDEGKSWHSETKNSLMQDRDAASARAWPKMHTVNGYVNRSLPGLIGCHRKSVYWHVIGMGTTPEVHSIFLEGHTFLVRNHRQASLEISPITFLTAQTLLMDLGQFLLFCHISSHQHDGMEAYVEVDSCPEEPQLRMKNNEEAEDYDDDLTDSEMDVVRFDDDNSPSFIQIRSVAKKHPKTWVHYIAAEEEDWDYAPLVLAPDDRSYKSQYLNNGPQRIGRKYKKVRFMAYTDETFKTREAIQHESGILGPLLYGEVGDTLLIIFKNQASRPYNIYPHGITDVRPLYSRRLPKGVKHLKDFPILPGEIFKYKWTVTVEDGPTKSDPRCLTRYYSSFVNMERDLASGLIGPLLICYKESVDQRGNQIMSDKRNVILFSVFDENRSWYLTENIQRFLPNPAGVQLEDPEFQASNIMHSINGYVFDSLQLSVCLHEVAYWYILSIGAQTDFLSVFFSGYTFKHKMVYEDTLTLFPFSGETVFMSMENPGLWILGCHNSDFRNRGMTALLKVSSCDKNTGDYYEDSYEDISAYLLSKNNAIEPRSFSQNPPVLKRHQREITRTTLQSDQEEIDYDDTISVEMKKEDFDIYDEDENQSPRSFQKKTRHYFIAAVERLWDYGMSSSPHVLRNRAQSGSVPQFKKVVFQEFTDGSFTQPLYRGELNEHLGLLGPYIRAEVEDNIMVTFRNQASRPYSFYSSLISYEEDQRQGAEPRKNFVKPNETKTYFWKVQHHMAPTKDEFDCKAWAYFSDVDLEKDVHSGLIGPLLVCHTNTLNPAHGRQVTVQEFALFFTIFDETKSWYFTENMERNCRAPCNIQMEDPTFKENYRFHAINGYIMDTLPGLVMAQDQRIRWYLLSMGSNENIHSIHFSGHVFTVRKKEEYKMALYNLYPGVFETVEMLPSKAGIWRVECLIGEHLHAGMSTLFLVYSNKCQTPLGMASGHIRDFQITASGQYGQWAPKLARLHYSGSINAWSTKEPFSWIKVDLLAPMIIHGIKTQGARQKFSSLYISQFIIMYSLDGKKWQTYRGNSTGTRMTFFGNVDSSGIKHNIFNPPIIARYIRLHPTHYSIRSTLRMELMGCDLNSCSMPLGMESKAISDAQITASSYFTNMFATWSPSKARLHLQGRSNAWRPQVNNPKEWLQVDFQKTMKVTGVTTQGVKSLDTSMYVKEFLISSSQDGHQWTLFFQNGKVKVFQGNQDSFTPVVNSLDPPLLTRYLRIHPQSWVHQIALRMEVLGCEAQDLY

SEQ ID NO: 651 - DNA, 4371 bp, synthetic construct
  misc_feature 1..4371: note = Variant of human B-domain deleted Factor VIII
  source 1..4371: mol_type = other DNA
atgcagattgaactgtctacctgcttcttcctctgtttgctgaggttctgctttagcgccactagacggtactaccttggcgctgtggagctgtcctgggactatatgcagagtgatttgggagagcttcccgtcgacgcacgatttcctcctcgcgttccaaagtcatttccctttaacacaagcgttgtgtacaagaagacgctcttcgtcgaattcaccgatcacctgttcaatatcgccaaacccagaccaccatggatgggtcttttggggcctaccatacaagcggaggtgtatgacacagttgttatcactctcaagaacatggcttctcatccggtaagtcttcacgcagtgggcgtgtcctactggaaagcttcagaaggagccgagtatgatgatcagacatcccagagggagaaagaagacgacaaggtatttccaggtgggtctcatacctatgtgtggcaagtgctcaaagagaatggccctatggcaagcgatccgctctgtttgacttacagctacctttcacacgttgacctcgtcaaggacctcaactccgggttgattggagccttgttggtatgcagggaaggatctcttgccaaagagaagacacagaccctccacaagtttatccttctctttgctgtgttcgatgagggcaaaagttggcatagcgaaacgaagaattccctcatgcaggatcgcgacgcagccagcgccagagcttggcccaagatgcacactgtgaacggatatgtcaataggtcacttcctggcttgattgggtgtcatcggaaaagtgtctactggcacgtgatcggaatggggacaacaccagaggtccactccatatttctcgaaggccataccttccttgttcgaaaccacagacaggcatccttggagatctctcccattacctttctcactgcccaaacgctccttatggacttgggtcagttccttctcttctgccatatcagctcacaccagcatgatggtatggaagcttatgtgaaagtcgacagttgtcctgaggagccacagttgcgcatgaagaataatgaagaagccgaggattacgacgacgatctcaccgattctgagatggacgtggtgaggtttgatgacgacaactctccctccttcattcaaatccggagcgtggcgaagaaacaccccaagacttgggtccactatatagcggcggaagaggaggattgggattacgctcctcttgtattggcaccagatgaccgctcatacaaaagccagtacctcaacaacggaccgcagagaattggccggaagtataagaaagtgcgatttatggcctatacagacgaaacctttaagacaagggaggccatccagcatgagagtgggattttgggacctcttctttacggcgaagttggtgataccctcctcatcatcttcaagaatcaagcttctcgcccctataacatttacccacacgggatcactgacgttaggcctttgtatagcagaagacttcccaaaggcgtgaagcatctcaaagacttccccattttgccaggcgagatctttaagtacaaatggaccgtcacagtggaagatggaccgactaaatcagaccctcgatgccttacgcggtactattcctccttcgtgaatatggagagagatttggcaagcggactcataggaccactcctcatctgttacaaggaatctgtagaccagaggggtaaccagattatgagtgataaacgcaatgtgatcctttttagcgtcttcgacgagaaccggtcctggtacttgaccgagaatatacaaaggttccttcccaaccccgcaggcgttcagttggaagaccctgagtttcaggccagcaatattatgcactcaatcaacggctatgtgtttgatagtctccagctttctgtttgcctccatgaagtagcctattggtacatcttgtcaattggtgctcaaacagacttcctctccgtcttcttctccggctacacctttaagcacaagatggtgtatgaggacactctcacactctttccattttctggagaaaccgtgttcatgagcatggagaatccaggcctgtggaaattgggttgccacaacagtgattttcgcaatcggggaatgactgctctcctcaaagtcagcagctgtgataagaacacaggcgactattacgaagattcttacgaggacataagtgcctacttgttgtccaagaataacgccattgagcccagatcattctcccagaatcctcccgtgcttaaaaggcatcagcgcgaaatcaccagaactactcttcagtctgatcaagaggagattgactatgacgacaccataagcgtggaaatgaagaaggaggatttcgatatctatgacgaagatgagaaccagtctccgcggagctttcagaagaagacgcgacactacttcattgcagcagtcgaaaggctttgggactacggtatgtcatcatcccctcatgtgttgcgcaatagagctcagagtggaagtgttccacagttcaagaaagtcgtctttcaagagtttacagatggcagcttcacacagcctctctatcggggcgagcttaacgaacatttgggactccttggtccctatatccgagccgaagtggaggacaacattatggttacctttaggaatcaagcctctcgcccctacagcttctactcctccctcatcagttatgaggaggatcagagacaaggcgctgaaccacggaagaactttgtgaaaccgaatgagacgaagacctacttctggaaagtacagcaccacatggcccccacaaaagacgaattcgattgcaaagcatgggcgtatttttcagacgttgacttggagaaagatgtacattcaggacttattggtcctttgttggtgtgtcacactaacactctcaatccagcccatggcaggcaggtgacagtccaggaattcgctcttttctttaccatctttgatgagaccaagtcctggtacttcacggaaaacatggagcgcaattgcagagccccctgtaacatacagatggaggaccctacctttaaggaaaattatcggttccacgcaatcaacggatacattatggatacactccctggccttgtgatggctcaggaccaacgaatcaggtggtacctcctcagcatgggttctaatgagaacatacactccattcacttttcaggacatgtgttcactgtccggaagaaagaagagtataagatggccctctacaatttgtatccaggcgtgtttgagaccgttgaaatgcttccctctaaagctggcatctggagagtagagtgcttgatcggagaacatcttcacgcaggtatgagcaccttgttcctcgtgtacagcaacaaatgtcagaccccacttggcatggccagtggacacattcgcgactttcagatcacagcatctggccagtatggacaatgggccccaaagttggctcgcctccattactccggtagcataaatgcgtggtccactaaagaacctttcagctggattaaggtcgatcttcttgcccccatgatcatccacggcattaagacacagggagcgaggcagaaattctcctccctctacatctcacagttcattattatgtatagtttggacggcaagaagtggcaaacttatagaggtaacagtactggaacactcatggtgttcttcggcaacgttgatagctctggcatcaaacacaacatctttaatcctcccataatagctcggtacatcagattgcatccgacccactacagcattaggagtacactccgaatggagcttatgggttgcgacttgaattcctgttcaatgccactcggaatggagtctaaagccatctctgatgcacagataaccgccagtagctactttacgaacatgtttgctacgtggtcaccctctaaggcaaggcttcatttgcaaggccggtctaatgcctggagacctcaggtgaacaacccgaaagaatggctccaggtggactttcagaagaccatgaaagtaacaggtgtcactactcagggagttaagtccttggataccagcatgtatgtgaaggagttccttatttcctcatcacaagatggccaccagtggaccctcttctttcagaatggtaaggtcaaagtgtttcagggcaatcaagacagcttcacacccgtggtgaacagtcttgatcctccactcttgacacgataccttcgaatccatccacagtcttgggttcaccagattgcattgcgcatggaagtacttggatgcgaggctcaggacctctac

SEQ ID NO: 652 - protein, 1457 aa, synthetic construct
  REGION 1..1457: note = Variant of human B-domain deleted Factor VIII
MQIELSTCFFLCLLRFCFSATRRYYLGAVELSWDYMQSDLGELPVDARFPPRVPKSFPFNTSVVYKKTLFVEFTDHLFNIAKPRPPWMGLLGPTIQAEVYDTVVITLKNMASHPVSLHAVGVSYWKASEGAEYDDQTSQREKEDDKVFPGGSHTYVWQVLKENGPMASDPLCLTYSYLSHVDLVKDLNSGLIGALLVCREGSLAKEKTQTLHKFILLFAVFDEGKSWHSETKNSLMQDRDAASARAWPKMHTVNGYVNRSLPGLIGCHRKSVYWHVIGMGTTPEVHSIFLEGHTFLVRNHRQASLEISPITFLTAQTLLMDLGQFLLFCHISSHQHDGMEAYVKVDSCPEEPQLRMKNNEEAEDYDDDLTDSEMDVVRFDDDNSPSFIQIRSVAKKHPKTWVHYIAAEEEDWDYAPLVLAPDDRSYKSQYLNNGPQRIGRKYKKVRFMAYTDETFKTREAIQHESGILGPLLYGEVGDTLLIIFKNQASRPYNIYPHGITDVRPLYSRRLPKGVKHLKDFPILPGEIFKYKWTVTVEDGPTKSDPRCLTRYYSSFVNMERDLASGLIGPLLICYKESVDQRGNQIMSDKRNVILFSVFDENRSWYLTENIQRFLPNPAGVQLEDPEFQASNIMHSINGYVFDSLQLSVCLHEVAYWYILSIGAQTDFLSVFFSGYTFKHKMVYEDTLTLFPFSGETVFMSMENPGLWKLGCHNSDFRNRGMTALLKVSSCDKNTGDYYEDSYEDISAYLLSKNNAIEPRSFSQNPPVLKRHQREITRTTLQSDQEEIDYDDTISVEMKKEDFDIYDEDENQSPRSFQKKTRHYFIAAVERLWDYGMSSSPHVLRNRAQSGSVPQFKKVVFQEFTDGSFTQPLYRGELNEHLGLLGPYIRAEVEDNIMVTFRNQASRPYSFYSSLISYEEDQRQGAEPRKNFVKPNETKTYFWKVQHHMAPTKDEFDCKAWAYFSDVDLEKDVHSGLIGPLLVCHTNTLNPAHGRQVTVQEFALFFTIFDETKSWYFTENMERNCRAPCNIQMEDPTFKENYRFHAINGYIMDTLPGLVMAQDQRIRWYLLSMGSNENIHSIHFSGHVFTVRKKEEYKMALYNLYPGVFETVEMLPSKAGIWRVECLIGEHLHAGMSTLFLVYSNKCQTPLGMASGHIRDFQITASGQYGQWAPKLARLHYSGSINAWSTKEPFSWIKVDLLAPMIIHGIKTQGARQKFSSLYISQFIIMYSLDGKKWQTYRGNSTGTLMVFFGNVDSSGIKHNIFNPPIIARYIRLHPTHYSIRSTLRMELMGCDLNSCSMPLGMESKAISDAQITASSYFTNMFATWSPSKARLHLQGRSNAWRPQVNNPKEWLQVDFQKTMKVTGVTTQGVKSLDTSMYVKEFLISSSQDGHQWTLFFQNGKVKVFQGNQDSFTPVVNSLDPPLLTRYLRIHPQSWVHQIALRMEVLGCEAQDLY

SEQ ID NO: 653 - DNA, 4371 bp, synthetic construct
  misc_feature 1..4371: note = Variant of human B-domain deleted Factor VIII
  source 1..4371: mol_type = other DNA
atgcagattgaactgtctacctgcttcttcctctgtttgctgaggttctgctttagcgccactagacggtactaccttggcgctgtggagctgtcctgggactatatgcagagtgatttgggagagcttcccgtcgacgcacgatttcctcctcgcgttccaaagtcatttccctttaacacaagccgtgtgtacaagaagacgctcttcgtcgaattcaccgatcacctgttcaatatcgccaaacccagaccaccatggatgggtcttttggggcctaccatacaagcggaggtgtatgacacagttgttatcactctcaagaacatggcttctcatccggtaagtcttcacgcagtgggcgtgtcctactggaaagcttcagaaggagccgagtatgatgatcagacatcccagagggagaaagaagacgacaaggtatttccaggtgggtctcatacctatgtgtggcaagtgctcaaagagaatggccctatggcaagcgatccgctctgtttgacttacagctacctttcacacgttgacctcgtcaaggacctcaactccgggttgattggagccttgttggtatgcagggaaggatctcttgccaaagagaagacacagaccctccacaagtttatccttctctttgctgtgttcgatgagggcaaaagttggcatagcgaaacgaagaattccctcatgcaggatcgcgacgcagccagcgccagagcttggcccaagatgcacactgtgaacggatatgtcaataggtcacttcctggcttgattgggtgtcatcggaaaagtgtctactggcacgtgatcggaatggggacaacaccagaggtccactccatatttctcgaaggccataccttccttgttcgaaaccacagacaggcatccttggagatctctcccattacctttctcactgcccaaacgctccttatggacttgggtcagttccttctcttctgccatatcagctcacaccagcatgatggtatggaagcttatgtggaggtcgacagttgtggggaggagccacagctgcgcatgaagaataatgaagaagccgaggattacgacgacgatctcaccgattctgagatggacgtggtgaggtttgatgacgacaactctccctccttcattcaaatccggagcgtggcgaagaaacaccccaagacttgggtccactatatagcggcggaagaggaggattgggattacgctcctcttgtattggcaccagatgaccgctcatacaaaagccagtacctcaacaacggaccgcagagaattggccggaagtataagaaagtgcgatttatggcctatacagacgaaacctttaagacaagggaggccatccagcatgagagtgggattttgggacctcttctttacggcgaagttggtgataccctcctcatcatcttcaagaatcaagcttctcgcccctataacatttacccacacgggatcactgacgttaggcctttgtatagcagaagacttcccaaaggcgtgaagcatctcaaagacttccccattttgccaggcgagatctttaagtacaaatggaccgtcacagtggaagatggaccgactaaatcagaccctcgatgccttacgcggtactattcctccttcgtgaatatggagagagatttggcaagcggactcataggaccactcctcatctgttacaaggaatctgtagaccagaggggtaaccagattatgagtgataaacgcaatgtgatcctttttagcgtcttcgacgagaaccggtcctggtacttgaccgagaatatacaaaggttccttcccaaccccgcaggcgttcagttggaagaccctgagtttcaggccagcaatattatgcactcaatcaacggctatgtgtttgatagtctccagctttctgtttgcctccatgaagtagcctattggtacatcttgtcaattggtgctcaaacagacttcctctccgtcttcttctccggctacacctttaagcacaagatggtgtatgaggacactctcacactctttccattttctggagaaaccgtgttcatgagcatggagaatccaggcctttggatcttgggttgccacaacagtgattttcgcaatcggggaatgactgctctcctcaaagtcagcagctgtgataagaacacaggcgactattacgaagattcttacgaggacataagtgcctacttgttgtccaagaataacgccattgagcccagatcattctcccagaatcctcccgtgcttaaaaggcatcagcgcgaaatcaccagaactactcttcagtctgatcaagaggagattgactatgacgacaccataagcgtggaaatgaagaaggaggatttcgatatctatgacgaagatgagaaccagtctccgcggagctttcagaagaagacgcgacactacttcattgcagcagtcgaaaggctttgggactacggtatgtcatcatcccctcatgtgttgcgcaatagagctcagagtggaagtgttccacagttcaagaaagtcgtctttcaagagtttacagatggcagcttcacacagcctctctatcggggcgagcttaacgaacatttgggactccttggtccctatatccgagccgaagtggaggacaacattatggttacctttaggaatcaagcctctcgcccctacagcttctactcctccctcatcagttatgaggaggatcagagacaaggcgctgaaccacggaagaactttgtgaaaccgaatgagacgaagacctacttctggaaagtacagcaccacatggcccccacaaaagacgaattcgattgcaaagcatgggcgtatttttcagacgttgacttggagaaagatgtacattcaggacttattggtcctttgttggtgtgtcacactaacactctcaatccagcccatggcaggcaggtgacagtccaggaattcgctcttttctttaccatctttgatgagaccaagtcctggtacttcacggaaaacatggagcgcaattgcagagccccctgtaacatacagatggaggaccctacctttaaggaaaattatcggttccacgcaatcaacggatacattatggatacactccctggccttgtgatggctcaggaccaacgaatcaggtggtacctcctcagcatgggttctaatgagaacatacactccattcacttttcaggacatgtgttcactgtccggaagaaagaagagtataagatggccctctacaatttgtatccaggcgtgtttgagaccgttgaaatgcttccctctaaagctggcatctggagagtagagtgcttgatcggagaacatcttcacgcaggtatgagcaccttgttcctcgtgtacagcaacaaatgtcagaccccacttggcatggccagtggacacattcgcgactttcagatcacagcatctggccagtatggacaatgggccccaaagttggctcgcctccattactccggtagcataaatgcgtggtccactaaagaacctttcagctggattaaggtcgatcttcttgcccccatgatcatccacggcattaagacacagggagcgaggcagaaattctcctccctctacatctcacagttcattattatgtatagtttggacggcaagaagtggcaaacttatagaggtaacagtactggaacactcatggtgttcttcggcaacgttgatagctctggcatcaaacacaacatctttaatcctcccataatagctcggtacatcagattgcatccgacccactacagcattaggagtacactccgaatggagcttatgggttgcgacttgaattcctgttcaatgccactcggaatggagtctaaagccatctctgatgcacagataaccgccagtagctactttacgaacatgtttgctacgtggtcaccctctaaggcaaggcttcatttgcaaggccggtctaatgcctggagacctcaggtgaacaacccgaaagaatggctccaggtggactttcagaagaccatgaaagtaacaggtgtcactactcagggagttaagtccttggataccagcatgtatgtgaaggagttccttatttcctcatcacaagatggccaccagtggaccctcttctttcagaatggtaaggtcaaagtgtttcagggcaatcaagacagcttcacacccgtggtgaacagtcttgatcctccactcttgacacgataccttcgaatccatccacagtcttgggttcaccagattgcattgcgcatggaagtacttggatgcgaggctcaggacctctac

SEQ ID NO: 654 - protein, 1457 aa, synthetic construct
  REGION 1..1457: note = Variant of human B-domain deleted Factor VIII
MQIELSTCFFLCLLRFCFSATRRYYLGAVELSWDYMQSDLGELPVDARFPPRVPKSFPFNTSRVYKKTLFVEFTDHLFNIAKPRPPWMGLLGPTIQAEVYDTVVITLKNMASHPVSLHAVGVSYWKASEGAEYDDQTSQREKEDDKVFPGGSHTYVWQVLKENGPMASDPLCLTYSYLSHVDLVKDLNSGLIGALLVCREGSLAKEKTQTLHKFILLFAVFDEGKSWHSETKNSLMQDRDAASARAWPKMHTVNGYVNRSLPGLIGCHRKSVYWHVIGMGTTPEVHSIFLEGHTFLVRNHRQASLEISPITFLTAQTLLMDLGQFLLFCHISSHQHDGMEAYVEVDSCGEEPQLRMKNNEEAEDYDDDLTDSEMDVVRFDDDNSPSFIQIRSVAKKHPKTWVHYIAAEEEDWDYAPLVLAPDDRSYKSQYLNNGPQRIGRKYKKVRFMAYTDETFKTREAIQHESGILGPLLYGEVGDTLLIIFKNQASRPYNIYPHGITDVRPLYSRRLPKGVKHLKDFPILPGEIFKYKWTVTVEDGPTKSDPRCLTRYYSSFVNMERDLASGLIGPLLICYKESVDQRGNQIMSDKRNVILFSVFDENRSWYLTENIQRFLPNPAGVQLEDPEFQASNIMHSINGYVFDSLQLSVCLHEVAYWYILSIGAQTDFLSVFFSGYTFKHKMVYEDTLTLFPFSGETVFMSMENPGLWILGCHNSDFRNRGMTALLKVSSCDKNTGDYYEDSYEDISAYLLSKNNAIEPRSFSQNPPVLKRHQREITRTTLQSDQEEIDYDDTISVEMKKEDFDIYDEDENQSPRSFQKKTRHYFIAAVERLWDYGMSSSPHVLRNRAQSGSVPQFKKVVFQEFTDGSFTQPLYRGELNEHLGLLGPYIRAEVEDNIMVTFRNQASRPYSFYSSLISYEEDQRQGAEPRKNFVKPNETKTYFWKVQHHMAPTKDEFDCKAWAYFSDVDLEKDVHSGLIGPLLVCHTNTLNPAHGRQVTVQEFALFFTIFDETKSWYFTENMERNCRAPCNIQMEDPTFKENYRFHAINGYIMDTLPGLVMAQDQRIRWYLLSMGSNENIHSIHFSGHVFTVRKKEEYKMALYNLYPGVFETVEMLPSKAGIWRVECLIGEHLHAGMSTLFLVYSNKCQTPLGMASGHIRDFQITASGQYGQWAPKLARLHYSGSINAWSTKEPFSWIKVDLLAPMIIHGIKTQGARQKFSSLYISQFIIMYSLDGKKWQTYRGNSTGTLMVFFGNVDSSGIKHNIFNPPIIARYIRLHPTHYSIRSTLRMELMGCDLNSCSMPLGMESKAISDAQITASSYFTNMFATWSPSKARLHLQGRSNAWRPQVNNPKEWLQVDFQKTMKVTGVTTQGVKSLDTSMYVKEFLISSSQDGHQWTLFFQNGKVKVFQGNQDSFTPVVNSLDPPLLTRYLRIHPQSWVHQIALRMEVLGCEAQDLY

SEQ ID NO: 655 - DNA, 4371 bp, synthetic construct
  misc_feature 1..4371: note = Variant of human B-domain deleted Factor VIII
  source 1..4371: mol_type = other DNA
atgcagattgaactgtctacctgcttcttcctctgtttgctgaggttctgctttagcgccactagacggtactaccttggcgctgtggagctgtcctgggactatatgcagagtgatttgggagagcttcccgtcgacgcacgatttcctcctcgcgttccaaagtcatttcccgataacacaagcgttgtgtacaagaagacgctcttcgtcgaattcaccgatcacctgttcaatatcgccaaacccagaccaccatggatgggtcttttggggcctaccatacaagcggaggtgtatgacacagttgttatcactctcaagaacatggcttctcatccggtaagtcttcacgcagtgggcgtgtcctactggaaagcttcagaaggagccgagtatgatgatcagacatcccagagggagaaagaagacgacaaggtatttccaggtgggtctcatacctatgtgtggcaagtgctcaaagagaatggccctatggcaagcgatccgctctgtttgacttacagctacctttcacacgttgacctcgtcaaggacctcaactccgggttgattggagccttgttggtatgcagggaaggatctcttgccaaagagaagacacagaccctccacaagtttatccttctctttgctgtgttcgatgagggcaaaagttggcatagcgaaacgaagaattccctcatgcaggatcgcgacgcagccagcgccagagcttggcccaagatgcacactgtgaacggatatgtcaataggtcacttcctggcttgattgggtgtcatcggaaaagtgtctactggcacgtgatcggaatggggacaacaccagaggtccactccatatttctcgaaggccataccttccttgttcgaaaccacagacaggcatccttggagatctctcccattacctttctcactgcccaaacgctccttatggacttgggtcagttccttctcttctgccatatcagctcacaccagcatgatggtatggaagcttatgtgaaagtcgacagttgtcctgaggagccacagttgcgcatgaagaataatgaagaagccgaggattacgacgacgatctcaccgattctgagatggacgtggtgaggtttgatgacgacaactctccctccttcattcaaatccggagcgtggcgaagaaacaccccaagacttgggtccactatatagcggcggaagaggaggattgggattacgctcctcttgtattggcaccagatgaccgctcatacaaaagccagtacctcaacaacggaccgcagagaattggccggaagtataagaaagtgcgatttatggcctatacagacgaaacctttaagacaagggaggccatccagcatgagagtgggattttgggacctcttctttacggcgaagttggtgataccctcctcatcatcttcaagaatcaagcttctcgcccctataacatttacccacacgggatcactgacgttaggcctttgtatagcagaagacttcccaaaggcgtgaagcatctcaaagacttccccattttgccaggcgagatctttaagtacaaatggaccgtcacagtggaagatggaccgactaaatcagaccctcgatgccttacgcggtactattcctccttcgtgaatatggagagagatttggcaagcggactcataggaccactcctcatctgttacaaggaatctgtagaccagaggggtaaccagattatgagtgataaacgcaatgtgatcctttttagcgtcttcgacgagaaccggtcctggtacttgaccgagaatatacaaaggttccttcccaaccccgcaggcgttcagttggaagaccctgagtttcaggccagcaatattatgcactcaatcaacggctatgtgtttgatagtctccagctttctgtttgcctccatgaagtagcctattggtacatcttgtcaattggtgctcaaacagacttcctctccgtcttcttctccggctacacctttaagcacaagatggtgtatgaggacactctcacactctttccattttctggagaaaccgtgttcatgagcatggagaatccaggcctttggatcttgggttgccacaacagtgattttcgcaatcggggaatgactgctctcctcaaagtcagcagctgtgataagaacacaggcgactattacgaagattcttacgaggacataagtgcctacttgttgtccaagaataacgccattgagcccagatcattctcccagaatcctcccgtgcttaaaaggcatcagcgcgaaatcaccagaactactcttcagtctgatcaagaggagattgactatgacgacaccataagcgtggaaatgaagaaggaggatttcgatatctatgacgaagatgagaaccagtctccgcggagctttcagaagaagacgcgacactacttcattgcagcagtcgaaaggctttgggactacggtatgtcatcatcccctcatgtgttgcgcaatagagctcagagtggaagtgttccacagttcaagaaagtcgtctttcaagagtttacagatggcagcttcacacagcctctctatcggggcgagcttaacgaacatttgggactccttggtccctatatccgagccgaagtggaggacaacattatggttacctttaggaatcaagcctctcgcccctacagcttctactcctccctcatcagttatgaggaggatcagagacaaggcgctgaaccacggaagaactttgtgaaaccgaatgagacgaagacctacttctggaaagtacagcaccacatggcccccacaaaagacgaattcgattgcaaagcatgggcgtatttttcagacgttgacttggagaaagatgtacattcaggacttattggtcctttgttggtgtgtcacactaacactctcaatccagcccatggcaggcaggtgacagtccaggaattcgctcttttctttaccatctttgatgagaccaagtcctggtacttcacggaaaacatggagcgcaattgcagagccccctgtaacatacagatggaggaccctacctttaaggaaaattatcggttccacgcaatcaacggatacattatggatacactccctggccttgtgatggctcaggaccaacgaatcaggtggtacctcctcagcatgggttctaatgagaacatacactccattcacttttcaggacatgtgttcactgtccggaagaaagaagagtataagatggccctctacaatttgtatccaggcgtgtttgagaccgttgaaatgcttccctctaaagctggcatctggagagtagagtgcttgatcggagaacatcttcacgcaggtatgagcaccttgttcctcgtgtacagcaacaaatgtcagaccccacttggcatggccagtggacacattcgcgactttcagatcacagcatctggccagtatggacaatgggccccaaagttggctcgcctccattactccggtagcataaatgcgtggtccactaaagaacctttcagctggattaaggtcgatcttcttgcccccatgatcatccacggcattaagacacagggagcgaggcagaaattctcctccctctacatctcacagttcattattatgtatagtttggacggcaagaagtggcaaacttatagaggtaacagtactggaacactcatggtgttcttcggcaacgttgatagctctggcatcaaacacaacatctttaatcctcccataatagctcggtacatcagattgcatccgacccactacagcattaggagtacactccgaatggagcttatgggttgcgacttgaattcctgttcaatgccactcggaatggagtctaaagccatctctgatgcacagataaccgccagtagctactttacgaacatgtttgctacgtggtcaccctctaaggcaaggcttcatttgcaaggccggtctaatgcctggagacctcaggtgaacaacccgaaagaatggctccaggtggactttcagaagaccatgaaagtaacaggtgtcactactcagggagttaagtccttggataccagcatgtatgtgaaggagttccttatttcctcatcacaagatggccaccagtggaccctcttctttcagaatggtaaggtcaaagtgtttcagggcaatcaagacagcttcacacccgtggtgaacagtcttgatcctccactcttgacacgataccttcgaatccatccacagtcttgggttcaccagattgcattgcgcatggaagtacttggatgcgaggctcaggacctctac

SEQ ID NO: 656 - protein, 1457 aa, synthetic construct
  REGION 1..1457: note = Variant of human B-domain deleted Factor VIII
MQIELSTCFFLCLLRFCFSATRRYYLGAVELSWDYMQSDLGELPVDARFPPRVPKSFPDNTSVVYKKTLFVEFTDHLFNIAKPRPPWMGLLGPTIQAEVYDTVVITLKNMASHPVSLHAVGVSYWKASEGAEYDDQTSQREKEDDKVFPGGSHTYVWQVLKENGPMASDPLCLTYSYLSHVDLVKDLNSGLIGALLVCREGSLAKEKTQTLHKFILLFAVFDEGKSWHSETKNSLMQDRDAASARAWPKMHTVNGYVNRSLPGLIGCHRKSVYWHVIGMGTTPEVHSIFLEGHTFLVRNHRQASLEISPITFLTAQTLLMDLGQFLLFCHISSHQHDGMEAYVKVDSCPEEPQLRMKNNEEAEDYDDDLTDSEMDVVRFDDDNSPSFIQIRSVAKKHPKTWVHYIAAEEEDWDYAPLVLAPDDRSYKSQYLNNGPQRIGRKYKKVRFMAYTDETFKTREAIQHESGILGPLLYGEVGDTLLIIFKNQASRPYNIYPHGITDVRPLYSRRLPKGVKHLKDFPILPGEIFKYKWTVTVEDGPTKSDPRCLTRYYSSFVNMERDLASGLIGPLLICYKESVDQRGNQIMSDKRNVILFSVFDENRSWYLTENIQRFLPNPAGVQLEDPEFQASNIMHSINGYVFDSLQLSVCLHEVAYWYILSIGAQTDFLSVFFSGYTFKHKMVYEDTLTLFPFSGETVFMSMENPGLWILGCHNSDFRNRGMTALLKVSSCDKNTGDYYEDSYEDISAYLLSKNNAIEPRSFSQNPPVLKRHQREITRTTLQSDQEEIDYDDTISVEMKKEDFDIYDEDENQSPRSFQKKTRHYFIAAVERLWDYGMSSSPHVLRNRAQSGSVPQFKKVVFQEFTDGSFTQPLYRGELNEHLGLLGPYIRAEVEDNIMVTFRNQASRPYSFYSSLISYEEDQRQGAEPRKNFVKPNETKTYFWKVQHHMAPTKDEFDCKAWAYFSDVDLEKDVHSGLIGPLLVCHTNTLNPAHGRQVTVQEFALFFTIFDETKSWYFTENMERNCRAPCNIQMEDPTFKENYRFHAINGYIMDTLPGLVMAQDQRIRWYLLSMGSNENIHSIHFSGHVFTVRKKEEYKMALYNLYPGVFETVEMLPSKAGIWRVECLIGEHLHAGMSTLFLVYSNKCQTPLGMASGHIRDFQITASGQYGQWAPKLARLHYSGSINAWSTKEPFSWIKVDLLAPMIIHGIKTQGARQKFSSLYISQFIIMYSLDGKKWQTYRGNSTGTLMVFFGNVDSSGIKHNIFNPPIIARYIRLHPTHYSIRSTLRMELMGCDLNSCSMPLGMESKAISDAQITASSYFTNMFATWSPSKARLHLQGRSNAWRPQVNNPKEWLQVDFQKTMKVTGVTTQGVKSLDTSMYVKEFLISSSQDGHQWTLFFQNGKVKVFQGNQDSFTPVVNSLDPPLLTRYLRIHPQSWVHQIALRMEVLGCEAQDLY

SEQ ID NO: 657 - DNA, 4371 bp, synthetic construct
  misc_feature 1..4371: note = Variant of human B-domain deleted Factor VIII
  source 1..4371: mol_type = other DNA
atgcagattgaactgtctacctgcttcttcctctgtttgctgaggttctgctttagcgccactagacggtactaccttggcgctgtggagctgtcctgggactatatgcagagtgatttgggagagcttcccgtcgacgcacgatttcctcctcgcgttccaaagtcatttccctttaacacaagcagtgtgtacaagaagacgctcttcgtcgaattcaccgatcacctgttcaatatcgccaaacccagaccaccatggatgggtcttttggggcctaccatacaagcggaggtgtatgacacagttgttatcactctcaagaacatggcttctcatccggtaagtcttcacgcagtgggcgtgtcctactggaaagcttcagaaggagccgagtatgatgatcagacatcccagagggagaaagaagacgacaaggtatttccaggtgggtctcatacctatgtgtggcaagtgctcaaagagaatggccctatggcaagcgatccgctctgtttgacttacagctacctttcacacgttgacctcgtcaaggacctcaactccgggttgattggagccttgttggtatgcagggaaggatctcttgccaaagagaagacacagaccctccacaagtttatccttctctttgctgtgttcgatgagggcaaaagttggcatagcgaaacgaagaattccctcatgcaggatcgcgacgcagccagcgccagagcttggcccaagatgcacactgtgaacggatatgtcaataggtcacttcctggcttgattgggtgtcatcggaaaagtgtctactggcacgtgatcggaatggggacaacaccagaggtccactccatatttctcgaaggccataccttccttgttcgaaaccacagacaggcatccttggagatctctcccattacctttctcactgcccaaacgctccttatggacttgggtcagttccttctcttctgccatatcagctcacaccagcatgatggtatggaagcttatgtggcggtcgacagttgtggggaggagccacagcgtcgcatgaagaataatgaagaagccgaggattacgacgacgatctcaccgattctgagatggacgtggtgaggtttgatgacgacaactctccctccttcattcaaatccggagcgtggcgaagaaacaccccaagacttgggtccactatatagcggcggaagaggaggattgggattacgctcctcttgtattggcaccagatgaccgctcatacaaaagccagtacctcaacaacggaccgcagagaattggccggaagtataagaaagtgcgatttatggcctatacagacgaaacctttaagacaagggaggccatccagcatgagagtgggattttgggacctcttctttacggcgaagttggtgataccctcctcatcatcttcaagaatcaagcttctcgcccctataacatttacccacacgggatcactgacgttaggcctttgtatagcagaagacttcccaaaggcgtgaagcatctcaaagacttccccattttgccaggcgagatctttaagtacaaatggaccgtcacagtggaagatggaccgactaaatcagaccctcgatgccttacgcggtactattcctccttcgtgaatatggagagagatttggcaagcggactcataggaccactcctcatctgttacaaggaatctgtagaccagaggggtaaccagattatgagtgataaacgcaatgtgatcctttttagcgtcttcgacgagaaccggtcctggtacttgaccgagaatatacaaaggttccttcccaaccccgcaggcgttcagttggaagaccctgagtttcaggccagcaatattatgcactcaatcaacggctatgtgtttgatagtctccagctttctgtttgcctccatgaagtagcctattggtacatcttgtcaattggtgctcaaacagacttcctctccgtcttcttctccggctacacctttaagcacaagatggtgtatgaggacactctcacactctttccattttctggagaaaccgtgttcatgagcatggagaatccaggcctgtggattttgggttgccacaacagtgattttcgcaatcggggaatgactgctctcctcaaagtcagcagctgtgataagaacacaggcgactattacgaagattcttacgaggacataagtgcctacttgttgtccaagaataacgccattgagcccagatcattctcccagaatcctcccgtgcttaaaaggcatcagcgcgaaatcaccagaactactcttcagtctgatcaagaggagattgactatgacgacaccataagcgtggaaatgaagaaggaggatttcgatatctatgacgaagatgagaaccagtctccgcggagctttcagaagaagacgcgacactacttcattgcagcagtcgaaaggctttgggactacggtatgtcatcatcccctcatgtgttgcgcaatagagctcagagtggaagtgttccacagttcaagaaagtcgtctttcaagagtttacagatggcagcttcacacagcctctctatcggggcgagcttaacgaacatttgggactccttggtccctatatccgagccgaagtggaggacaacattatggttacctttaggaatcaagcctctcgcccctacagcttctactcctccctcatcagttatgaggaggatcagagacaaggcgctgaaccacggaagaactttgtgaaaccgaatgagacgaagacctacttctggaaagtacagcaccacatggcccccacaaaagacgaattcgattgcaaagcatgggcgtatttttcagacgttgacttggagaaagatgtacattcaggacttattggtcctttgttggtgtgtcacactaacactctcaatccagcccatggcaggcaggtgacagtccaggaattcgctcttttctttaccatctttgatgagaccaagtcctggtacttcacggaaaacatggagcgcaattgcagagccccctgtaacatacagatggaggaccctacctttaaggaaaattatcggttccacgcaatcaacggatacattatggatacactccctggccttgtgatggctcaggaccaacgaatcaggtggtacctcctcagcatgggttctaatgagaacatacactccattcacttttcaggacatgtgttcactgtccggaagaaagaagagtataagatggccctctacaatttgtatccaggcgtgtttgagaccgttgaaatgcttccctctaaagctggcatctggagagtagagtgcttgatcggagaacatcttcacgcaggtatgagcaccttgttcctcgtgtacagcaacaaatgtcagaccccacttggcatggccagtggacacattcgcgactttcagatcacagcatctggccagtatggacaatgggccccaaagttggctcgcctccattactccggtagcataaatgcgtggtccactaaagaacctttcagctggattaaggtcgatcttcttgcccccatgatcatccacggcattaagacacagggagcgaggcagaaattctcctccctctacatctcacagttcattattatgtatagtttggacggcaagaagtggcaaacttatagaggtaacagtactggaacactcatggtgttcttcggcaacgttgatagctctggcatcaaacacaacatctttaatcctcccataatagctcggtacatcagattgcatccgacccactacagcattaggagtacactccgaatggagcttatgggttgcgacttgaattcctgttcaatgccactcggaatggagtctaaagccatctctgatgcacagataaccgccagtagctactttacgaacatgtttgctacgtggtcaccctctaaggcaaggcttcatttgcaaggccggtctaatgcctggagacctcaggtgaacaacccgaaagaatggctccaggtggactttcagaagaccatgaaagtaacaggtgtcactactcagggagttaagtccttggataccagcatgtatgtgaaggagttccttatttcctcatcacaagatggccaccagtggaccctcttctttcagaatggtaaggtcaaagtgtttcagggcaatcaagacagcttcacacccgtggtgaacagtcttgatcctccactcttgacacgataccttcgaatccatccacagtcttgggttcaccagattgcattgcgcatggaagtacttggatgcgaggctcaggacctctac

SEQ ID NO: 658 - protein, 1457 aa, synthetic construct
  REGION 1..1457: note = Variant of human B-domain deleted Factor VIII
MQIELSTCFFLCLLRFCFSATRRYYLGAVELSWDYMQSDLGELPVDARFPPRVPKSFPFNTSSVYKKTLFVEFTDHLFNIAKPRPPWMGLLGPTIQAEVYDTVVITLKNMASHPVSLHAVGVSYWKASEGAEYDDQTSQREKEDDKVFPGGSHTYVWQVLKENGPMASDPLCLTYSYLSHVDLVKDLNSGLIGALLVCREGSLAKEKTQTLHKFILLFAVFDEGKSWHSETKNSLMQDRDAASARAWPKMHTVNGYVNRSLPGLIGCHRKSVYWHVIGMGTTPEVHSIFLEGHTFLVRNHRQASLEISPITFLTAQTLLMDLGQFLLFCHISSHQHDGMEAYVAVDSCGEEPQRRMKNNEEAEDYDDDLTDSEMDVVRFDDDNSPSFIQIRSVAKKHPKTWVHYIAAEEEDWDYAPLVLAPDDRSYKSQYLNNGPQRIGRKYKKVRFMAYTDETFKTREAIQHESGILGPLLYGEVGDTLLIIFKNQASRPYNIYPHGITDVRPLYSRRLPKGVKHLKDFPILPGEIFKYKWTVTVEDGPTKSDPRCLTRYYSSFVNMERDLASGLIGPLLICYKESVDQRGNQIMSDKRNVILFSVFDENRSWYLTENIQRFLPNPAGVQLEDPEFQASNIMHSINGYVFDSLQLSVCLHEVAYWYILSIGAQTDFLSVFFSGYTFKHKMVYEDTLTLFPFSGETVFMSMENPGLWILGCHNSDFRNRGMTALLKVSSCDKNTGDYYEDSYEDISAYLLSKNNAIEPRSFSQNPPVLKRHQREITRTTLQSDQEEIDYDDTISVEMKKEDFDIYDEDENQSPRSFQKKTRHYFIAAVERLWDYGMSSSPHVLRNRAQSGSVPQFKKVVFQEFTDGSFTQPLYRGELNEHLGLLGPYIRAEVEDNIMVTFRNQASRPYSFYSSLISYEEDQRQGAEPRKNFVKPNETKTYFWKVQHHMAPTKDEFDCKAWAYFSDVDLEKDVHSGLIGPLLVCHTNTLNPAHGRQVTVQEFALFFTIFDETKSWYFTENMERNCRAPCNIQMEDPTFKENYRFHAINGYIMDTLPGLVMAQDQRIRWYLLSMGSNENIHSIHFSGHVFTVRKKEEYKMALYNLYPGVFETVEMLPSKAGIWRVECLIGEHLHAGMSTLFLVYSNKCQTPLGMASGHIRDFQITASGQYGQWAPKLARLHYSGSINAWSTKEPFSWIKVDLLAPMIIHGIKTQGARQKFSSLYISQFIIMYSLDGKKWQTYRGNSTGTLMVFFGNVDSSGIKHNIFNPPIIARYIRLHPTHYSIRSTLRMELMGCDLNSCSMPLGMESKAISDAQITASSYFTNMFATWSPSKARLHLQGRSNAWRPQVNNPKEWLQVDFQKTMKVTGVTTQGVKSLDTSMYVKEFLISSSQDGHQWTLFFQNGKVKVFQGNQDSFTPVVNSLDPPLLTRYLRIHPQSWVHQIALRMEVLGCEAQDLY

SEQ ID NO: 659 - DNA, 4371 bp, synthetic construct
  misc_feature 1..4371: note = Variant of human B-domain deleted Factor VIII
  source 1..4371: mol_type = other DNA
atgcagattgaactgtctacctgcttcttcctctgtttgctgaggttctgctttagcgccactagacggtactaccttggcgctgtggagctgtcctgggactatatgcagagtgatttgggagagcttcccgtcgacgcacgatttcctcctcgcgttccaaagtcatttccctttaacacaagcgttgtgtacaagaagacgctcttcgtcgaattcaccgatcacctgttcaatatcgccaaacccagaccaccatggatgggtcttttggggcctaccatacaagcggaggtgtatgacacagttgttatcactctcaagaacatggcttctcatccggtaagtcttcacgcagtgggcgtgtcctactggaaagcttcagaaggagccgagtatgatgatcagacatcccagagggagaaagaagacgacaaggtatttccaggtgggtctcatacctatgtgtggcaagtgctcaaagagaatggccctatggcaagcgatccgctctgtttgacttacagctacctttcacacgttgacctcgtcaaggacctcaactccgggttgattggagccttgttggtatgcagggaaggatctcttgccaaagagaagacacagaccctccacaagtttatccttctctttgctgtgttcgatgagggcaaaagttggcatagcgaaacgaagaattccctcatgcaggatcgcgacgcagccagcgccagagcttggcccaagatgcacactgtgaacggatatgtcaataggtcacttcctggcttgattgggtgtcatcggaaaagtgtctactggcacgtgatcggaatggggacaacaccagaggtccactccatatttctcgaaggccataccttccttgttcgaaaccacagacaggcatccttggagatctctcccattacctttctcactgcccaaacgctccttatggacttgggtcagttccttctcttctgccatatcagctcacaccagcatgatggtatggaagcttatgtgaaagtcgacagttgtcctgaggagccacagttgcgcatgaagaataatgaagaagccgaggattacgacgacgatctcaccgattctgagatggacgtggtgaggtttgatgacgacaactctccctccttcattcaaatccggagcgtggcgaagaaacaccccaagacttgggtccactatatagcggcggaagaggaggattgggattacgctcctcttgtattggcaccagatgaccgctcatacaaaagccagtacctcaacaacggaccgcagagaattggccggaagtataagaaagtgcgatttatggcctatacagacgaaacctttaagacaagggaggccatccagcatgagagtgggattttgggacctcttctttacggcgaagttggtgataccctcctcatcatcttcaagaatcaagcttctcgcccctataacatttacccacacgggatcactgacgttcgccctttgtatagcagaagacttcccaaaggcgtgaagcatctcaaagacttccccattttgccaggcgagatctttaagtacaaatggaccgtcacagtggaagatggaccgactaaatcagaccctcgatgccttacgcggtactattcctccttcgtgaatatggagagagatttggcaagcggactcataggaccactcctcatctgttacaaggaatctgtagaccagaggggtaaccagattatgagtgataaacgcaatgtgatcctttttagcgtcttcgacgagaaccggtcctggtacttgaccgagaatatacaaaggttccttcccaaccccgcaggcgttcagttggaagaccctgagtttcaggccagcaatattatgcactcaatcaacggctatgtgtttgatagtctccagctttctgtttgcctccatgaagtagcctattggtacatcttgtcaattggtgctcaaacagacttcctctccgtcttcttctccggctacacctttaagcacaagatggtgtatgaggacactctcacactctttccattttctggagaaaccgtgttcatgagcatggagaatccaggcatgtggattttgggttgccacaacagtgattttcgcaatcggggaatgactgctctcctcaaagtcagcagctgtgataagaacacaggcgactattacgaagattcttacgaggacataagtgcctacttgttgtccaagaataacgccattgagcccagatcattctcccagaatcctcccgtgcttaaaaggcatcagcgcgaaatcaccagaactactcttcagtctgatcaagaggagattgactatgacgacaccataagcgtggaaatgaagaaggaggatttcgatatctatgacgaagatgagaaccagtctccgcggagctttcagaagaagacgcgacactacttcattgcagcagtcgaaaggctttgggactacggtatgtcatcatcccctcatgtgttgcgcaatagagctcagagtggaagtgttccacagttcaagaaagtcgtctttcaagagtttacagatggcagcttcacacagcctctctatcggggcgagcttaacgaacatttgggactccttggtccctatatccgagccgaagtggaggacaacattatggttacctttaggaatcaagcctctcgcccctacagcttctactcctccctcatcagttatgaggaggatcagagacaaggcgctgaaccacggaagaactttgtgaaaccgaatgagacgaagacctacttctggaaagtacagcaccacatggcccccacaaaagacgaattcgattgcaaagcatgggcgtatttttcagacgttgacttggagaaagatgtacattcaggacttattggtcctttgttggtgtgtcacactaacactctcaatccagcccatggcaggcaggtgacagtccaggaattcgctcttttctttaccatctttgatgagaccaagtcctggtacttcacggaaaacatggagcgcaattgcagagccccctgtaacatacagatggaggaccctacctttaaggaaaattatcggttccacgcaatcaacggatacattatggatacactccctggccttgtgatggctcaggaccaacgaatcaggtggtacctcctcagcatgggttctaatgagaacatacactccattcacttttcaggacatgtgttcactgtccggaagaaagaagagtataagatggccctctacaatttgtatccaggcgtgtttgagaccgttgaaatgcttccctctaaagctggcatctggagagtagagtgcttgatcggagaacatcttcacgcaggtatgagcaccttgttcctcgtgtacagcaacaaatgtcagaccccacttggcatggccagtggacacattcgcgactttcagatcacagcatctggccagtatggacaatgggccccaaagttggctcgcctccattactccggtagcataaatgcgtggtccactaaagaacctttcagctggattaaggtcgatcttcttgcccccatgatcatccacggcattaagacacagggagcgaggcagaaattctcctccctctacatctcacagttcattattatgtatagtttggacggcaagaagtggcaaacttatagaggtaacagtactggaacactgatggttttcttcggcaacgttgatagctctggcatcaaacacaacatctttaatcctcccataatagctcggtacatcagattgcatccgacccactacagcattaggagtacactccgaatggagcttatgggttgcgacttgaattcctgttcaatgccactcggaatggagtctaaagccatctctgatgcacagataaccgccagtagctactttacgaacatgtttgctacgtggtcaccctctaaggcaaggcttcatttgcaaggccggtctaatgcctggagacctcaggtgaacaacccgaaagaatggctccaggtggactttcagaagaccatgaaagtaacaggtgtcactactcagggagttaagtccttggataccagcatgtatgtgaaggagttccttatttcctcatcacaagatggccaccagtggaccctcttctttcagaatggtaaggtcaaagtgtttcagggcaatcaagacagcttcacacccgtggtgaacagtcttgatcctccactcttgacacgataccttcgaatccatccacagtcttgggttcaccagattgcattgcgcatggaagtacttggatgcgaggctcaggacctctac

SEQ ID NO: 660 - protein, 1457 aa, synthetic construct
  REGION 1..1457: note = Variant of human B-domain deleted Factor VIII
MQIELSTCFFLCLLRFCFSATRRYYLGAVELSWDYMQSDLGELPVDARFPPRVPKSFPFNTSVVYKKTLFVEFTDHLFNIAKPRPPWMGLLGPTIQAEVYDTVVITLKNMASHPVSLHAVGVSYWKASEGAEYDDQTSQREKEDDKVFPGGSHTYVWQVLKENGPMASDPLCLTYSYLSHVDLVKDLNSGLIGALLVCREGSLAKEKTQTLHKFILLFAVFDEGKSWHSETKNSLMQDRDAASARAWPKMHTVNGYVNRSLPGLIGCHRKSVYWHVIGMGTTPEVHSIFLEGHTFLVRNHRQASLEISPITFLTAQTLLMDLGQFLLFCHISSHQHDGMEAYVKVDSCPEEPQLRMKNNEEAEDYDDDLTDSEMDVVRFDDDNSPSFIQIRSVAKKHPKTWVHYIAAEEEDWDYAPLVLAPDDRSYKSQYLNNGPQRIGRKYKKVRFMAYTDETFKTREAIQHESGILGPLLYGEVGDTLLIIFKNQASRPYNIYPHGITDVRPLYSRRLPKGVKHLKDFPILPGEIFKYKWTVTVEDGPTKSDPRCLTRYYSSFVNMERDLASGLIGPLLICYKESVDQRGNQIMSDKRNVILFSVFDENRSWYLTENIQRFLPNPAGVQLEDPEFQASNIMHSINGYVFDSLQLSVCLHEVAYWYILSIGAQTDFLSVFFSGYTFKHKMVYEDTLTLFPFSGETVFMSMENPGMWILGCHNSDFRNRGMTALLKVSSCDKNTGDYYEDSYEDISAYLLSKNNAIEPRSFSQNPPVLKRHQREITRTTLQSDQEEIDYDDTISVEMKKEDFDIYDEDENQSPRSFQKKTRHYFIAAVERLWDYGMSSSPHVLRNRAQSGSVPQFKKVVFQEFTDGSFTQPLYRGELNEHLGLLGPYIRAEVEDNIMVTFRNQASRPYSFYSSLISYEEDQRQGAEPRKNFVKPNETKTYFWKVQHHMAPTKDEFDCKAWAYFSDVDLEKDVHSGLIGPLLVCHTNTLNPAHGRQVTVQEFALFFTIFDETKSWYFTENMERNCRAPCNIQMEDPTFKENYRFHAINGYIMDTLPGLVMAQDQRIRWYLLSMGSNENIHSIHFSGHVFTVRKKEEYKMALYNLYPGVFETVEMLPSKAGIWRVECLIGEHLHAGMSTLFLVYSNKCQTPLGMASGHIRDFQITASGQYGQWAPKLARLHYSGSINAWSTKEPFSWIKVDLLAPMIIHGIKTQGARQKFSSLYISQFIIMYSLDGKKWQTYRGNSTGTLMVFFGNVDSSGIKHNIFNPPIIARYIRLHPTHYSIRSTLRMELMGCDLNSCSMPLGMESKAISDAQITASSYFTNMFATWSPSKARLHLQGRSNAWRPQVNNPKEWLQVDFQKTMKVTGVTTQGVKSLDTSMYVKEFLISSSQDGHQWTLFFQNGKVKVFQGNQDSFTPVVNSLDPPLLTRYLRIHPQSWVHQIALRMEVLGCEAQDLY

SEQ ID NO: 661 - DNA, 4371 bp, synthetic construct
  misc_feature 1..4371: note = Variant of human B-domain deleted Factor VIII
  source 1..4371: mol_type = other DNA
atgcagattgaactgtctacctgcttcttcctctgtttgctgaggttctgctttagcgccactagacggtactaccttggcgctgtggagctgtcctgggactatatgcagagtgatttgggagagcttcccgtcgacgcacgatttcctcctcgcgttccaaagtcatttcccgataacacaagcgttgtgtacaagaagacgctcttcgtcgaattcaccgatcacctgttcaatatcgccaaacccagaccaccatggatgggtcttttggggcctaccatacaagcggaggtgtatgacacagttgttatcactctcaagaacatggcttctcatccggtaagtcttcacgcagtgggcgtgtcctactggaaagcttcagaaggagccgagtatgatgatcagacatcccagagggagaaagaagacgacaaggtatttccaggtgggtctcatacctatgtgtggcaagtgctcaaagagaatggccctatggcaagcgatccgctctgtttgacttacagctacctttcacacgttgacctcgtcaaggacctcaactccgggttgattggagccttgttggtatgcagggaaggatctcttgccaaagagaagacacagaccctccacaagtttatccttctctttgctgtgttcgatgagggcaaaagttggcatagcgaaacgaagaattccctcatgcaggatcgcgacgcagccagcgccagagcttggcccaagatgcacactgtgaacggatatgtcaataggtcacttcctggcttgattgggtgtcatcggaaaagtgtctactggcacgtgatcggaatggggacaacaccagaggtccactccatatttctcgaaggccataccttccttgttcgaaaccacagacaggcatccttggggatctctcccattacctttctcactgcccaaacgctccttatggacttgggtcagttccttctcttctgccatatcagctcacaccagcatgatggtatggaagcttatgtgaaggtcgacagttgtccagaggagccacagctgcgcatgaagaataatgaagaagccgaggattacgacgacgatctcaccgattctgagatggacgtggtgaggtttgatgacgacaactctccctccttcattcaaatccggagcgtggcgaagaaacaccccaagacttgggtccactatatagcggcggaagaggaggattgggattacgctcctcttgtattggcaccagatgaccgctcatacaaaagccagtacctcaacaacggaccgcagagaattggccggaagtataagaaagtgcgatttatggcctatacagacgaaacctttaagacaagggaggccatccagcatgagagtgggattttgggacctcttctttacggcgaagttggtgataccctcctcatcatcttcaagaatcaagcttctcgcccctataacatttacccacacgggatcactgacgttaggcctttgtatagcagaagacttcccaaaggcgtgaagcatctcaaagacttccccattttgccaggcgagatctttaagtacaaatggaccgtcacagtggaagatggaccgactaaatcagaccctcgatgccttacgcggtactattcctccttcgtgaatatggagagagatttggcaagcggactcataggaccactcctcatctgttacaaggaatctgtagaccagaggggtaaccagattatgagtgataaacgcaatgtgatcctttttagcgtcttcgacgagaaccggtcctggtacttgaccgagaatatacaaaggttccttcccaaccccgcaggcgttcagttggaagaccctgagtttcaggccagcaatattatgcactcaataaacggctatgtgtttgatagtctccagctttctgtttgcctccatgaagtagcctattggtacatcttgtcaattggtgctcaaacagacttcctctccgtcttcttctccggctacacctttaagcacaagatggtgtatgaggacactctcacactctttccattttctggagaaaccgtgttcatgagcatggagaatccaggcctttggatcttgggttgccacaacagtgattttcgcaatcggggaatgactgctctcctcaaagtcagcagctgtgataagaacacaggcgactattacgaagattcttacgaggacataagtgcctacttgttgtccaagaataacgccattgagcccagatcattctcccagaatcctcccgtgcttaaatggcatcagcgcgaaatcaccagaactactcttcagtctgatcaagaggagattgactatgacgacaccataagcgtggaaatgaagaaggaggatttcgatatctatgacgaagatgagaaccagtctccgcggagctttcagaagaagacgcgacactacttcattgcagcagtcgaaaggctttgggactacggtatgtcatcatcccctcatgtgttgcgcaatagagctcagagtggaagtgttccacagttcaagaaagtcgtctttcaagagtttacagatggcagcttcacacagcctctctatcggggcgagcttaacgaacatttgggactccttggtccctatatccgagccgaagtggaggacaacattatggttacctttaggaatcaagcctctcgcccctacagcttctactcctccctcatcagttatgaggaggatcagagacaaggcgctgaaccacggaagaactttgtgaaaccgaatgagacgaagacctacttctggaaagtacagcaccacatggcccccacaaaagacgaattcgattgcaaagcatgggcgtatttttcagacgttgacttggagaaagatgtacattcaggacttattggtcctttgttggtgtgtcacactaacactctcaatccagcccatggcaggcaggtgacagtccaggaattcgctcttttctttaccatctttgatgagaccaagtcctggtacttcacggaaaacatggagcgcaattgcagagccccctgtaacatacagatggaggaccctacctttaaggaaaattatcggttccacgcaatcaacggatacattatggatacactccctggccttgtgatggctcaggaccaacgaatcaggtggtacctcctcagcatgggttctaatgagaacatacactccattcacttttcaggacatgtgttcactgtccggaagaaagaagagtataagatggccctctacaatttgtatccaggcgtgtttgagaccgttgaaatgcttccctctaaagctggcatctggagagtagagtgcttgatcggagaacatcttcacgcaggtatgagcaccttgttcctcgtgtacagcaacaaatgtcagaccccacttggcatggccagtggacacattcgcgactttcagatcacagcatctggccagtatggacaatgggccccaaagttggctcgcctccattactccggtagcataaatgcgtggtccactaaagaacctttcagctggattaaggtcgatcttcttgcccccatgatcatccacggcattaagacacagggagcgaggcagaaattctcctccctctacatctcacagttcattattatgtatagtttggacggcaagaagtggcaaacttatagaggtaacagtactggaacactcatggtgttcttcggcaacgttgatagctctggcatcaaacacaacatctttaatcctcccataatagctcggtacatcagattgcatccgacccactacagcattaggagtacactccgaatggagcttatgggttgcgacttgaattcctgttcaatgccactcggaatggagtctaaagccatctctgatgcacagataaccgccagtagctactttacgaacatgtttgctacgtggtcaccctctaaggcaaggcttcatttgcaaggccggtctaatgcctggagacctcaggtgaacaacccgaaagaatggctccaggtggactttcagaagaccatgaaagtaacaggtgtcactactcagggagttaagtccttggataccagcatgtatgtgaaggagttccttatttcctcatcacaagatggccaccagtggaccctcttctttcagaatggtaaggtcaaagtgtttcagggcaatcaagacagcttcacacccgtggtgaacagtcttgatcctccactcttgacacgataccttcgaatccatccacagtcttgggttcaccagattgcattgcgcatggaagtacttggatgcgaggctcaggacctctac

SEQ ID NO: 662 - protein, 1457 aa, synthetic construct
  REGION 1..1457: note = Variant of human B-domain deleted Factor VIII
MQIELSTCFFLCLLRFCFSATRRYYLGAVELSWDYMQSDLGELPVDARFPPRVPKSFPDNTSVVYKKTLFVEFTDHLFNIAKPRPPWMGLLGPTIQAEVYDTVVITLKNMASHPVSLHAVGVSYWKASEGAEYDDQTSQREKEDDKVFPGGSHTYVWQVLKENGPMASDPLCLTYSYLSHVDLVKDLNSGLIGALLVCREGSLAKEKTQTLHKFILLFAVFDEGKSWHSETKNSLMQDRDAASARAWPKMHTVNGYVNRSLPGLIGCHRKSVYWHVIGMGTTPEVHSIFLEGHTFLVRNHRQASLGISPITFLTAQTLLMDLGQFLLFCHISSHQHDGMEAYVKVDSCPEEPQLRMKNNEEAEDYDDDLTDSEMDVVRFDDDNSPSFIQIRSVAKKHPKTWVHYIAAEEEDWDYAPLVLAPDDRSYKSQYLNNGPQRIGRKYKKVRFMAYTDETFKTREAIQHESGILGPLLYGEVGDTLLIIFKNQASRPYNIYPHGITDVRPLYSRRLPKGVKHLKDFPILPGEIFKYKWTVTVEDGPTKSDPRCLTRYYSSFVNMERDLASGLIGPLLICYKESVDQRGNQIMSDKRNVILFSVFDENRSWYLTENIQRFLPNPAGVQLEDPEFQASNIMHSINGYVFDSLQLSVCLHEVAYWYILSIGAQTDFLSVFFSGYTFKHKMVYEDTLTLFPFSGETVFMSMENPGLWILGCHNSDFRNRGMTALLKVSSCDKNTGDYYEDSYEDISAYLLSKNNAIEPRSFSQNPPVLKWHQREITRTTLQSDQEEIDYDDTISVEMKKEDFDIYDEDENQSPRSFQKKTRHYFIAAVERLWDYGMSSSPHVLRNRAQSGSVPQFKKVVFQEFTDGSFTQPLYRGELNEHLGLLGPYIRAEVEDNIMVTFRNQASRPYSFYSSLISYEEDQRQGAEPRKNFVKPNETKTYFWKVQHHMAPTKDEFDCKAWAYFSDVDLEKDVHSGLIGPLLVCHTNTLNPAHGRQVTVQEFALFFTIFDETKSWYFTENMERNCRAPCNIQMEDPTFKENYRFHAINGYIMDTLPGLVMAQDQRIRWYLLSMGSNENIHSIHFSGHVFTVRKKEEYKMALYNLYPGVFETVEMLPSKAGIWRVECLIGEHLHAGMSTLFLVYSNKCQTPLGMASGHIRDFQITASGQYGQWAPKLARLHYSGSINAWSTKEPFSWIKVDLLAPMIIHGIKTQGARQKFSSLYISQFIIMYSLDGKKWQTYRGNSTGTLMVFFGNVDSSGIKHNIFNPPIIARYIRLHPTHYSIRSTLRMELMGCDLNSCSMPLGMESKAISDAQITASSYFTNMFATWSPSKARLHLQGRSNAWRPQVNNPKEWLQVDFQKTMKVTGVTTQGVKSLDTSMYVKEFLISSSQDGHQWTLFFQNGKVKVFQGNQDSFTPVVNSLDPPLLTRYLRIHPQSWVHQIALRMEVLGCEAQDLY

SEQ ID NO: 663 - DNA, 4371 bp, synthetic construct
  misc_feature 1..4371: note = Variant of human B-domain deleted Factor VIII
  source 1..4371: mol_type = other DNA
atgcagattgaactgtctacctgcttcttcctctgtttgctgaggttctgctttagcgccactagacggtactaccttggcgctgtggagctgtcctgggactatatgcagagtgatttgggagagcttcccgtcgacgcacgatttcctcctcgcgttccaaagtcatttccctttaacacaagcggtgtgtacaagaagacgctcttcgtcgaattcaccgatcacctgttcaatatcgccaaacccagaccaccatggatgggtcttttggggcctaccatacaagcggaggtgtatgacacagttgttatcactctcaagaacatggcttctcatccggtaagtcttcacgcagtgggcgtgtcctactggaaagcttcagaaggagccgagtatgatgatcagacatcccagagggagaaagaagacgacaaggtatttccaggtgggtctcatacctatgtgtggcaagtgctcaaagagaatggccctatggcaagcgatccgctctgtttgacttacagctacctttcacatgttgacctcgtcaaggacctcaactccgggttgattggagccttgttggtatgcagggaaggatctcttgccaaagagaagacacagaccctccacaagtttatccttctctttgctgtgttcgatgagggcaaaagttggcatagcgaaacgaagaattccctcatgcaggatcgcgacgcagccagcgccagagcttggcccaagatgcacactgtgaacggatatgtcaataggtcacttcctggcttgattgggtgtcatcggaaaagtgtctactggcacgtgatcggaatggggacaacaccagaggtccactccatatttctcgaaggccataccttccttgttcgaaaccacagacaggcatccttggagatctctcccattacctttctcactgcccaaacgctccttatggacttgggtcagttccttctcttctgccatatcagctcacaccagcatgatggtatggaagcttatgtgaaggtcgacaattgtccagaggagccacagcgtcgcatgaagaataatgaagaagccgaggattacgacgacgatctcaccgattctgagatggacgtggtgaggtttgatgacgacaactctccctccttcattcaaatccggagcgtggcgaagaaacaccccaagacttgggtccactatatagcggcggaagaggaggattgggattacgctcctcttgtattggcaccagatgaccgctcatacaaaagccagtacctcaacaacggaccgcagagaattggccggaagtataagaaagtgcgatttatggcctatacagacgaaacctttaagacaagggaggccatccagcatgagagtgggattttgggacctcttctttacggcgaagttggtgataccctcctcatcatcttcaagaatcaagcttctcgcccctataacatttacccacacgggatcactgacgttaggcctttgtatagcagaagacttcccaaaggcgtgaagcatctcaaagacttccccattttgccaggcgagatctttaagtacaaatggaccgtcacagtggaagatggaccgactaaatcagaccctcgatgccttacgcggtactattcctccttcgtgaatatggagagagatttggcaagcggactcataggaccactcctcatctgttacaaggaatctgtagaccagaggggtaaccagattatgagtgataaacgcaatgtgatcctttttagcgtcttcgacgagaaccggtcctggtacttgaccgagaatatacaaaggttccttcccaaccccgcaggcgttcagttggaagaccctgagtttcaggccagcaatattatgcactcaatcaacggctatgtgtttgatagtctccagctttctgtttgcctccatgaagtagcctattggtacatcttgtcaattggtgctcaaacagacttcctctccgtcttcttctccggctacacctttaagcacaagatggtgtatgaggacactctcacactctttccattttctggagaaaccgtgttcatgagcatggagaatccaggcctttggatcttgggttgccacaacagtgattttcgcaatcggggaatgactgctctcctcaaagtcagcagctgtgataagaacacaggcgactattacgaagattcttacgaggacataagtgcctacttgttgtccaagaataacgccattgagcccagatcattctcccagaatcctcccgtgcttaaaaggcatcagcgcgaaatcaccagaactactcttcagtctgatcaagaggagattgactatgacgacaccataagcgtggaaatgaagaaggaggatttcgatatctatgacgaagatgagaaccagtctccgcggagctttcagaagaagacgcgacactacttcattgcagcagtcgaaaggctttgggactacggtatgtcatcatcccctcatgtgttgcgcaatagagctcagagtggaagtgttccacagttcaagaaagtcgtctttcaagagtttacagatggcagcttcacacagcctctctatcggggcgagcttaacgaacatttgggactccttggtccctatatccgagccgaagtggaggacaacattatggttacctttaggaatcaagcctctcgcccctacagcttctactcctccctcatcagttatgaggaggatcagagacaaggcgctgaaccacggaagaactttgtgaaaccgaatgagacgaagacctacttctggaaagtacagcaccacatggcccccacaaaagacgaattcgattgcaaagcatgggcgtatttttcagacgttgacttggagaaagatgtacattcaggacttattggtcctttgttggtgtgtcacactaacactctcaatccagcccatggcaggcaggtgacagtccaggaattcgctcttttctttaccatctttgatgagaccaagtcctggtacttcacggaaaacatggagcgcaattgcagagccccctgtaacatacagatggaggaccctacctttaaggaaaattatcggttccacgcaatcaacggatacattatggatacactccctggccttgtgatggctcaggaccaacgaatcaggtggtacctcctcagcatgggttctaatgagaacatacactccattcacttttcaggacatgtgttcactgtccggaagaaagaagagtataagatggccctctacaatttgtatccaggcgtgtttgagaccgttgaaatgcttccctctaaagctggcatctggagagtagagtgcttgatcggagaacatcttcacgcaggtatgagcaccttgttcctcgtgtacagcaacaaatgtcagaccccacttggcatggccagtggacacattcgcgactttcagatcacagcatctggccagtatggacaatgggccccaaagttggctcgcctccattactccggtagcataaatgcgtggtccactaaagaacctttcagctggattaaggtcgatcttcttgcccccatgatcatccacggcattaagacacagggagcgaggcagaaattctcctccctctacatctcacagttcattattatgtatagtttggacggcaagaagtggcaaacttatagaggtaacagtactggaacacgcatggttttcttcggcaacgttgatagctctggcatcaaacacaacatctttaatcctcccataatagctcggtacatcagattgcatccgacccactacagcattaggagtacactccgaatggagcttatgggttgcgacttgaattcctgttcaatgccactcggaatggagtctaaagccatctctgatgcacagataaccgccagtagctactttacgaacatgtttgctacgtggtcaccctctaaggcaaggcttcatttgcaaggccggtctaatgcctggagacctcaggtgaacaacccgaaagaatggctccaggtggactttcagaagaccatgaaagtaacaggtgtcactactcagggagttaagtccttggataccagcatgtatgtgaaggagttccttatttcctcatcacaagatggccaccagtggaccctcttctttcagaatggtaaggtcaaagtgtttcagggcaatcaagacagcttcacacccgtggtgaacagtcttgatcctccactcttgacacgataccttcgaatccatccacagtcttgggttcaccagattgcattgcgcatggaagtacttggatgcgaggctcaggacctctac

SEQ ID NO: 664 - protein, 1457 aa, synthetic construct
  REGION 1..1457: note = Variant of human B-domain deleted Factor VIII
MQIELSTCFFLCLLRFCFSATRRYYLGAVELSWDYMQSDLGELPVDARFPPRVPKSFPFNTSGVYKKTLFVEFTDHLFNIAKPRPPWMGLLGPTIQAEVYDTVVITLKNMASHPVSLHAVGVSYWKASEGAEYDDQTSQREKEDDKVFPGGSHTYVWQVLKENGPMASDPLCLTYSYLSHVDLVKDLNSGLIGALLVCREGSLAKEKTQTLHKFILLFAVFDEGKSWHSETKNSLMQDRDAASARAWPKMHTVNGYVNRSLPGLIGCHRKSVYWHVIGMGTTPEVHSIFLEGHTFLVRNHRQASLEISPITFLTAQTLLMDLGQFLLFCHISSHQHDGMEAYVKVDNCPEEPQRRMKNNEEAEDYDDDLTDSEMDVVRFDDDNSPSFIQIRSVAKKHPKTWVHYIAAEEEDWDYAPLVLAPDDRSYKSQYLNNGPQRIGRKYKKVRFMAYTDETFKTREAIQHESGILGPLLYGEVGDTLLIIFKNQASRPYNIYPHGITDVRPLYSRRLPKGVKHLKDFPILPGEIFKYKWTVTVEDGPTKSDPRCLTRYYSSFVNMERDLASGLIGPLLICYKESVDQRGNQIMSDKRNVILFSVFDENRSWYLTENIQRFLPNPAGVQLEDPEFQASNIMHSINGYVFDSLQLSVCLHEVAYWYILSIGAQTDFLSVFFSGYTFKHKMVYEDTLTLFPFSGETVFMSMENPGLWILGCHNSDFRNRGMTALLKVSSCDKNTGDYYEDSYEDISAYLLSKNNAIEPRSFSQNPPVLKRHQREITRTTLQSDQEEIDYDDTISVEMKKEDFDIYDEDENQSPRSFQKKTRHYFIAAVERLWDYGMSSSPHVLRNRAQSGSVPQFKKVVFQEFTDGSFTQPLYRGELNEHLGLLGPYIRAEVEDNIMVTFRNQASRPYSFYSSLISYEEDQRQGAEPRKNFVKPNETKTYFWKVQHHMAPTKDEFDCKAWAYFSDVDLEKDVHSGLIGPLLVCHTNTLNPAHGRQVTVQEFALFFTIFDETKSWYFTENMERNCRAPCNIQMEDPTFKENYRFHAINGYIMDTLPGLVMAQDQRIRWYLLSMGSNENIHSIHFSGHVFTVRKKEEYKMALYNLYPGVFETVEMLPSKAGIWRVECLIGEHLHAGMSTLFLVYSNKCQTPLGMASGHIRDFQITASGQYGQWAPKLARLHYSGSINAWSTKEPFSWIKVDLLAPMIIHGIKTQGARQKFSSLYISQFIIMYSLDGKKWQTYRGNSTGTRMVFFGNVDSSGIKHNIFNPPIIARYIRLHPTHYSIRSTLRMELMGCDLNSCSMPLGMESKAISDAQITASSYFTNMFATWSPSKARLHLQGRSNAWRPQVNNPKEWLQVDFQKTMKVTGVTTQGVKSLDTSMYVKEFLISSSQDGHQWTLFFQNGKVKVFQGNQDSFTPVVNSLDPPLLTRYLRIHPQSWVHQIALRMEVLGCEAQDLY

SEQ ID NO: 665 - DNA, 4371 bp, synthetic construct
  misc_feature 1..4371: note = Variant of human B-domain deleted Factor VIII
  source 1..4371: mol_type = other DNA
atgcagattgaactgtctacctgcttcttcctctgtttgctgaggttctgctttagcgccactagacggtactaccttggcgctgtggagctgtcctgggactatatgcagagtgatttgggagagcttcccgtcgacgcacgatttcctcctcgcgttccaaagtcatttccctttaacacaagcgttgtgtacaagaagacgctcttcgtcgaattcaccgatcacctgttcaatatcgccaaacccagaccaccatggatgggtcttttggggcctaccatacaagcggaggtgtatgacacagttgttatcactctcaagaacatggcttctcatccggtaagtcttcacgcagtgggcgtgtcctactggaaagcttcagaaggagccgagtatgatgatcagacatcccagagggagaaagaagacgacaaggtatttccaggtgggtctcatacctatgtgtggcaagtgctcaaagagaatggccctatggcaagcgatccgctctgtttgacttacagctacctttcacacgttgacctcgtcaaggacctcaactccgggttgattggagccttgttggtatgcagggaaggatctcttgccaaagagaagacacagaccctccacaagtttatccttctctttgctgtgttcgatgagggcaaaagttggcatagcgaaacgaagaattccctcatgcaggatcgcgacgcagccagcgccagagcttggcccaagatgcacactgtgaacggatatgtcaataggtcacttcctggcttgattgggtgtcatcggaaaagtgtctactggcacgtgatcggaatggggacaacaccagaggtccactccatatttctcgaaggccataccttccttgttcgaaaccacagacaggcatccttggagatctctcccattacctttctcactgcccaaacgctccttatggacttgggtcagttccttctcttctgccatatcagctcacaccagcatgatggtatggaagcttatgtgaaggtcgacagttgtccagaggagccacagcgtcgcatgaagaataatgaagaagccgaggattacgacgacgatctcaccgattctgagatggacgtggtgaggtttgatgacgacaactctccctccttcattcaaatccggagcgtggcgaagaaacaccccaagacttgggtccactatatagcggcggaagaggaggattgggattacgctcctcttgtattggcaccagatgaccgctcatacaaaagccagtacctcaacaacggaccgcagagaattggccggaagtataagaaagtgcgatttatggcctatacagacgaaacctttaagacaagggaggccatccagcatgagagtgggattttgggacctcttctttacggcgaagttggtgataccctcctcatcatcttcaagaatcaagcttctcgcccctataacatttacccacacgggatcactgacgttagccctttgtatagcagaagacttcccaaaggcgtgaagcatctcaaagacttccccattttgccaggcgagatctttaagtacaaatggaccgtcacagtggaagatggaccgactaaatcagaccctcgatgccttacgcggtactattcctccttcgtgaatatggagagagatttggcaagcggactcataggaccactcctcatctgttacaaggaatctgtagaccagaggggtaaccagattatgagtgataaacgcaatgtgatcctttttagcgtcttcgacgagaaccggtcctggtacttgaccgagaatatacaaaggttccttcccaaccccgcaggcgttcagttggaagaccctgagtttcaggccagcaatattatgcactcaatcaacggctatgtgtttgatagtctccagctttctgtttgcctccatgaagtagcctattggtacatcttgtcaattggtgctcaaacagacttcctctccgtcttcttctccggctacacctttaagcacaagatggtgtatgaggacactctcacactctttccattttctggagaaaccgtgttcatgagcatggagaatccaggcctttggatcttgggttgccacaacagtgattttcgcaatcggggaatgactgctctcctcaaagtcagcagctgtgataagaacacaggcgactattacgaagattcttacgaggacataagtgcctacttgttgtccaagaataacgccattgagcccagatcattctcccagaatcctcccgtgcttaaaaggcatcagcgcgaaatcaccagaactactcttcagtctgatcaagaggagattgactatgacgacaccataagcgtggaaatgaagaaggaggatttcgatatctatgacgaagatgagaaccagtctccgcggagctttcagaagaagacgcgacactacttcattgcagcagtcgaaaggctttgggactacggtatgtcatcatcccctcatgtgttgcgcaatagagctcagagtggaagtgttccacagttcaagaaagtcgtctttcaagagtttacagatggcagcttcacacagcctctctatcggggcgagcttaacgaacatttgggactccttggtccctatatccgagccgaagtggaggacaacattatggttacctttaggaatcaagcctctcgcccctacagcttctactcctccctcatcagttatgaggaggatcagagacaaggcgctgaaccacggaagaactttgtgaaaccgaatgagacgaagacctacttctggaaagtacagcaccacatggcccccacaaaagacgaattcgattgcaaagcatgggcgtatttttcagacgttgacttggagaaagatgtacattcaggacttattggtcctttgttggtgtgtcacactaacactctcaatccagcccatggcaggcaggtgacagtccaggaattcgctcttttctttaccatctttgatgagaccaagtcctggtacttcacggaaaacatggagcgcaattgcagagccccctgtaacatacagatggaggaccctacctttaaggaaaattatcggttccacgcaatcaacggatacattatggatacactccctggccttgtgatggctcaggaccaacgaatcaggtggtacctcctcagcatgggttctaatgagaacatacactccattcacttttcaggacatgtgttcactgtccggaagaaagaagagtataagatggccctctacaatttgtatccaggcgtgtttgagaccgttgaaatgcttccctctaaagctggcatctggagagtagagtgcttgatcggagaacatcttcacgcaggtatgagcaccttgttcctcgtgtacagcaacaaatgtcagaccccacttggcatggccagtggacacattcgcgactttcagatcacagcatctggccagtatggacaatgggccccaaagttggctcgcctccattactccggtagcataaatgcgtggtccactaaagaacctttcagctggattaaggtcgatcttcttgcccccatgatcatccacggcattaagacacagggagcgaggcagaaattctcctccctctacatctcacagttcattattatgtatagtttggacggcaagaagtggcaaacttatagaggtaacagtactggaacactgatggttttcttcggcaacgttgatagctctggcatcaaacacaacatctttaatcctcccataatagctcggtacatcagattgcatccgacccactacagcattaggagtacactccgaatggagcttatgggttgcgacttgaattcctgttcaatgccactcggaatggagtctaaagccatctctgatgcacagataaccgccagtagctactttacgaacatgtttgctacgtggtcaccctctaaggcaaggcttcatttgcaaggccggtctaatgcctggagacctcaggtgaacaacccgaaagaatggctccaggtggactttcagaagaccatgaaagtaacaggtgtcactactcagggagttaagtccttggataccagcatgtatgtgaaggagttccttatttcctcatcacaagatggccaccagtggaccctcttctttcagaatggtaaggtcaaagtgtttcagggcaatcaagacagcttcacacccgtggtgaacagtcttgatcctccactcttgacacgataccttcgaatccatccacagtcttgggttcaccagattgcattgcgcatggaagtacttggatgcgaggctcaggacctctac

SEQ ID NO: 666 - protein, 1457 aa, synthetic construct
  REGION 1..1457: note = Variant of human B-domain deleted Factor VIII
MQIELSTCFFLCLLRFCFSATRRYYLGAVELSWDYMQSDLGELPVDARFPPRVPKSFPFNTSVVYKKTLFVEFTDHLFNIAKPRPPWMGLLGPTIQAEVYDTVVITLKNMASHPVSLHAVGVSYWKASEGAEYDDQTSQREKEDDKVFPGGSHTYVWQVLKENGPMASDPLCLTYSYLSHVDLVKDLNSGLIGALLVCREGSLAKEKTQTLHKFILLFAVFDEGKSWHSETKNSLMQDRDAASARAWPKMHTVNGYVNRSLPGLIGCHRKSVYWHVIGMGTTPEVHSIFLEGHTFLVRNHRQASLEISPITFLTAQTLLMDLGQFLLFCHISSHQHDGMEAYVKVDSCPEEPQRRMKNNEEAEDYDDDLTDSEMDVVRFDDDNSPSFIQIRSVAKKHPKTWVHYIAAEEEDWDYAPLVLAPDDRSYKSQYLNNGPQRIGRKYKKVRFMAYTDETFKTREAIQHESGILGPLLYGEVGDTLLIIFKNQASRPYNIYPHGITDVSPLYSRRLPKGVKHLKDFPILPGEIFKYKWTVTVEDGPTKSDPRCLTRYYSSFVNMERDLASGLIGPLLICYKESVDQRGNQIMSDKRNVILFSVFDENRSWYLTENIQRFLPNPAGVQLEDPEFQASNIMHSINGYVFDSLQLSVCLHEVAYWYILSIGAQTDFLSVFFSGYTFKHKMVYEDTLTLFPFSGETVFMSMENPGLWILGCHNSDFRNRGMTALLKVSSCDKNTGDYYEDSYEDISAYLLSKNNAIEPRSFSQNPPVLKRHQREITRTTLQSDQEEIDYDDTISVEMKKEDFDIYDEDENQSPRSFQKKTRHYFIAAVERLWDYGMSSSPHVLRNRAQSGSVPQFKKVVFQEFTDGSFTQPLYRGELNEHLGLLGPYIRAEVEDNIMVTFRNQASRPYSFYSSLISYEEDQRQGAEPRKNFVKPNETKTYFWKVQHHMAPTKDEFDCKAWAYFSDVDLEKDVHSGLIGPLLVCHTNTLNPAHGRQVTVQEFALFFTIFDETKSWYFTENMERNCRAPCNIQMEDPTFKENYRFHAINGYIMDTLPGLVMAQDQRIRWYLLSMGSNENIHSIHFSGHVFTVRKKEEYKMALYNLYPGVFETVEMLPSKAGIWRVECLIGEHLHAGMSTLFLVYSNKCQTPLGMASGHIRDFQITASGQYGQWAPKLARLHYSGSINAWSTKEPFSWIKVDLLAPMIIHGIKTQGARQKFSSLYISQFIIMYSLDGKKWQTYRGNSTGTLMVFFGNVDSSGIKHNIFNPPIIARYIRLHPTHYSIRSTLRMELMGCDLNSCSMPLGMESKAISDAQITASSYFTNMFATWSPSKARLHLQGRSNAWRPQVNNPKEWLQVDFQKTMKVTGVTTQGVKSLDTSMYVKEFLISSSQDGHQWTLFFQNGKVKVFQGNQDSFTPVVNSLDPPLLTRYLRIHPQSWVHQIALRMEVLGCEAQDLY

SEQ ID NO: 667 - DNA, 4371 bp, synthetic construct
  misc_feature 1..4371: note = Variant of human B-domain deleted Factor VIII
  source 1..4371: mol_type = other DNA
atgcagattgaactgtctacctgcttcttcctctgtttgctgaggttctgctttagcgccactagacggtactaccttggcgctgtggagctgtcctgggactatatgcagagtgatttgggagagcttcccgtcgacgcacgatttcctcctcgcgttccaaagtcatttcccttcaacacaagcgtggtgtacaagaagacgctcttcgtcgaattcaccgatcacctgttcaatatcgccaaacccagaccaccatggatgggtcttttggggcctaccatacaagcggaggtgtatgacacagttgttatcactctcaagaacatggcttctcatccggtaagtcttcacgcagtgggcgtgtcctactggaaagcttcagaaggagccgagtatgatgatcagacatcccagagggagaaagaagacgacaaggtatttccaggtgggtctcatacctatgtgtggcaagtgctcaaagagaatggccctatggcaagcgatccgctctgtttgacttacagctacctttcacacgttgacctcgtcaaggacctcaactccgggttgattggagccttgttggtatgcagggaaggatctcttgccaaagagaagacacagaccctccacaagtttatccttctctttgctgtgttcgatgagggcaaaagttggcatagcgaaacgaagaattccctcatgcaggatcgcgacgcagccagcgccagagcttggcccaagatgcacactgtgaacggatatgtcaataggtcacttcctggcttgattgggtgtcatcggaaaagtgtctactggcacgtgatcggaatggggacaacaccagaggtccactccatatttctcgaaggccataccttccttgttcgaaaccacagacaggcatccttggagatctctcccattacctttctcactgcccaaacgctccttatggacttgggtcagttccttctcttctgccatatcagctcacaccagcatgatggtatggaagcttatgtgaaagtcgacagttgtcctgaggagccacagttgcgcatgaagaataatgaagaagccgaggattacgacgacgatctcaccgattctgagatggacgtggtgaggtttgatgacgacaactctccctccttcattcaaatccggagcgtggcgaagaaacaccccaagacttgggtccactatatagcggcggaagaggaggattgggattacgctcctcttgtattggcaccagatgaccgctcatacaaaagccagtacctcaacaacggaccgcagagaattggccggaagtataagaaagtgcgatttatggcctatacagacgaaacctttaagacaagggaggccatccagcatgagagtgggattttgggacctcttctttacggcgaagttggtgataccctcctcatcatcttcaagaatcaagcttctcgcccctataacatttacccacacgggatcactgacgttaggcctttgtatagcagaagacttcccaaaggcgtgaagcatctcaaagacttccccattttgccaggcgagatctttaagtacaaatggaccgtcacagtggaagatggaccgactaaatcagaccctcgatgccttacgcggtactattcctccttcgtgaatatggagagagatttggcaagcggactcataggaccactcctcatctgttacaaggaatctgtagaccagaggggtaaccagattatgagtgataaacgcaatgtgatcctttttagcgtcttcgacgagaaccggtcctggtacttgaccgagaatatacaaaggttccttcccaaccccgcaggcgttcagttggaagaccctgagtttcaggccagcaatattatgcactcaatcaacggctatgtgtttgatagtctccagctttctgtttgcctccatgaagtagcctattggtacatcttgtcaattggtgctcaaacagacttcctctccgtcttcttctccggctacacctttaagcacaagatggtgtatgaggacactctcacactctttccattttctggagaaaccgtgttcatgagcatggagaatccaggcctttggatcttgggttgccacaacagtgattttcgcaatcggggaatgactgctctcctcaaagtcagcagctgtgataagaacacaggcgactattacgaagattcttacgaggacataagtgcctacttggactccaagaataacgccattgagcccagatcattctcccagaatcctcccgtgcttaaaaggcatcagcgcgaaatcaccagaactactcttcagtctgatcaagaggagattgactatgacgacaccataagcgtggaaatgaagaaggaggatttcgatatctatgacgaagatgagaaccagtctccgcggagctttcagaagaagacgcgacactacttcattgcagcagtcgaaaggctttgggactacggtatgtcatcatcccctcatgtgttgcgcaatagagctcagagtggaagtgttccacagttcaagaaagtcgtctttcaagagtttacagatggcagcttcacacagcctctctatcggggcgagcttaacgaacatttgggactccttggtccctatatccgagccgaagtggaggacaacattatggttacctttaggaatcaagcctctcgcccctacagcttctactcctccctcatcagttatgaggaggatcagagacaaggcgctgaaccacggaagaactttgtgaaaccgaatgagacgaagacctacttctggaaagtacagcaccacatggcccccacaaaagacgaattcgattgcaaagcatgggcgtatttttcagacgttgacttggagaaagatgtacattcaggacttattggtcctttgttggtgtgtcacactaacactctcaatccagcccatggcaggcaggtgacagtccaggaattcgctcttttctttaccatctttgatgagaccaagtcctggtacttcacggaaaacatggagcgcaattgcagagccccctgtaacatacagatggaggaccctacctttaaggaaaattatcggttccacgcaatcaacggatacattatggatacactccctggccttgtgatggctcaggaccaacgaatcaggtggtacctcctcagcatgggttctaatgagaacatacactccattcacttttcaggacatgtgttcactgtccggaagaaagaagagtataagatggccctctacaatttgtatccaggcgtgtttgagaccgttgaaatgcttccctctaaagctggcatctggagagtagagtgcttgatcggagaacatcttcacgcaggtatgagcaccttgttcctcgtgtacagcaacaaatgtcagaccccacttggcatggccagtggacacattcgcgactttcagatcacagcatctggccagtatggacaatgggccccaaagttggctcgcctccattactccggtagcataaatgcgtggtccactaaagaacctttcagctggattaaggtcgatcttcttgcccccatgatcatccacggcattaagacacagggagcgaggcagaaattctcctccctgtacatctcacagttcattattatgtatagtttggacggcaagaagtggcaaacttatagaggtaacagtactggaacactcatggtgttcttcggcaacgttgatagctctggcatcaaacacaacatctttaatcctcccataatagctcggtacatcagattgcatccgacccactacagcattaggagtacactccgaatggagcttatgggttgcgacttgaattcctgttcaatgccactcggaatggagtctaaagccatctctgatgcacagataaccgccagtagctactttacgaacatgtttgctacgtggtcaccctctaaggcaaggcttcatttgcaaggccggtctaatgcctggagacctcaggtgaacaacccgaaagaatggctccaggtggactttcagaagaccatgaaagtaacaggtgtcactactcagggagttaagtccttggataccagcatgtatgtgaaggagttccttatttcctcatcacaagatggccaccagtggaccctcttctttcagaatggtaaggtcaaagtgtttcagggcaatcaagacagcttcacacccgtggtgaacagtcttgatcctccactcttgacacgataccttcgaatccatccacagtcttgggagcaccagattgcattgcgcatggaagtacttggatgcgaggctcaggacctctac

SEQ ID NO: 668 - protein, 1457 aa, synthetic construct
  REGION 1..1457: note = Variant of human B-domain deleted Factor VIII
MQIELSTCFFLCLLRFCFSATRRYYLGAVELSWDYMQSDLGELPVDARFPPRVPKSFPFNTSVVYKKTLFVEFTDHLFNIAKPRPPWMGLLGPTIQAEVYDTVVITLKNMASHPVSLHAVGVSYWKASEGAEYDDQTSQREKEDDKVFPGGSHTYVWQVLKENGPMASDPLCLTYSYLSHVDLVKDLNSGLIGALLVCREGSLAKEKTQTLHKFILLFAVFDEGKSWHSETKNSLMQDRDAASARAWPKMHTVNGYVNRSLPGLIGCHRKSVYWHVIGMGTTPEVHSIFLEGHTFLVRNHRQASLEISPITFLTAQTLLMDLGQFLLFCHISSHQHDGMEAYVKVDSCPEEPQLRMKNNEEAEDYDDDLTDSEMDVVRFDDDNSPSFIQIRSVAKKHPKTWVHYIAAEEEDWDYAPLVLAPDDRSYKSQYLNNGPQRIGRKYKKVRFMAYTDETFKTREAIQHESGILGPLLYGEVGDTLLIIFKNQASRPYNIYPHGITDVRPLYSRRLPKGVKHLKDFPILPGEIFKYKWTVTVEDGPTKSDPRCLTRYYSSFVNMERDLASGLIGPLLICYKESVDQRGNQIMSDKRNVILFSVFDENRSWYLTENIQRFLPNPAGVQLEDPEFQASNIMHSINGYVFDSLQLSVCLHEVAYWYILSIGAQTDFLSVFFSGYTFKHKMVYEDTLTLFPFSGETVFMSMENPGLWILGCHNSDFRNRGMTALLKVSSCDKNTGDYYEDSYEDISAYLDSKNNAIEPRSFSQNPPVLKRHQREITRTTLQSDQEEIDYDDTISVEMKKEDFDIYDEDENQSPRSFQKKTRHYFIAAVERLWDYGMSSSPHVLRNRAQSGSVPQFKKVVFQEFTDGSFTQPLYRGELNEHLGLLGPYIRAEVEDNIMVTFRNQASRPYSFYSSLISYEEDQRQGAEPRKNFVKPNETKTYFWKVQHHMAPTKDEFDCKAWAYFSDVDLEKDVHSGLIGPLLVCHTNTLNPAHGRQVTVQEFALFFTIFDETKSWYFTENMERNCRAPCNIQMEDPTFKENYRFHAINGYIMDTLPGLVMAQDQRIRWYLLSMGSNENIHSIHFSGHVFTVRKKEEYKMALYNLYPGVFETVEMLPSKAGIWRVECLIGEHLHAGMSTLFLVYSNKCQTPLGMASGHIRDFQITASGQYGQWAPKLARLHYSGSINAWSTKEPFSWIKVDLLAPMIIHGIKTQGARQKFSSLYISQFIIMYSLDGKKWQTYRGNSTGTLMVFFGNVDSSGIKHNIFNPPIIARYIRLHPTHYSIRSTLRMELMGCDLNSCSMPLGMESKAISDAQITASSYFTNMFATWSPSKARLHLQGRSNAWRPQVNNPKEWLQVDFQKTMKVTGVTTQGVKSLDTSMYVKEFLISSSQDGHQWTLFFQNGKVKVFQGNQDSFTPVVNSLDPPLLTRYLRIHPQSWEHQIALRMEVLGCEAQDLY

SEQ ID NO: 669 - DNA, 4371 bp, synthetic construct
  misc_feature 1..4371: note = Variant of human B-domain deleted Factor VIII
  source 1..4371: mol_type = other DNA
atgcagattgaactgtctacctgcttcttcctctgtttgctgaggttctgctttagcgccactagacggtactaccttggcgctgtggagctgtcctgggactatatgcagagtgatttgggagagcttcccgtcgacgcacgatttcctcctcgcgttccaaagtcatttcccttcaacacaagcgtggtgtacaagaagacgctcttcgtcgaattcaccgatcacctgttcaatatcgccaaacccagaccaccatggatgggtcttttggggcctaccatacaagcggaggtgtatgacacagttgttatcactctcaagaacatggcttctcatccggtaagtcttcacgcagtgggcgtgtcctactggaaagcttcagaaggagccgagtatgatgatcagacatcccagagggagaaagaagacgacaaggtatttccaggtgggtctcatacctatgtgtggcaagtgctcaaagagaatggccctatggcaagcgatccgctgtgtttgacttacagctacctttcacacgttgacctcgtcaaggacctcaactccgggttgattggagccttgttggtatgcagggaaggatctcttgccaaagagaagacacagaccctccacaagtttatccttctctttgctgtgttcgatgagggcaaaagttggcatagcgaaacgaagaattccctcatgcaggatcgcgacgcagccagcgccagagcttggcccaagatgcacactgtgaacggatatgtcaataggtcgcttcctggcttgattgggtgtcatcggaaaagtgtctactggcacgtgatcggaatggggacaacaccagaggtccactccatatttctcgaaggccataccttccttgttcgaaaccacagacaggcatccttggagatctctcccattacctttctcactgcccaaacgctccttatggacttgggtcagttccttctcttctgccatatcagctcacaccagcatgatggtatggaagcttatgtgaaagtcgacagttgtcctgaggagccacagttgcgcatgaagaataatgaagaagccgaggattacgacgacgatctcaccgattctgagatggacgtggtgaggtttgatgacgacaactctccctccttcattcaaatccggagcgtggcgaagaaacaccccaagacttgggtccactatatagcggcggaagaggaggattgggattacgctcctcttgtattggcaccagatgaccgctcatacaaaagccagtacctcaacaacggaccgcagagaattggccggaagtataagaaagtgcgatttatggcctatacagacgaaacctttaagacaagggaggccatccagcatgagagtgggattttgggacctcttctttacggcgaagttggtgataccctcctcatcatcttcaagaatcaagcttctcgcccctataacatttacccacacgggatcactgacgttaggcctttgtatagcagaagacttcccaaaggcgtgaagcatctcaaagacttccccattttgccaggcgagatctttaagtacaaatggaccgtcacagtggaagatggaccgactaaatcagaccctcgatgccttacgcggtactattcctccttcgtgaatatggagagagatttggcaagcggactcataggaccactcctcatctgttacaaggaatctgtagaccagaggggtaaccagattatgagtgataaacgcaatgtgatcctttttagcgtcttcgacgagaaccggtcctggtacttgaccgagaatatacaaaggttccttcccaaccccgcaggcgttcagttggaagaccctgagtttcaggccagcaatattatgcactcaatcaacggctatgtgtttgatagtctccagctttctgtttgcctccatgaagtagcctattggtacatcttgtcaattggtgctcaaacagacttcctctccgtcttcttctccggctacacctttaagcacaagatggtgtatgaggacactctcacactctttccattttctggagaaaccgtgttcatgagcatggagaatccaggcctttggatcttgggttgccacaacagtgattttcgcaatcggggaatgactgctctcctcaaagtcagcagctgtgataagaacacaggcgactattacgaagattcttacgaggacataagtgcctacttgttgtccaagaataacgccattgagcccagatcattctcccagaatcctcccgtgcttaaaaggcatcagcgcgaaatcaccagaactactcttcagtctgatcaagaggagattgactatgacgacaccataagcgtggaaatgaagaaggaggatttcgatatctatgacgaagatgagaaccagtctccgcggagctttcagaagaagacgcgacactacttcattgcagcagtcgaaaggctttgggactacggtatgtcatcatcccctcatgtgttgcgcaatagagctcagagtggaagtgttccacagttcaagaaagtcgtctttcaagagtttacagatggcagcttcacacagcctctctatcggggcgagcttaacgaacatttgggactccttggtccctatatccgagccgaagtggaggacaacattatggttacctttaggaatcaagcctctcgcccctacagcttctactcctccctcatcagttatgaggaggatcagagacaaggcgctgaaccacggaagaactttgtgaaaccgaatgagacgaagacctacttctggaaagtacagcaccacatggcccccacaaaagacgaattcgattgcaaagcatgggcgtatttttcagacgttgacttggagaaagatgtacattcaggacttattggtcctttgttggtgtgtcacactaacactctcaatccagcccatggcaggcaggtgacagtccaggaattcgctcttttctttaccatctttgatgagaccaagtcctggtacttcacggaaaacatggagcgcaattgcagagccccctgtaacatacagatggaggaccctacctttaaggaaaattatcggttccacgcaatcaacggatacattaaggatacactccctggccttgtgatggctcaggaccaacgaatcaggtggtacctcctcagcatgggttctaatgagaacatacactccattcacttttcaggacatgtgttcactgtccggaagaaagaagagtataagatggccctctacaatttgtatccaggcgtgtttgagaccgttgaaatgcttccctctaaagctggcatctggagagtagagtgcttgatcggagaacatcttcacgcaggtatgagcaccttgttcctcgtgtacagcaacaaatgtcagaccccacttggcatggccagtggacacattcgcgactttcagatcacagcatctggccagtatggacaatgggccccaaagttggctcgcctccattactccggtagcataaatgcgtggtccactaaagaacctttcagctggattaaggtcgatcttcttgcccccatgatcatccacggcattaagacacagggagcgaggcagaaattctcctccctctacatctcacagttcattattatgtatagtttggacggcaagaagtggcaaacttatagaggtaacagtactggaacactcatggtgttcttcggcaacgttgatagctctggcatcaaacacaacatctttaatcctcccataatagctcggtacatcagattgcatccgacccactacagcattaggagtacactccgaatggagcttatgggttgcgacttgaattcctgttcaatgccactcggaatggagtctaaagccatctctgatgcacagataaccgccagtagctactttacgaacatgtttgctacgtggtcaccctctaaggcaaggcttcatttgcaaggccggtctaatgcctggagacctcaggtgaacaacccgaaagaatggctccaggtggactttcagaagaccatgaaagtaacaggtgtcactactcagggagttaagtccttggataccagcatgtatgtgaaggagttccttatttcctcatcacaagatggccaccagtggaccctcttctttcagaatggtaaggtcaaagtgtttcagggcaatcaagacagcttcacacccgtggtgaacagtcttgatcctccactcttgacacgataccttcgaatccatccacagtcttgggagcaccagattgcattgcgcatggaagtacttggatgcgaggctcaggacctctac

SEQ ID NO: 670 - protein, 1457 aa, synthetic construct
  REGION 1..1457: note = Variant of human B-domain deleted Factor VIII
MQIELSTCFFLCLLRFCFSATRRYYLGAVELSWDYMQSDLGELPVDARFPPRVPKSFPFNTSVVYKKTLFVEFTDHLFNIAKPRPPWMGLLGPTIQAEVYDTVVITLKNMASHPVSLHAVGVSYWKASEGAEYDDQTSQREKEDDKVFPGGSHTYVWQVLKENGPMASDPLCLTYSYLSHVDLVKDLNSGLIGALLVCREGSLAKEKTQTLHKFILLFAVFDEGKSWHSETKNSLMQDRDAASARAWPKMHTVNGYVNRSLPGLIGCHRKSVYWHVIGMGTTPEVHSIFLEGHTFLVRNHRQASLEISPITFLTAQTLLMDLGQFLLFCHISSHQHDGMEAYVKVDSCPEEPQLRMKNNEEAEDYDDDLTDSEMDVVRFDDDNSPSFIQIRSVAKKHPKTWVHYIAAEEEDWDYAPLVLAPDDRSYKSQYLNNGPQRIGRKYKKVRFMAYTDETFKTREAIQHESGILGPLLYGEVGDTLLIIFKNQASRPYNIYPHGITDVRPLYSRRLPKGVKHLKDFPILPGEIFKYKWTVTVEDGPTKSDPRCLTRYYSSFVNMERDLASGLIGPLLICYKESVDQRGNQIMSDKRNVILFSVFDENRSWYLTENIQRFLPNPAGVQLEDPEFQASNIMHSINGYVFDSLQLSVCLHEVAYWYILSIGAQTDFLSVFFSGYTFKHKMVYEDTLTLFPFSGETVFMSMENPGLWILGCHNSDFRNRGMTALLKVSSCDKNTGDYYEDSYEDISAYLLSKNNAIEPRSFSQNPPVLKRHQREITRTTLQSDQEEIDYDDTISVEMKKEDFDIYDEDENQSPRSFQKKTRHYFIAAVERLWDYGMSSSPHVLRNRAQSGSVPQFKKVVFQEFTDGSFTQPLYRGELNEHLGLLGPYIRAEVEDNIMVTFRNQASRPYSFYSSLISYEEDQRQGAEPRKNFVKPNETKTYFWKVQHHMAPTKDEFDCKAWAYFSDVDLEKDVHSGLIGPLLVCHTNTLNPAHGRQVTVQEFALFFTIFDETKSWYFTENMERNCRAPCNIQMEDPTFKENYRFHAINGYIKDTLPGLVMAQDQRIRWYLLSMGSNENIHSIHFSGHVFTVRKKEEYKMALYNLYPGVFETVEMLPSKAGIWRVECLIGEHLHAGMSTLFLVYSNKCQTPLGMASGHIRDFQITASGQYGQWAPKLARLHYSGSINAWSTKEPFSWIKVDLLAPMIIHGIKTQGARQKFSSLYISQFIIMYSLDGKKWQTYRGNSTGTLMVFFGNVDSSGIKHNIFNPPIIARYIRLHPTHYSIRSTLRMELMGCDLNSCSMPLGMESKAISDAQITASSYFTNMFATWSPSKARLHLQGRSNAWRPQVNNPKEWLQVDFQKTMKVTGVTTQGVKSLDTSMYVKEFLISSSQDGHQWTLFFQNGKVKVFQGNQDSFTPVVNSLDPPLLTRYLRIHPQSWEHQIALRMEVLGCEAQDLY

SEQ ID NO: 671 - DNA, 4371 bp, synthetic construct
  misc_feature 1..4371: note = Variant of human B-domain deleted Factor VIII
  source 1..4371: mol_type = other DNA
atgcagattgaactgtctacctgcttcttcctctgtttgctgaggttctgctttagcgccactagacggtactaccttggcgctgtggagctgtcctgggactatatgcagagtgatttgggagagcttcccgtcgacgcacgatttcctcctcgcgttccaaagtcatttcccttcaacacaagcgtggtgtacaagaagacgctcttcgtcgaattcaccgatcacctgttcaatatcgccaaacccagaccaccatggatgggtcttttggggcctaccatacaagcggaggtgtatgacacagttgttatcactctcaagaacatggcttctcatccggtaagtcttcacgcagtgggcgtgtcctactggaaagcttcagaaggagccgagtatgatgatcagacatcccagagggagaaagaagacgacaaggtatttccaggtgggtctcatacctatgtgtggcaagtgctcaaagagaatggccctatggcaagcgatccgctgtgtttgacttacagctacctttcacacgttgacctcgtcaaggacctcaactccgggttgattggagccttgttggtatgcagggaaggatctcttgccaaagagaagacacagaccctccacaagtttatccttctctttgctgtgttcgatgagggcaaaagttggcatagcgaaacgaagaattccctcatgcaggatcgcgacgcagccagcgccagagcttggcccaagatgcacactgtgaacggatatgtcaataggtcacttcctggcttgattgggtgtcatcggaaaagtgtctactggcacgtgatcggaatggggacaacaccagaggtccactccatatttctcgaaggccataccttccttgttcgaaaccacagacaggcatccttggagatctctcccattacctttctcactgcccaaacgctccttatggacttgggtcagttccttctcttctgccatatcagctcacaccagcatgatggtatggaagcttatgtgaaagtcgacagttgtcctgaggagccacagttgcgcatgaagaataatgaagaagccgaggattacgacgacgatctcaccgattctgagatggacgtggtgaggtttgatgacgacaactctccctccttcattcaaatccggagcgtggcgaagaaacaccccaagacttgggtccactatatagcggcggaagaggaggattgggattacgctcctcttgtattggcaccagatgaccgctcatacaaaagccagtacctcaacaacggaccgcagagaattggccggaagtataagaaagtgcgatttatggcctatacagacgaaacctttaagacaagggaggccatccagcatgagagtgggattttgggacctcttctttacggcgaagttggtgataccctcctcatcatcttcaagaatcaagcttctcgcccctataacatttacccacacgggatcactgacgttaggcctttgtatagcagaagacttcccaaaggcgtgaagcatctcaaagacttccccattttgccaggcgagatctttaagtacaaatggaccgtcacagtggaagatggaccgactaaatcagaccctcgatgccttacgcggtactattcctccttcgtgaatatggagagagatttggcaagcggactcataggaccactcctcatctgttacaaggaatctgtagaccagaggggtaaccagattatgagtgataaacgcaatgtgatcctttttagcgtcttcgacgagaaccggtcctggtacttgaccgagaatatacaaaggttccttcccaaccccgcaggcgttcagttggaagaccctgagtttcaggccagcaatattatgcactcaatcaacggctatgtgtttgatagtctccagctttctgtttgcctccatgaagtagcctattggtacatcttgtcaattggtgctcaaacagacttcctctccgtcttcttctccggctacacctttaagcacaagatggtgtatgaggacactctcacactctttccattttctggagaaaccgtgttcatgagcatggagaatccaggcctttggatcttgggttgccacaacagtgattttcgcaatcggggaatgactgctctcctcaaagtcagcagctgtgataagaacacaggcgactattacgaagattcttacgaggacataagtgcctacttgttgtccaagaataacgccattgagcccagatcattctcccagaatcctcccgtgcttaaaaggcatcagcgcgaaatcaccagaactactcttcagtctgatcaagaggagattgactatgacgacaccataagcgtggaaatgaagaaggaggatttcgatatctatgacgaagatgagaaccagtctccgcggagctttcagaagaagacgcgacactacttcattgcagcagtcgaaaggctttgggactacggtatgtcatcatcccctcatgtgttgcgcaatagagctcagagtggaagtgttccacagttcaagaaagtcgtctttcaagagtttacagatggcagcttcacacagcctctctatcggggcgagcttaacgaacatttgggactccttggtccctatatccgagccgaagtggaggacaacattatggttacctttaggaatcaagcctctcgcccctacagcttctactcctccctcatcagttatgaggaggatcagagacaaggcgctgaaccacggaagaactttgtgaaaccgaatgagacgaagacctacttctggaaagtacagcaccacatggcccccacaaaagacgaattcgattgcaaagcatgggcgtatttttcagacgttgacttggagaaagatgtacattcaggacttattggtcctttgttggtgtgtcacactaacactctcaatccagcccatggcaggcaggtgacagtccaggaattcgctcttttctttaccatctttgatgagaccaagtcctggtacttcacggaaaacatggagcgcaattgcagagccccctgtaacatacagatggaggaccctacctttaaggaaaattatcggttccacgcaatcaacggatacattagcgatacactccctggccttgtgatggctcaggaccaacgaatcaggtggtacctcctcagcatgggttctaatgagaacatacactccattcacttttcaggacatgtgttcactgtccggaagaaagaagagtataagatggccctctacaatttgtatccaggcgtgtttgagaccgttgaaatgcttccctctaaagctggcatctggagagtagagtgcttgatcggagaacatcttcacgcaggtatgagcaccttgttcctcgtgtacagcaacaaatgtcagaccccacttggcatggccagtggacacattcgcgactttcagatcacagcatctggccagtatggacaatgggccccaaagttggctcgcctccattactccggtagcataaatgcgtggtccactaaagaacctttcagctggattaaggtcgatcttcttgcccccatgatcatccacggcattaagacacagggagcgaggcagaaattctcctccctctacatctcacagttcattattatgtatagtttggacggcaagaagtggcaaacttatagaggtaacagtactggaacactcatggtgttcttcggcaacgttgatagctctggcatcaaacacaacatctttaatcctcccataatagctcggtacatcagattgcatccgacccactacagcattaggagtacactccgaatggagcttatgggttgcgacttgaattcctgttcaatgccactcggaatggagtctaaagccatctctgatgcacagataaccgccagtagctactttacgaacatgtttgctacgtggtcaccctctaaggcaaggcttcatttgcaaggccggtctaatgcctggagacctcaggtgaacaacccgaaagaatggctccaggtggactttcagaagaccatgaaagtaacaggtgtcactactcagggagttaagtccttggatactagcatgtatgtgaaggagttccttatttcctcatcacaagatggccaccagtggaccctcttctttcagaatggtaaggtcaaagtgtttcagggcaatcaagacagcttcacacccgtggtgaacagtcttgatcctccactcttgacacgataccttcgaatccatccacagtcttgggagcaccagattgcattgcgcatggaagtacttggatgcgaggctcaggacctctac

SEQ ID NO: 672 - protein, 1457 aa, synthetic construct
  REGION 1..1457: note = Variant of human B-domain deleted Factor VIII
MQIELSTCFFLCLLRFCFSATRRYYLGAVELSWDYMQSDLGELPVDARFPPRVPKSFPFNTSVVYKKTLFVEFTDHLFNIAKPRPPWMGLLGPTIQAEVYDTVVITLKNMASHPVSLHAVGVSYWKASEGAEYDDQTSQREKEDDKVFPGGSHTYVWQVLKENGPMASDPLCLTYSYLSHVDLVKDLNSGLIGALLVCREGSLAKEKTQTLHKFILLFAVFDEGKSWHSETKNSLMQDRDAASARAWPKMHTVNGYVNRSLPGLIGCHRKSVYWHVIGMGTTPEVHSIFLEGHTFLVRNHRQASLEISPITFLTAQTLLMDLGQFLLFCHISSHQHDGMEAYVKVDSCPEEPQLRMKNNEEAEDYDDDLTDSEMDVVRFDDDNSPSFIQIRSVAKKHPKTWVHYIAAEEEDWDYAPLVLAPDDRSYKSQYLNNGPQRIGRKYKKVRFMAYTDETFKTREAIQHESGILGPLLYGEVGDTLLIIFKNQASRPYNIYPHGITDVRPLYSRRLPKGVKHLKDFPILPGEIFKYKWTVTVEDGPTKSDPRCLTRYYSSFVNMERDLASGLIGPLLICYKESVDQRGNQIMSDKRNVILFSVFDENRSWYLTENIQRFLPNPAGVQLEDPEFQASNIMHSINGYVFDSLQLSVCLHEVAYWYILSIGAQTDFLSVFFSGYTFKHKMVYEDTLTLFPFSGETVFMSMENPGLWILGCHNSDFRNRGMTALLKVSSCDKNTGDYYEDSYEDISAYLLSKNNAIEPRSFSQNPPVLKRHQREITRTTLQSDQEEIDYDDTISVEMKKEDFDIYDEDENQSPRSFQKKTRHYFIAAVERLWDYGMSSSPHVLRNRAQSGSVPQFKKVVFQEFTDGSFTQPLYRGELNEHLGLLGPYIRAEVEDNIMVTFRNQASRPYSFYSSLISYEEDQRQGAEPRKNFVKPNETKTYFWKVQHHMAPTKDEFDCKAWAYFSDVDLEKDVHSGLIGPLLVCHTNTLNPAHGRQVTVQEFALFFTIFDETKSWYFTENMERNCRAPCNIQMEDPTFKENYRFHAINGYISDTLPGLVMAQDQRIRWYLLSMGSNENIHSIHFSGHVFTVRKKEEYKMALYNLYPGVFETVEMLPSKAGIWRVECLIGEHLHAGMSTLFLVYSNKCQTPLGMASGHIRDFQITASGQYGQWAPKLARLHYSGSINAWSTKEPFSWIKVDLLAPMIIHGIKTQGARQKFSSLYISQFIIMYSLDGKKWQTYRGNSTGTLMVFFGNVDSSGIKHNIFNPPIIARYIRLHPTHYSIRSTLRMELMGCDLNSCSMPLGMESKAISDAQITASSYFTNMFATWSPSKARLHLQGRSNAWRPQVNNPKEWLQVDFQKTMKVTGVTTQGVKSLDTSMYVKEFLISSSQDGHQWTLFFQNGKVKVFQGNQDSFTPVVNSLDPPLLTRYLRIHPQSWEHQIALRMEVLGCEAQDLY

SEQ ID NO: 673 - DNA, 4371 bp, synthetic construct
  misc_feature 1..4371: note = Variant of human B-domain deleted Factor VIII
  source 1..4371: mol_type = other DNA
atgcagattgaactgtctacctgcttcttcctctgtttgctgaggttctgctttagcgccactagacggtactaccttggcgctgtggagctgtcctgggactatatgcagagtgatttgggagagcttcccgtcgacgcacgatttcctcctcgcgttccaaagtcatttccctttaacacaagcgtggtgtacaagaagacgctcttcgtcgaattcaccgatcacctgttcaatatcgccaaacccagaccaccatggatgggtcttttggggcctaccatacaagcggaggtgtatgacacagttgttatcactctcaagaacatggcttctcatccggtaagtcttcacgcagtgggcgtgtcctactggaaagcttcagaaggagccgagtatgatgatcagacatcccagagggagaaagaagacgacaaggtatttccaggtgggtctcatacctatgtgtggcaagtgctcaaagagaatggccctatggcaagcgatccgctctgtttgacttacagctacctttcacacgttgacctcgtcaaggacctcaactccgggttgattggagccttgttggtatgcagggaaggatctcttgccaaagagaagacacagaccctccacaagtttatccttctctttgctgtgttcgatgagggcaaaagttggcatagcgaaacgaagaattccctcatgcaggatcgcgacgcagccagcgccagagcttggcccaagatgcacactgtgaacggatatgtcaataggacgcttcctggcttgattgggtgtcatcggaaaagtgtctactggcacgtgatcggaatggggacaacaccagaggtccactccatatttctcgaaggccataccttccttgttcgaaaccacagacaggcatccttggagatctctcccattacctttctcactgcccaaacgctccttatggacttgggtcagttccttctcttctgccatatcagctcacaccagcatgatggtatggaagcttatgtgaaagtcgacagttgtcctgaggagccacagttgcgcatgaagaataatgaagaagccgaggattacgacgacgatctcaccgattctgagatggacgtggtgaggtttgatgacgacaactctccctccttcattcaaatccggagcgtggcgaagaaacaccccaagacttgggtccactatatagcggcggaagaggaggattgggattacgctcctcttgtattggcaccagatgaccgctcatacaaaagccagtacctcaacaacggaccgcagagaattggccggaagtataagaaagtgcgatttatggcctatacagacgaaacctttaagacaagggaggccatccagcatgagagtgggattttgggacctcttctttacggcgaagttggtgataccctcctcatcatcttcaagaatcaagcttctcgcccctataacatttacccacacgggatcactgacgttaggcctttgtatagcagaagacttcccaaaggcgtgaagcatctcaaagacttccccattttgccaggcgagatctttaagtacaaatggaccgtcacagtggaagatggaccgactaaatcagaccctcgatgccttacgcggtactattcctccttcgtgaatatggagagagatttggcaagcggactcataggaccactcctcatctgttacaaggaatctgtagaccagaggggtaaccagattatgagtgataaacgcaatgtgatcctttttagcgtcttcgacgagaaccggtcctggtacttgaccgagaatatacaaaggttccttcccaaccccgcaggcgttcagttggaagaccctgagtttcaggccagcaatattatgcactcaatcaacggctatgtgtttgatagtctccagctttctgtttgcctccatgaagtagcctattggtacatcttgtcaattggtgctcaaacagacttcctctccgtcttcttctccggctacacctttaagcacaagatggtgtatgaggacactctcacactctttccattttctggagaaaccgtgttcatgagcatggagaatccaggcctttggatcttgggttgccacaacagtgattttcgcaatcggggaatgactgctctcctcaaagtcagcagctgtgataagaacacaggcgactattacgaagattcttacgaggacataagtgcctacttgttgtccaagaataacgccattgagcccagatcattctcccagaatcctcccgtgcttaaaaggcatcagcgcgaaatcaccagaactactcttcagtctgatcaagaggagattgactatgacgacaccataagcgtggaaatgaagaaggaggatttcgatatctatgacgaagatgagaaccagtctccgcggagctttcagaagaagacgcgacactacttcattgcagcagtcgaaaggctttgggactacggtatgtcatcatcccctcatgtgttgcgcaatagagctcagagtggaagtgttccacagttcaagaaagtcgtctttcaagagtttacagatggcagcttcacacagcctctctatcggggcgagcttaacgaacatttgggactccttggtccctatatccgagccgaagtggaggacaacattatggttacctttaggaatcaagcctctcgcccctacagcttctactcctccctcatcagttatgaggaggatcagagacaaggcgctgaaccacggaagaactttgtgaaaccgaatgagacgaagacctacttctggaaagtacagcaccacatggcccccacaaaagacgaattcgattgcaaagcatgggcgtatttttcagacgttgacttggagaaagatgtacattcaggacttattggtcctttgttggtgtgtcacactaacactctcaatccagcccatggcaggcaggtgacagtccaggaattcgctcttttctttaccatctttgatgagaccaagtcctggtacttcacggaaaacatggagcgcaattgcagagccccctgtaacatacagatggaggaccctacctttaaggaaaattatcggttccacgcaatcaacggatacattatggatacactccctggccttgtgatggctcaggaccaacgaatcaggtggtacctcctcagcatgggttctaatgagaacatacactccattcacttttcaggacatgtgttcactgtccggaagaaagaagagtataagatggccctctacaatttgtatccaggcgtgtttgagaccgttgaaatgcttccctctaaagctggcatctggagagtagagtgcttgatcggagaacatcttcacgcaggtatgagcaccttgttcctcgtgtacagcaacaaatgtcagaccccacttggcatggccagtggacacattcgcgactttcagatcacagcatctggccagtatggacaatgggccccaaagttggctcgcctccattactccggtagcataaatgcgtggtccactaaagaacctttcagctggattaaggtcgatcttcttgcccccatgatcatccacggcattaagacacagggagcgaggcagaaattctcctccctctacatctcacagttcattattatgtatagtttggacggcaagaagtggcaaacttatagaggtaacagtactggaacactcatggtgttcttcggcaacgttgatagctctggcatcaaacacaacatctttaatcctcccataatagctcggtacatcagattgcatccgacccactacagcattaggagtacactccgaatggagcttatgggttgcgacttgaattcctgttcaatgccactcggaatggagtctaaagccatctctgatgcacagataaccgccagtagctactttacgaacatgtttgctacgtggtcaccctctaaggcaaggcttcatttgcaaggccggtctaatgcctggagacctcaggtgaacaacccgaaagaatggctccaggtggactttcagaagaccatgaaagtaacaggtgtcactactcagggagttaagtccttggataccagcatgtatgtgaaggagttccttatttcctcatcacaagatggccaccagtggaccctcttctttcagaatggtaaggtcaaagtgtttcagggcaatcaagacagcttcacacccgtggtgaacagtcttgatcctccactcttgacacgataccttcgaatccatccacagtcttgggagcaccagattgcattgcgcatggaagtacttggatgcgaggctcaggacctctac

SEQ ID NO: 674 - protein, 1457 aa, synthetic construct
  REGION 1..1457: note = Variant of human B-domain deleted Factor VIII
MQIELSTCFFLCLLRFCFSATRRYYLGAVELSWDYMQSDLGELPVDARFPPRVPKSFPFNTSVVYKKTLFVEFTDHLFNIAKPRPPWMGLLGPTIQAEVYDTVVITLKNMASHPVSLHAVGVSYWKASEGAEYDDQTSQREKEDDKVFPGGSHTYVWQVLKENGPMASDPLCLTYSYLSHVDLVKDLNSGLIGALLVCREGSLAKEKTQTLHKFILLFAVFDEGKSWHSETKNSLMQDRDAASARAWPKMHTVNGYVNRTLPGLIGCHRKSVYWHVIGMGTTPEVHSIFLEGHTFLVRNHRQASLEISPITFLTAQTLLMDLGQFLLFCHISSHQHDGMEAYVKVDSCPEEPQLRMKNNEEAEDYDDDLTDSEMDVVRFDDDNSPSFIQIRSVAKKHPKTWVHYIAAEEEDWDYAPLVLAPDDRSYKSQYLNNGPQRIGRKYKKVRFMAYTDETFKTREAIQHESGILGPLLYGEVGDTLLIIFKNQASRPYNIYPHGITDVRPLYSRRLPKGVKHLKDFPILPGEIFKYKWTVTVEDGPTKSDPRCLTRYYSSFVNMERDLASGLIGPLLICYKESVDQRGNQIMSDKRNVILFSVFDENRSWYLTENIQRFLPNPAGVQLEDPEFQASNIMHSINGYVFDSLQLSVCLHEVAYWYILSIGAQTDFLSVFFSGYTFKHKMVYEDTLTLFPFSGETVFMSMENPGLWILGCHNSDFRNRGMTALLKVSSCDKNTGDYYEDSYEDISAYLLSKNNAIEPRSFSQNPPVLKRHQREITRTTLQSDQEEIDYDDTISVEMKKEDFDIYDEDENQSPRSFQKKTRHYFIAAVERLWDYGMSSSPHVLRNRAQSGSVPQFKKVVFQEFTDGSFTQPLYRGELNEHLGLLGPYIRAEVEDNIMVTFRNQASRPYSFYSSLISYEEDQRQGAEPRKNFVKPNETKTYFWKVQHHMAPTKDEFDCKAWAYFSDVDLEKDVHSGLIGPLLVCHTNTLNPAHGRQVTVQEFALFFTIFDETKSWYFTENMERNCRAPCNIQMEDPTFKENYRFHAINGYIMDTLPGLVMAQDQRIRWYLLSMGSNENIHSIHFSGHVFTVRKKEEYKMALYNLYPGVFETVEMLPSKAGIWRVECLIGEHLHAGMSTLFLVYSNKCQTPLGMASGHIRDFQITASGQYGQWAPKLARLHYSGSINAWSTKEPFSWIKVDLLAPMIIHGIKTQGARQKFSSLYISQFIIMYSLDGKKWQTYRGNSTGTLMVFFGNVDSSGIKHNIFNPPIIARYIRLHPTHYSIRSTLRMELMGCDLNSCSMPLGMESKAISDAQITASSYFTNMFATWSPSKARLHLQGRSNAWRPQVNNPKEWLQVDFQKTMKVTGVTTQGVKSLDTSMYVKEFLISSSQDGHQWTLFFQNGKVKVFQGNQDSFTPVVNSLDPPLLTRYLRIHPQSWEHQIALRMEVLGCEAQDLY

SEQ ID NO: 675 - DNA, 4371 bp, synthetic construct
  misc_feature 1..4371: note = Variant of human B-domain deleted Factor VIII
  source 1..4371: mol_type = other DNA
atgcagattgaactgtctacctgcttcttcctctgtttgctgaggttctgctttagcgccactagacggtactaccttggcgctgtggagctgtcctgggactatatgcagagtgatttgggagagcttcccgtcgacgcacgatttcctcctcgcgttccaaagtcatttcccttcaacacaagcgtggtgtacaagaagacgctcttcgtcgaattcaccgatcacctgttcaatatcgccaaacccagaccaccatggatgggtcttttggggcctaccatacaagcggaggtgtatgacacagttgttatcactctcaagaacatggcttctcatccggtaagtcttcacgcagtgggcgtgtcctactggaaagcttcagaaggagccgagtatgatgatcagacatcccagagggagaaagaagacgacaaggtatttccaggtgggtctcatacctatgtgtggcaagtgctcaaagagaatggccctatggcaagcgatccgctctgtttgacttacagctacctttcacacgttgacctcgtcaaggacctcaactccgggttgattggagccttgttggtatgcagggaaggatctcttgccaaagagaagacacagaccctccacaagtttatccttctctttgctgtgttcgatgagggcaaaagttggcatagcgaaacgaagaattccctcatgcaggatcgcgacgcagccagcgccagagcttggcccaagatgcacactgtgaacggatatgtcaataggtcacttcctggcttgattgggtgtcatcggaaaagtgtctactggcacgtgatcggaatggggacaacaccagaggtccactccatatttctcgaaggccataccttccttgttcgaaaccacagacaggcatccttggagatctctcccattacctttctcactgcccaaacgctccttatggacttgggtcagttccttctcttctgccatatcagctcacaccagcatgatggtatggaagcttatgtgaaagtcgacagttgtcctgaggagccacagttgcgcatgaagaataatgaagaagccgaggattacgacgacgatctcaccgattctgagatggacgtggtgaggtttgatgacgacaactctccctccttcattcaaatccggagcgtggcgaagaaacaccccaagacttgggtccactatatagcggcggaagaggaggattgggattacgctcctcttgtattggcaccagatgaccgctcatacaaaagccagtacctcaacaacggaccgcagagaattggccggaagtataagaaagtgcgatttatggcctatacagacgaaacctttaagacaagggaggccatccagcatgagagtgggattttgggacctcttctttacggcgaagttggtgataccctcctcatcatcttcaagaatcaagcttctcgcccctataacatttacccacacgggatcactgacgttaggcctttgtatagcagaagacttcccaaaggcgtgaagcatctcaaagacttccccattttgccaggcgagatctttaagtacaaatggaccgtcacagtggaagatggaccgactaaatcagaccctcgatgccttacgcggtactattcctccttcgtgaatatggagagagatttggcaagcggactcataggaccactcctcatctgttacaaggaatctgtagaccagaggggtaaccagattatgagtgataaacgcaatgtgatcctttttagcgtcttcgacgagaaccggtcctggtacttgaccgagaatatacaaaggttccttcccaaccccgcaggcgttcagttggaagaccctgagtttcaggccagcaatattatgcactcaatcaacggctatgtgtttgatagtctccagctttctgtttgcctccatgaagtagcctattggtacatcttgtcaattggtgctcaaacagacttcctctccgtcttcttctccggctacacctttaagcacaagatggtgtatgaggacactctcacactctttccattttctggagaaaccgtgttcatgagcatggagaatccaggcctttggatcttgggttgccacaacagtgattttcgcaatcggggaatgactgctctcctcaaagtcagcagctgtgataagaacacaggcgactattacgaagattcttacgaggacataagtgcctacttgctgtccaagaataacgccccggagcccagatcattctcccagaatcctcccgtgcttaaaaggcatcagcgcgaaatcaccagaactactcttcagtctgatcaagaggagattgactatgacgacaccataagcgtggaaatgaagaaggaggatttcgatatctatgacgaagatgagaaccagtctccgcggagctttcagaagaagacgcgacactacttcattgcagcagtcgaaaggctttgggactacggtatgtcatcatcccctcatgtgttgcgcaatagagctcagagtggaagtgttccacagttcaagaaagtcgtctttcaagagtttacagatggcagcttcacacagcctctctatcggggcgagcttaacgaacatttgggactccttggtccctatatccgagccgaagtggaggacaacattatggttacctttaggaatcaagcctctcgcccctacagcttctactcctccctcatcagttatgaggaggatcagagacaaggcgctgaaccacggaagaactttgtgaaaccgaatgagacgaagacctacttctggaaagtacagcaccacatggcccccacaaaagacgaattcgattgcaaagcatgggcgtatttttcagacgttgacttggagaaagatgtacattcaggacttattggtcctttgttggtgtgtcacactaacactctcaatccagcccatggcaggcaggtgacagtccaggaattcgctcttttctttaccatctttgatgagaccaagtcctggtacttcacggaaaacatggagcgcaattgcagagccccctgtaacatacagatggaggaccctacctttaaggaaaattatcggttccacgcaatcaacggatacattatggatacactccctggccttgtgatggctcaggaccaacgaatcaggtggtacctcctcagcatgggttctaatgagaacatacactccattcacttttcaggacatgtgttcactgtccggaagaaagaagagtataagatggccctctacaatttgtatccaggcgtgtttgagaccgttgaaatgcttccctctaaagctggcatctggagagtagagtgcttgatcggagaacatcttcacgcaggtatgagcaccttgttcctcgtgtacagcaacaaatgtcagaccccacttggcatggccagtggacacattcgcgactttcagatcacagcatctggccagtatggacaatgggccccaaagttggctcgcctccattactccggtagcataaatgcgtggtccactaaagaacctttcagctggattaaggtcgatcttcttgcccccatgatcatccacggcattaagacacagggagcgaggcagaaattctcctccctctacatctcacagttcattattatgtatagtttggacggcaagaagtggcaaacttatagaggtaacagtactggaacactcatggtgttcttcggcaacgttgatagctctggcatcaaacacaacatctttaatcctcccataatagctcggtacatcagattgcatccgacccactacagcattaggagtacactccgaatggagcttatgggttgcgacttgaattcctgttcaatgccactcggaatggagtctaaagccatctctgatgcacagataaccgccagtagctactttacgaacatgtttgctacgtggtcaccctctaaggcaaggcttcatttgcaaggccggtctaatgcctggagacctcaggtgaacaacccgaaagaatggctccaggtggactttcagaagaccatgaaagtaacaggtgtcactactcagggagttaagtccttggataccagcatgtatgtgaaggagttccttatttcctcatcacaagatggccaccagtggaccctcttctttcagaatggtaaggtcaaagtgtttcagggcaatcaagacagcttcacacccgtggtgaacagtcttgatcctccactcttgacacgataccttcgaatccatccacagtcttgggagcaccagattgcattgcgcatggaagtacttggatgcgaggctcaggacctctac

SEQ ID NO: 676 - protein, 1457 aa, synthetic construct
  REGION 1..1457: note = Variant of human B-domain deleted Factor VIII
MQIELSTCFFLCLLRFCFSATRRYYLGAVELSWDYMQSDLGELPVDARFPPRVPKSFPFNTSVVYKKTLFVEFTDHLFNIAKPRPPWMGLLGPTIQAEVYDTVVITLKNMASHPVSLHAVGVSYWKASEGAEYDDQTSQREKEDDKVFPGGSHTYVWQVLKENGPMASDPLCLTYSYLSHVDLVKDLNSGLIGALLVCREGSLAKEKTQTLHKFILLFAVFDEGKSWHSETKNSLMQDRDAASARAWPKMHTVNGYVNRSLPGLIGCHRKSVYWHVIGMGTTPEVHSIFLEGHTFLVRNHRQASLEISPITFLTAQTLLMDLGQFLLFCHISSHQHDGMEAYVKVDSCPEEPQLRMKNNEEAEDYDDDLTDSEMDVVRFDDDNSPSFIQIRSVAKKHPKTWVHYIAAEEEDWDYAPLVLAPDDRSYKSQYLNNGPQRIGRKYKKVRFMAYTDETFKTREAIQHESGILGPLLYGEVGDTLLIIFKNQASRPYNIYPHGITDVRPLYSRRLPKGVKHLKDFPILPGEIFKYKWTVTVEDGPTKSDPRCLTRYYSSFVNMERDLASGLIGPLLICYKESVDQRGNQIMSDKRNVILFSVFDENRSWYLTENIQRFLPNPAGVQLEDPEFQASNIMHSINGYVFDSLQLSVCLHEVAYWYILSIGAQTDFLSVFFSGYTFKHKMVYEDTLTLFPFSGETVFMSMENPGLWILGCHNSDFRNRGMTALLKVSSCDKNTGDYYEDSYEDISAYLLSKNNAPEPRSFSQNPPVLKRHQREITRTTLQSDQEEIDYDDTISVEMKKEDFDIYDEDENQSPRSFQKKTRHYFIAAVERLWDYGMSSSPHVLRNRAQSGSVPQFKKVVFQEFTDGSFTQPLYRGELNEHLGLLGPYIRAEVEDNIMVTFRNQASRPYSFYSSLISYEEDQRQGAEPRKNFVKPNETKTYFWKVQHHMAPTKDEFDCKAWAYFSDVDLEKDVHSGLIGPLLVCHTNTLNPAHGRQVTVQEFALFFTIFDETKSWYFTENMERNCRAPCNIQMEDPTFKENYRFHAINGYIMDTLPGLVMAQDQRIRWYLLSMGSNENIHSIHFSGHVFTVRKKEEYKMALYNLYPGVFETVEMLPSKAGIWRVECLIGEHLHAGMSTLFLVYSNKCQTPLGMASGHIRDFQITASGQYGQWAPKLARLHYSGSINAWSTKEPFSWIKVDLLAPMIIHGIKTQGARQKFSSLYISQFIIMYSLDGKKWQTYRGNSTGTLMVFFGNVDSSGIKHNIFNPPIIARYIRLHPTHYSIRSTLRMELMGCDLNSCSMPLGMESKAISDAQITASSYFTNMFATWSPSKARLHLQGRSNAWRPQVNNPKEWLQVDFQKTMKVTGVTTQGVKSLDTSMYVKEFLISSSQDGHQWTLFFQNGKVKVFQGNQDSFTPVVNSLDPPLLTRYLRIHPQSWEHQIALRMEVLGCEAQDLY

SEQ ID NO: 677 - DNA, 4371 bp, synthetic construct
  misc_feature 1..4371: note = Variant of human B-domain deleted Factor VIII
  source 1..4371: mol_type = other DNA
atgcagattgaactgtctacctgcttcttcctctgtttgctgaggttctgctttagcgccactagacggtactaccttggcgctgtggagctgtcctgggactatatgcagagtgatttgggagagcttcccgtcgacgcacgatttcctcctcgcgttccaaagtcatttcccttcaacacaagcgtggtgtacaagaagacgctcttcgtcgaattcaccgatcacctgttcaatatcgccaaacccagaccaccatggatgggtcttttggggcctaccatacaagcggaggtgtatgacacagttgttatcactctcaagaacatggcttctcatccggtaagtcttcacgcagtgggcgtgtcctactggaaagcttcagaaggagccgagtatgatgatcagacatcccagagggagaaagaagacgacaaggtatttccaggtgggtctcatacctatgtgtggcaagtgctcaaagagaatggccctatggcaagcgatccgctctgtttgacttacagctacctttcacacgttgacctcgtcaaggacctcaactccgggttgattggagccttgttggtatgcagggaaggatctcttgccaaagagaagacacagaccctccacaagtttatccttctctttgctgtgttcgatgagggcaaaagttggcatagcgaaacgaagaattccctcatgcaggatcgcgacgcagccagcgccagagcttggcccaagatgcacactgtgaacggatatgtcaataggtcacttcctggcttgattgggtgtcatcggaaaagtgtctactggcacgtgatcggaatggggacaacaccagaggtccactccatatttctcgaaggccataccttccttgttcgaaaccacagacaggcatccttggagatctctcccattacctttctcactgcccaaacgctccttatggacttgggtcagttccttctcttctgccatatcagctcacaccagcatgatggtatggaagcttatgtgaaagtcgacagttgtcctgaggagccacagttgcgcatgaagaataatgaagaagccgaggattacgacgacgatctcaccgattctgagatggacgtggtgaggtttgatgacgacaactctccctccttcattcaaatccggagcgtggcgaagaaacaccccaagacttgggtccactatatagcggcggaagaggaggattgggattacgctcctcttgtattggcaccagatgaccgctcatacaaaagccagtacctcaacaacggaccgcagagaattggccggaagtataagaaagtgcgatttatggcctatacagacgaaacctttaagacaagggaggccatccagcatgagagtgggattttgggacctcttctttacggcgaagttggtgataccctcctcatcatcttcaagaatcaagcttctcgcccctataacatttacccacacgggatcactgacgttaggcctttgtatagcagaagacttcccaaaggcgtgaagcatctcaaagacttccccattttgccaggcgagatctttaagtacaaatggaccgtcacagtggaagatggaccgactaaatcagaccctcgatgccttacgcggtactattcctccttcgtgaatatggagagagatttggcaagcggactcataggaccactcctcatctgttacaaggaatctgtagaccagaggggtaaccagattatgagtgataaacgcaatgtgatcctttttagcgtcttcgacgagaaccggtcctggtacttgaccgagaatatacaaaggttccttcccaaccccgcaggcgttcagttggaagaccctgagtttcaggccagcaatattatgcactcaatcaacggctatgtgtttgatagtctccagctttctgtttgcctccatgaagtagcctattggtacatcttgtcaattggtgctcaaacagacttcctctccgtcttcttctccggctacacctttaagcacaagatggtgtatgaggacactctcacactctttccattttctggagaaaccgtgttcatgagcatggagaatccaggcctttggatcttgggttgccacaacagtgattttcgcaatcggggaatgactgctctcctcaaagtcagcagctgtgataagaacacaggcgactattacgaagattcttacgaggacataagtgcctacttgttgtccaagaataacgccattgagcccagatcattctcccagaatcctcccgtgcttaaaaggcatcagcgcgaaatcaccagaactactcttcagtctgatcaagaggagattgactatgacgacaccataagcgtggaaatgaagaaggaggatttcgatatctatgacgaagatgagaaccagtctccgcggagctttcagaagaagacgcgacactacttcattgcagcagtcgaaaggctttgggactacggtatgtcatcatcccctcatgtgttgcgcaatagagctcagagtggaagtgttccacagttcaagaaagtcgtctttcaagagtttacagatggcagcttcacacagcctctctatcggggcgagcttaacgaacatttgggactccttggtccctatatccgagccgaagtggaggacaacattatggttacctttaggaatcaagcctctcgcccctacagcttctactcctccctcatcagttatgaggaggatcagagacaaggcgctgaaccacggaagaactttgtgaaaccgaatgagacgaagacctacttctggaaagtacagcaccacatggcccccacaaaagacgaattcgattgcaaagcatgggcgtatttttcagacgttgacttggagaaagatgtacattcaggacttattggtcctttgttggtgtgtcacactaacactctcaatccagcccatggcaggcaggtgacagtccaggaattcgctcttttctttaccatctttgatgagaccaagtcctggtacttcacggaaaacatggagcgcaattgcagagccccctgtaacatacagatggaggaccctacctttaaggaaaattatcggttccacgcaatcaacggatacattatggatacactccctggccttgtgatggctcaggaccaacgaatcaggtggtacctcctcagcatgggttctaatgagaacatacactccattcacttttcaggacatgtgttcactgtccggaagaaagaagagtataagatggccctctacaatttgtatccaggcgtgtttgagaccgttgaaatgcttccctctaaagctggcatctggagagtagagtgcttgatcggagaacatcttcacgcaggtatgagcaccttgttcctcgtgtacagcaacaaatgtcagaccccacttggcatggccagtggacacattcgcgactttcagatcacagcatctggccagtatggacaatgggccccaaagttggctcgcctccattactccggtagcataaatgcgtggtccactaaagaacctgccagctggattaaggtcgatcttcttgcccccatgatcatccacggcattaagacacagggagcgaggcagaaattctcctccctctacatctcacagttcattattatgtatagtttggacggcaagaagtggcaaacttatagaggtaacagtactggaacactcatggtgttcttcggcaacgttgatagctctggcatcaaacacaacatctttaatcctcccataatagctcggtacatcagattgcatccgacccactacagcattaggagtacactccgaatggagcttatgggttgcgacttgaattcctgttcaatgccactcggaatggagtctaaagccatctctgatgcacagataaccgccagtagctactttacgaacatgtttgctacgtggtcaccctctaaggcaaggcttcatttgcaaggccggtctaatgcctggagacctcaggtgaacaacccgaaagaatggctccaggtggactttcagaagaccatgaaagtaacaggtgtcactactcagggagttaagtccttggataccagcatgtatgtgaaggagttccttatttcctcatcacaagatggccaccagtggaccctcttctttcagaatggtaaggtcaaagtgtttcagggcaatcaagacagcttcacacccgtggtgaacagtcttgatcctccactcttgacacgataccttcgaatccatccacagtcttgggagcaccagattgcattgcgcatggaagtacttggatgcgaggctcaggacctctac

SEQ ID NO: 678 - protein, 1457 aa, synthetic construct
  REGION 1..1457: note = Variant of human B-domain deleted Factor VIII
MQIELSTCFFLCLLRFCFSATRRYYLGAVELSWDYMQSDLGELPVDARFPPRVPKSFPFNTSVVYKKTLFVEFTDHLFNIAKPRPPWMGLLGPTIQAEVYDTVVITLKNMASHPVSLHAVGVSYWKASEGAEYDDQTSQREKEDDKVFPGGSHTYVWQVLKENGPMASDPLCLTYSYLSHVDLVKDLNSGLIGALLVCREGSLAKEKTQTLHKFILLFAVFDEGKSWHSETKNSLMQDRDAASARAWPKMHTVNGYVNRSLPGLIGCHRKSVYWHVIGMGTTPEVHSIFLEGHTFLVRNHRQASLEISPITFLTAQTLLMDLGQFLLFCHISSHQHDGMEAYVKVDSCPEEPQLRMKNNEEAEDYDDDLTDSEMDVVRFDDDNSPSFIQIRSVAKKHPKTWVHYIAAEEEDWDYAPLVLAPDDRSYKSQYLNNGPQRIGRKYKKVRFMAYTDETFKTREAIQHESGILGPLLYGEVGDTLLIIFKNQASRPYNIYPHGITDVRPLYSRRLPKGVKHLKDFPILPGEIFKYKWTVTVEDGPTKSDPRCLTRYYSSFVNMERDLASGLIGPLLICYKESVDQRGNQIMSDKRNVILFSVFDENRSWYLTENIQRFLPNPAGVQLEDPEFQASNIMHSINGYVFDSLQLSVCLHEVAYWYILSIGAQTDFLSVFFSGYTFKHKMVYEDTLTLFPFSGETVFMSMENPGLWILGCHNSDFRNRGMTALLKVSSCDKNTGDYYEDSYEDISAYLLSKNNAIEPRSFSQNPPVLKRHQREITRTTLQSDQEEIDYDDTISVEMKKEDFDIYDEDENQSPRSFQKKTRHYFIAAVERLWDYGMSSSPHVLRNRAQSGSVPQFKKVVFQEFTDGSFTQPLYRGELNEHLGLLGPYIRAEVEDNIMVTFRNQASRPYSFYSSLISYEEDQRQGAEPRKNFVKPNETKTYFWKVQHHMAPTKDEFDCKAWAYFSDVDLEKDVHSGLIGPLLVCHTNTLNPAHGRQVTVQEFALFFTIFDETKSWYFTENMERNCRAPCNIQMEDPTFKENYRFHAINGYIMDTLPGLVMAQDQRIRWYLLSMGSNENIHSIHFSGHVFTVRKKEEYKMALYNLYPGVFETVEMLPSKAGIWRVECLIGEHLHAGMSTLFLVYSNKCQTPLGMASGHIRDFQITASGQYGQWAPKLARLHYSGSINAWSTKEPASWIKVDLLAPMIIHGIKTQGARQKFSSLYISQFIIMYSLDGKKWQTYRGNSTGTLMVFFGNVDSSGIKHNIFNPPIIARYIRLHPTHYSIRSTLRMELMGCDLNSCSMPLGMESKAISDAQITASSYFTNMFATWSPSKARLHLQGRSNAWRPQVNNPKEWLQVDFQKTMKVTGVTTQGVKSLDTSMYVKEFLISSSQDGHQWTLFFQNGKVKVFQGNQDSFTPVVNSLDPPLLTRYLRIHPQSWEHQIALRMEVLGCEAQDLY

SEQ ID NO: 679 - DNA, 4371 bp, synthetic construct
  misc_feature 1..4371: note = Variant of human B-domain deleted Factor VIII
  source 1..4371: mol_type = other DNA
atgcagattgaactgtctacctgcttcttcctctgtttgctgaggttctgctttagcgccactagacggtactaccttggcgctgtggagctgtcctgggactatatgcagagtgatttgggagagcttcccgtcgacgcacgatttcctcctcgcgttccaaagtcatttcccttcaacacaagcgtggtgtacaagaagacgctcttcgtcgaattcaccgatcacctgttcaatatcgccaaacccagaccaccatggatgggtcttttggggcctaccatacaagcggaggtgtatgacacagttgttatcactctcaagaacatggcttctcatccggtaagtcttcacgcagtgggcgtgtcctactggaaagcttcagaaggagccgagtatgatgatcagacatcccagagggagaaagaagacgacaaggtatttccaggtgggtctcatacctatgtgtggcaagtgctcaaagagaatggccctatggcaagcgatccgctctgtttgacttacagctacctttcacacgttgacctcgtcaaggacctcaactccgggttgattggagccttgttggtatgcagggaaggatctcttgccaaagagaagacacagaccctccacaagtttatccttctctttgctgtgttcgatgagggcaaaagttggcatagcgaaacgaagaattccctcatgcaggatcgcgacgcagccagcgccagagcttggcccaagatgcacactgtgaacggatatgtcaataggtcacttcctggcttgattgggtgtcatcggaaaagtgtctactggcacgtgatcggaatggggacaacaccagaggtccactccatatttctcgaaggccataccttccttgttcgaaaccacagacaggcatccttggagatctctcccattacctttctcactgcccaaacgctccttatggacttgggtcagttccttctcttctgccatatcccgtcacaccagcatgatggtatggaagcttatgtgaaagtcgacagttgtcctgaggagccacagttgcgcatgaagaataatgaagaagccgaggattacgacgacgatctcaccgattctgagatggacgtggtgaggtttgatgacgacaactctccctccttcattcaaatccggagcgtggcgaagaaacaccccaagacttgggtccactatatagcggcggaagaggaggattgggattacgctcctcttgtattggcaccagatgaccgctcatacaaaagccagtacctcaacaacggaccgcagagaattggccggaagtataagaaagtgcgatttatggcctatacagacgaaacctttaagacaagggaggccatccagcatgagagtgggattttgggacctcttctttacggcgaagttggtgataccctcctcatcatcttcaagaatcaagcttctcgcccctataacatttacccacacgggatcactgacgttaggcctttgtatagcagaagacttcccaaaggcgtgaagcatctcaaagacttccccattttgccaggcgagatctttaagtacaaatggaccgtcacagtggaagatggaccgactaaatcagaccctcgatgccttacgcggtactattcctccttcgtgaatatggagagagatttggcaagcggactcataggaccactcctcatctgttacaaggaatctgtagaccagaggggtaaccagattatgagtgataaacgcaatgtgatcctttttagcgtcttcgacgagaaccggtcctggtacttgaccgagaatatacaaaggttccttcccaaccccgcaggcgttcagttggaagaccctgagtttcaggccagcaatattatgcactcaatcaacggctatgtgtttgatagtctccagctttctgtttgcctccatgaagtagcctattggtacatcttgtcaattggtgctcaaacagacttcctctccgtcttcttctccggctacacctttaagcacaagatggtgtatgaggacactctcacactctttccattttctggagaaaccgtgttcatgagcatggagaatccaggcctttggatcttgggttgccacaacagtgattttcgcaatcggggaatgactgctctcctcaaagtcagcagctgtgataagaacacaggcgactattacgaagattcttacgaggacataagtgcctacttgttgtccaagaataacgccattgagcccagatcattctcccagaatcctcccgtgcttaaaaggcatcagcgcgaaatcaccagaactactcttcagtctgatcaagaggagattgactatgacgacaccataagcgtggaaatgaagaaggaggatttcgatatctatgacgaagatgagaaccagtctccgcggagctttcagaagaagacgcgacactacttcattgcagcagtcgaaaggctttgggactacggtatgtcatcatcccctcatgtgttgcgcaatagagctcagagtggaagtgttccacagttcaagaaagtcgtctttcaagagtttacagatggcagcttcacacagcctctctatcggggcgagcttaacgaacatttgggactccttggtccctatatccgagccgaagtggaggacaacattatggttacctttaggaatcaagcctctcgcccctacagcttctactcctccctcatcagttatgaggaggatcagagacaaggcgctgaaccacggaagaactttgtgaaaccgaatgagacgaagacctacttctggaaagtacagcaccacatggcccccacaaaagacgaattcgattgcaaagcatgggcgtatttttcagacgttgacttggagaaagatgtacattcaggacttattggtcctttgttggtgtgtcacactaacactctcaatccagcccatggcaggcaggtgacagtccaggaattcgctcttttctttaccatctttgatgagaccaagtcctggtacttcacggaaaacatggagcgcaattgcagagccccctgtaacatacagatggaggaccctacctttaaggaaaattatcggttccacgcaatcaacggatacattatggatacactccctggccttgtgatggctcaggaccaacgaatcaggtggtacctcctcagcatgggttctaatgagaacatacactccattcacttttcaggacatgtgttcactgtccggaagaaagaagagtataagatggccctctacaatttgtatccaggcgtgtttgagaccgttgaaatgcttccctctaaagctggcatctggagagtagagtgcttgatcggagaacatcttcacgcaggtatgagcaccttgttcctcgtgtacagcaacaaatgtcagaccccacttggcatggccagtggacacattcgcgactttcagatcacagcatctggccagtatggacaatgggccccaaagttggctcgcctccattactccggtagcataaatgcgtggtccactaaagaacctttcagctggattaaggtcgatcttcttgcccccatgatcatccacggcattaagacacagggagcgaggcagaaattctcctccctctacatctcacagttcattattatgtatagtttggacggcaagaagtggcaaacttatagaggtaacagtactggaacactcatggtgttcttcggcaacgttgatagctctggcatcaaacacaacatctttaatcctcccataatagctcggtacatcagattgcatccgacccactacagcattaggagtacactccgaatggagcttatgggttgcgacttgaattcctgttcaatgccactcggaatggagtctaaagccatctctgatgcacagataaccgccagtagctactttacgaacatgtttgctacgtggtcaccctctaaggcaaggcttcatttgcaaggccggtctaatgcctggagacctcaggtgaacaacccgaaagaatggctccaggtggactttcagaagaccatgaaagtaacaggtgtcactactcagggagttaagtccttggataccagcatgtatgtgaaggagttccttatttcctcatcacaagatggccaccagtggaccctcttctttcagaatggtaaggtcaaagtgtttcagggcaatcaagacagcttcacacccgtggtgaacagtcttgatcctccactcttgacacgataccttcgaatccatccacagtcttgggagcaccagattgcattgcgcatggaagtacttggatgcgaggctcaggacctctac

SEQ ID NO: 680 - protein, 1457 aa, synthetic construct
  REGION 1..1457: note = Variant of human B-domain deleted Factor VIII
MQIELSTCFFLCLLRFCFSATRRYYLGAVELSWDYMQSDLGELPVDARFPPRVPKSFPFNTSVVYKKTLFVEFTDHLFNIAKPRPPWMGLLGPTIQAEVYDTVVITLKNMASHPVSLHAVGVSYWKASEGAEYDDQTSQREKEDDKVFPGGSHTYVWQVLKENGPMASDPLCLTYSYLSHVDLVKDLNSGLIGALLVCREGSLAKEKTQTLHKFILLFAVFDEGKSWHSETKNSLMQDRDAASARAWPKMHTVNGYVNRSLPGLIGCHRKSVYWHVIGMGTTPEVHSIFLEGHTFLVRNHRQASLEISPITFLTAQTLLMDLGQFLLFCHIPSHQHDGMEAYVKVDSCPEEPQLRMKNNEEAEDYDDDLTDSEMDVVRFDDDNSPSFIQIRSVAKKHPKTWVHYIAAEEEDWDYAPLVLAPDDRSYKSQYLNNGPQRIGRKYKKVRFMAYTDETFKTREAIQHESGILGPLLYGEVGDTLLIIFKNQASRPYNIYPHGITDVRPLYSRRLPKGVKHLKDFPILPGEIFKYKWTVTVEDGPTKSDPRCLTRYYSSFVNMERDLASGLIGPLLICYKESVDQRGNQIMSDKRNVILFSVFDENRSWYLTENIQRFLPNPAGVQLEDPEFQASNIMHSINGYVFDSLQLSVCLHEVAYWYILSIGAQTDFLSVFFSGYTFKHKMVYEDTLTLFPFSGETVFMSMENPGLWILGCHNSDFRNRGMTALLKVSSCDKNTGDYYEDSYEDISAYLLSKNNAIEPRSFSQNPPVLKRHQREITRTTLQSDQEEIDYDDTISVEMKKEDFDIYDEDENQSPRSFQKKTRHYFIAAVERLWDYGMSSSPHVLRNRAQSGSVPQFKKVVFQEFTDGSFTQPLYRGELNEHLGLLGPYIRAEVEDNIMVTFRNQASRPYSFYSSLISYEEDQRQGAEPRKNFVKPNETKTYFWKVQHHMAPTKDEFDCKAWAYFSDVDLEKDVHSGLIGPLLVCHTNTLNPAHGRQVTVQEFALFFTIFDETKSWYFTENMERNCRAPCNIQMEDPTFKENYRFHAINGYIMDTLPGLVMAQDQRIRWYLLSMGSNENIHSIHFSGHVFTVRKKEEYKMALYNLYPGVFETVEMLPSKAGIWRVECLIGEHLHAGMSTLFLVYSNKCQTPLGMASGHIRDFQITASGQYGQWAPKLARLHYSGSINAWSTKEPFSWIKVDLLAPMIIHGIKTQGARQKFSSLYISQFIIMYSLDGKKWQTYRGNSTGTLMVFFGNVDSSGIKHNIFNPPIIARYIRLHPTHYSIRSTLRMELMGCDLNSCSMPLGMESKAISDAQITASSYFTNMFATWSPSKARLHLQGRSNAWRPQVNNPKEWLQVDFQKTMKVTGVTTQGVKSLDTSMYVKEFLISSSQDGHQWTLFFQNGKVKVFQGNQDSFTPVVNSLDPPLLTRYLRIHPQSWEHQIALRMEVLGCEAQDLY

SEQ ID NO: 681 - DNA, 4371 bp, synthetic construct
  misc_feature 1..4371: note = Variant of human B-domain deleted Factor VIII
  source 1..4371: mol_type = other DNA
atgcagattgaactgtctacctgcttcttcctctgtttgctgaggttctgctttagcgccactagacggtactaccttggcgctgtggagctgtcctgggactatatgcagagtgatttgggagagcttcccgtcgacgcacgatttcctcctcgcgttccaaagtcatttcccttcaacacaagcgtggtgtacaagaagacgctcttcgtcgaattcaccgatcacctgttcaatatcgccaaacccagaccaccatggatgggtcttttggggcctaccatacaagcggaggtgtatgacacagttgttatcactctcaagaacatggcttctcatccggtaagtcttcacgcagtgggcgtgtcctactggaaagcttcagaaggagccgagtatgatgatcagacatcccagagggagaaagaagacgacaaggtatttccaggtgggtctcatacctatgtgtggcaagtgctcaaagagaatggccctatggcaagcgatccgctctgtttgacttacagctacctttcacacgttgacctcgtcaaggacctcaactccgggttgattggagccttgttggtatgcagggaaggatctcttgccaaagagaagacacagaccctccacaagtttatccttctctttgctgtgttcgatgagggcaaaagttggcatagcgaaacgaagaattccctcatgcaggatcgcgacgcagccagcgccagagcttggcccaagatgcacactgtgaacggatatgtcaataggtcacttcctggcttgattgggtgtcatcggaaaagtgtctactggcacgtgatcggaatggggacaacaccagaggtccactccatatttctcgaaggccataccttccttgttcgaaaccacagacaggcatccttggagatctctcccattacctttctcactgcccaaacgctccttatggacttgggtcagttccttctcttctgccatatcagctcacaccagcatgatggtatggaagcttatgtgaaagtcgacagttgtcctgaggagccacagttgcgcatgaagaataatgaagaagccgaggattacgacgacgatctcaccgattctgagatggacgtggtgaggtttgatgacgacaactctccctccttcattcaaatccggagcgtggcgaagaaacaccccaagacttgggtccactatatagcggcggaagaggaggattgggattacgctcctcttgtattggcaccagatgaccgctcatacaaaagccagtacctcaacaacggaccgcagagaattggccggaagtataagaaagtgcgatttatggcctatacagacgaaacctttaagacaagggaggccatccagcatgagagtgggattttgggacctcttctttacggcgaagttggtgataccctcctcatcatcttcaagaatcaagcttctcgcccctataacatttacccacacgggatcactgacgttaggcctttgtatagcagaagacttcccaaaggcgtgaagcatctcaaagacttccccattttgccaggcgagatctttaagtacaaatggaccgtcacagtggaagatggaccgactaaatcagaccctcgatgccttacgcggtactattcctccttcgtgaatatggagagagatttggcaagcggactcataggaccactcctcatctgttacaaggaatctgtagaccagaggggtaaccagattatgagtgataaacgcaatgtgatcctttttagcgtcttcgacgagaaccggtcctggtacttgaccgagaatatacaaaggttccttcccaaccccgcaggcgttcagttggaagaccctgagtttcaggccagcaatattatgcactcaatcaacggctatgtgtttgatagtctccagctttctgtttgcctccatgaagtagcctattggtacatcttgtcaattggtgctcaaacagacttcctctccgtcttcttctccggctacacctttaagcacaagatggtgtatgaggacactctcacactctttccattttctggagaaaccgtgttcatgagcatggagaatccaggcctttggatcttgggttgccacaacagtgattttcgcaatcggggaatgactgctctcctcaaagtcagcagctgtgataagaacacaggcgactattacgaagattcttacgaggacataagtgcctacttgttgtccaagaataacgccattgagcccagatcattctcccagaatcctcccgtgcttaaaaggcatcagcgcgaaatcaccagaactactcttcagtctgatcaagaggagattgactatgacgacaccataagcgtggaaatgaagaaggaggatttcgatatctatgacgaagatgagaaccagtctccgcggagctttcagaagaagacgcgacactacttcattgcagcagtcgaaaggctttgggactacggtatgtcatcatcccctcatgtgttgcgcaatagagctcagagtggaagtgttccacagttcaagaaagtcgtctttcaagagtttacagatggcagcttcacacagcctctctatcggggcgagcttaacgaacatttgggactccttggtccctatatccgagccgaagtggaggacaacattcgtgttacctttaggaatcaagcctctcgcccctacagcttctactcctccctcatcagttatgaggaggatcagagacaaggcgctgaaccacggaagaactttgtgaaaccgaatgagacgaagacctacttctggaaagtacagcaccacatggcccccacaaaagacgaattcgattgcaaagcatgggcgtatttttcagacgttgacttggagaaagatgtacattcaggacttattggtcctttgttggtgtgtcacactaacactctcaatccagcccatggcaggcaggtgacagtccaggaattcgctcttttctttaccatctttgatgagaccaagtcctggtacttcacggaaaacatggagcgcaattgcagagccccctgtaacatacagatggaggaccctacctttaaggaaaattatcggttccacgcaatcaacggatacattatggatacactccctggccttgtgatggctcaggaccaacgaatcaggtggtacctcctcagcatgggttctaatgagaacatacactccattcacttttcaggacatgtgttcactgtccggaagaaagaagagtataagatggccctctacaatttgtatccaggcgtgtttgagaccgttgaaatgcttccctctaaagctggcatctggagagtagagtgcttgatcggagaacatcttcacgcaggtatgagcaccttgttcctcgtgtacagcaacaaatgtcagaccccacttggcatggccagtggacacattcgcgactttcagatcacagcatctggccagtatggacaatgggccccaaagttggctcgcctccattactccggtagcataaatgcgtggtccactaaagaacctttcagctggattaaggtcgatcttcttgcccccatgatcatccacggcattaagacacagggagcgaggcagaaattctcctccctctacatctcacagttcattattatgtatagtttggacggcaagaagtggcaaacttatagaggtaacagtactggaacactcatggtgttcttcggcaacgttgatagctctggcatcaaacacaacatctttaatcctcccatcatagctcggtacatcagattgcatccgacccactacagcattaggagtacactccgaatggagcttatgggttgcgacttgaattcctgttcaatgccactcggaatggagtctaaagccatctctgatgcacagataaccgccagtagctactttacgaacatgtttgctacgtggtcaccctctaaggcaaggcttcatttgcaaggccggtctaatgcctggagacctcaggtgaacaacccgaaagaatggctccaggtggactttcagaagaccatgaaagtaacaggtgtcactactcagggagttaagtccttggataccagcatgtatgtgaaggagttccttatttcctcatcacaagatggccaccagtggaccctcttctttcagaatggtaaggtcaaagtgtttcagggcaatcaagacagcttcacacccgtggtgaacagtcttgatcctccactcttgacacgataccttcgaatccatccacagtcttgggagcaccagattgcattgcgcatggaagtacttggatgcgaggctcaggacctctac

SEQ ID NO: 682 - protein, 1457 aa, synthetic construct
  REGION 1..1457: note = Variant of human B-domain deleted Factor VIII
MQIELSTCFFLCLLRFCFSATRRYYLGAVELSWDYMQSDLGELPVDARFPPRVPKSFPFNTSVVYKKTLFVEFTDHLFNIAKPRPPWMGLLGPTIQAEVYDTVVITLKNMASHPVSLHAVGVSYWKASEGAEYDDQTSQREKEDDKVFPGGSHTYVWQVLKENGPMASDPLCLTYSYLSHVDLVKDLNSGLIGALLVCREGSLAKEKTQTLHKFILLFAVFDEGKSWHSETKNSLMQDRDAASARAWPKMHTVNGYVNRSLPGLIGCHRKSVYWHVIGMGTTPEVHSIFLEGHTFLVRNHRQASLEISPITFLTAQTLLMDLGQFLLFCHISSHQHDGMEAYVKVDSCPEEPQLRMKNNEEAEDYDDDLTDSEMDVVRFDDDNSPSFIQIRSVAKKHPKTWVHYIAAEEEDWDYAPLVLAPDDRSYKSQYLNNGPQRIGRKYKKVRFMAYTDETFKTREAIQHESGILGPLLYGEVGDTLLIIFKNQASRPYNIYPHGITDVRPLYSRRLPKGVKHLKDFPILPGEIFKYKWTVTVEDGPTKSDPRCLTRYYSSFVNMERDLASGLIGPLLICYKESVDQRGNQIMSDKRNVILFSVFDENRSWYLTENIQRFLPNPAGVQLEDPEFQASNIMHSINGYVFDSLQLSVCLHEVAYWYILSIGAQTDFLSVFFSGYTFKHKMVYEDTLTLFPFSGETVFMSMENPGLWILGCHNSDFRNRGMTALLKVSSCDKNTGDYYEDSYEDISAYLLSKNNAIEPRSFSQNPPVLKRHQREITRTTLQSDQEEIDYDDTISVEMKKEDFDIYDEDENQSPRSFQKKTRHYFIAAVERLWDYGMSSSPHVLRNRAQSGSVPQFKKVVFQEFTDGSFTQPLYRGELNEHLGLLGPYIRAEVEDNIRVTFRNQASRPYSFYSSLISYEEDQRQGAEPRKNFVKPNETKTYFWKVQHHMAPTKDEFDCKAWAYFSDVDLEKDVHSGLIGPLLVCHTNTLNPAHGRQVTVQEFALFFTIFDETKSWYFTENMERNCRAPCNIQMEDPTFKENYRFHAINGYIMDTLPGLVMAQDQRIRWYLLSMGSNENIHSIHFSGHVFTVRKKEEYKMALYNLYPGVFETVEMLPSKAGIWRVECLIGEHLHAGMSTLFLVYSNKCQTPLGMASGHIRDFQITASGQYGQWAPKLARLHYSGSINAWSTKEPFSWIKVDLLAPMIIHGIKTQGARQKFSSLYISQFIIMYSLDGKKWQTYRGNSTGTLMVFFGNVDSSGIKHNIFNPPIIARYIRLHPTHYSIRSTLRMELMGCDLNSCSMPLGMESKAISDAQITASSYFTNMFATWSPSKARLHLQGRSNAWRPQVNNPKEWLQVDFQKTMKVTGVTTQGVKSLDTSMYVKEFLISSSQDGHQWTLFFQNGKVKVFQGNQDSFTPVVNSLDPPLLTRYLRIHPQSWEHQIALRMEVLGCEAQDLY

SEQ ID NO: 683 - DNA, 4371 bp, synthetic construct
  misc_feature 1..4371: note = Variant of human B-domain deleted Factor VIII
  source 1..4371: mol_type = other DNA
atgcagattgaactgtctacctgcttcttcctctgtttgctgaggttctgctttagcgccactagacggtactaccttggcgctgtggagctgtcctgggactatatgcagagtgatttgggagagcttcccgtcgacgcacgatttcctcctcgcgttccaaagtcatttcccttcaacacaagcgtggtgtacaagaagacgctcttcgtcgaattcaccgatcacctgttcaatatcgccaaacccagaccaccatggatgggtcttttggggcctaccatacaagcggaggtgtatgacacagttgttatcactctcaagaacatggcttctcatccggtaagtcttcacgcagtgggcgtgtcctactggaaagcttcagaaggagccgagtatgatgatcagacatcccagagggagaaagaagacgacaaggtatttccaggtgggtctcatacctatgtgtggcaagtgctcaaagagaatggccctatggcaagcgatccgctctgtttgacttacagctacctttcacacgttgacctcgtcaaggacctcaactccgggttgattggagccttgttggtatgcagggaaggatctcttgccaaagagaagacacagaccctccacaagtttatccttctctttgctgtgttcgatgagggcaaaagttggcatagcgaaacgaagaattccctcatgcaggatcgcgacgcagccagcgccagagcttggcccaagatgcacactgtgaacggatatgtcaataggtcacttcctggcttgattgggtgtcatcggaaaagtgtctactggcacgtgatcggaatggggacaacaccagaggtccactccatatttctcgaaggccataccttccttgttcgaaaccacagacaggcatccttggagatctctcccattacctttctcactgcccaaacgctccttatggacttgggtcagttccttctcttctgccatatcagctcacaccagcatgatggtatggaagcttatgtgaaagtcgacagttgtcctgaggagccacagttgcgcatgaagaataatgaagaagccgaggattacgacgacgatctcaccgattctgagatggacgtggtgaggtttgatgacgacaactctccctcccaaattcaaatccggagcgtggcgaagaaacaccccaagacttgggtccactatatagcggcggaagaggaggattgggattacgctcctcttgtattggcaccagatgaccgctcatacaaaagccagtacctcaacaacggaccgcagagaattggccggaagtataagaaagtgcgatttatggcctatacagacgaaacctttaagacaagggaggccatccagcatgagagtgggattttgggacctcttctttacggcgaagttggtgataccctcctcatcatcttcaagaatcaagcttctcgcccctataacatttacccacacgggatcactgacgttaggcctttgtatagcagaagacttcccaaaggcgtgaagcatctcaaagacttccccattttgccaggcgagatctttaagtacaaatggaccgtcacagtggaagatggaccgactaaatcagaccctcgatgccttacgcggtactattcctccttcgtgaatatggagagagatttggcaagcggactcataggaccactcctcatctgttacaaggaatctgtagaccagaggggtaaccagattatgagtgataaacgcaatgtgatcctttttagcgtcttcgacgagaaccggtcctggtacttgaccgagaatatacaaaggttccttcccaaccccgcaggcgttcagttggaagaccctgagtttcaggccagcaatattatgcactcaatcaacggctatgtgtttgatagtctccagctttctgtttgcctccatgaagtagcctattggtacatcttgtcaattggtgctcaaacagacttcctctccgtcttcttctccggctacacctttaagcacaagatggtgtatgaggacactctcacactctttccattttctggagaaaccgtgttcatgagcatggagaatccaggcctttggatcttgggttgccacaacagtgattttcgcaatcggggaatgactgctctcctcaaagtcagcagctgtgataagaacacaggcgactattacgaagattcttacgaggacataagtgcctatttgttgtccaagaataacgccattgagcccagatcattctcccagaatcctcccgtgcttaaaaggcatcagcgcgaaatcaccagaactactcttcagtctgatcaagaggagattgactatgacgacaccataagcgtggaaatgaagaaggaggatttcgatatctatgacgaagatgagaaccagtctccgcggagctttcagaagaagacgcgacactacttcattgcagcagtcgaaaggctttgggactacggtatgtcatcatcccctcatgtgttgcgcaatagagctcagagtggaagtgttccacagttcaagaaagtcgtctttcaagagtttacagatggcagcttcacacagcctctctatcggggcgagcttaacgaacatttgggactccttggtccctatatccgagccgaagtggaggacaacattatggttacctttaggaatcaagcctctcgcccctacagcttctactcctccctcatcagttatgaggaggatcagagacaaggcgctgaaccacggaagaactttgtgaaaccgaatgagacgaagacctacttctggaaagtacagcaccacatggcccccacaaaagacgaattcgattgcaaagcatgggcgtatttttcagacgttgacttggagaaagatgtacattcaggacttattggtcctttgttggtgtgtcacactaacactctcaatccagcccatggcaggcaggtgacagtccaggaattcgctcttttctttaccatctttgatgagaccaagtcctggtacttcacggaaaacatggagcgcaattgcagagccccctgtaacatacagatggaggaccctacctttaaggaaaattatcggttccacgcaatcaacggatacattatggatacactccctggccttgtgatggctcaggaccaacgaatcaggtggtacctcctcagcatgggttctaatgagaacatacactccattcacttttcaggacatgtgttcactgtccggaagaaagaagagtataagatggccctctacaatttgtatccaggcgtgtttgagaccgttgaaatgcttccctctaaagctggcatctggagagtagagtgcttgatcggagaacatcttcacgcaggtatgagcaccttgttcctcgtgtacagcaacaaatgtcagaccccacttggcatggccagtggacacattcgcgactttcagatcacagcatctggccagtatggacaatgggccccaaagttggctcgcctccattactccggtagcataaatgcgtggtccactaaagaacctttcagctggattaaggtcgatcttcttgcccccatgatcatccacggcattaagacacagggagcgaggcagaaattctcctccctctacatctcacagttcattattatgtatagtttggacggcaagaagtggcaaacttatagaggtaacagtactggaacactcatggtgttcttcggcaacgttgatagctctggcatcaaacacaacatctttaatcctcccataatagctcggtacatcagattgcatccgacccactacagcattaggagtacactccgaatggagcttatgggttgcgacttgaattcctgttcaatgccactcggaatggagtctaaagccatctctgatgcacagataaccgccagtagctactttacgaacatgtttgctacgtggtcaccctctaaggcaaggcttcatttgcaaggccggtctaatgcctggagacctcaggtgaacaacccgaaagaatggctccaggtggactttcagaagaccatgaaagtaacaggtgtcactactcagggagttaagtccttggataccagcatgtatgtgaaggagttccttatttcctcatcacaagatggccaccagtggaccctcttctttcagaatggtaaggtcaaagtgtttcagggcaatcaagacagcttcacacccgtggtgaacagtcttgatcctccactcttgacacgataccttcgaatccatccacagtcttgggagcaccagattgcattgcgcatggaagtacttggatgcgaggctcaggacctctac

SEQ ID NO: 684 - protein, 1457 aa, synthetic construct
  REGION 1..1457: note = Variant of human B-domain deleted Factor VIII
MQIELSTCFFLCLLRFCFSATRRYYLGAVELSWDYMQSDLGELPVDARFPPRVPKSFPFNTSVVYKKTLFVEFTDHLFNIAKPRPPWMGLLGPTIQAEVYDTVVITLKNMASHPVSLHAVGVSYWKASEGAEYDDQTSQREKEDDKVFPGGSHTYVWQVLKENGPMASDPLCLTYSYLSHVDLVKDLNSGLIGALLVCREGSLAKEKTQTLHKFILLFAVFDEGKSWHSETKNSLMQDRDAASARAWPKMHTVNGYVNRSLPGLIGCHRKSVYWHVIGMGTTPEVHSIFLEGHTFLVRNHRQASLEISPITFLTAQTLLMDLGQFLLFCHISSHQHDGMEAYVKVDSCPEEPQLRMKNNEEAEDYDDDLTDSEMDVVRFDDDNSPSQIQIRSVAKKHPKTWVHYIAAEEEDWDYAPLVLAPDDRSYKSQYLNNGPQRIGRKYKKVRFMAYTDETFKTREAIQHESGILGPLLYGEVGDTLLIIFKNQASRPYNIYPHGITDVRPLYSRRLPKGVKHLKDFPILPGEIFKYKWTVTVEDGPTKSDPRCLTRYYSSFVNMERDLASGLIGPLLICYKESVDQRGNQIMSDKRNVILFSVFDENRSWYLTENIQRFLPNPAGVQLEDPEFQASNIMHSINGYVFDSLQLSVCLHEVAYWYILSIGAQTDFLSVFFSGYTFKHKMVYEDTLTLFPFSGETVFMSMENPGLWILGCHNSDFRNRGMTALLKVSSCDKNTGDYYEDSYEDISAYLLSKNNAIEPRSFSQNPPVLKRHQREITRTTLQSDQEEIDYDDTISVEMKKEDFDIYDEDENQSPRSFQKKTRHYFIAAVERLWDYGMSSSPHVLRNRAQSGSVPQFKKVVFQEFTDGSFTQPLYRGELNEHLGLLGPYIRAEVEDNIMVTFRNQASRPYSFYSSLISYEEDQRQGAEPRKNFVKPNETKTYFWKVQHHMAPTKDEFDCKAWAYFSDVDLEKDVHSGLIGPLLVCHTNTLNPAHGRQVTVQEFALFFTIFDETKSWYFTENMERNCRAPCNIQMEDPTFKENYRFHAINGYIMDTLPGLVMAQDQRIRWYLLSMGSNENIHSIHFSGHVFTVRKKEEYKMALYNLYPGVFETVEMLPSKAGIWRVECLIGEHLHAGMSTLFLVYSNKCQTPLGMASGHIRDFQITASGQYGQWAPKLARLHYSGSINAWSTKEPFSWIKVDLLAPMIIHGIKTQGARQKFSSLYISQFIIMYSLDGKKWQTYRGNSTGTLMVFFGNVDSSGIKHNIFNPPIIARYIRLHPTHYSIRSTLRMELMGCDLNSCSMPLGMESKAISDAQITASSYFTNMFATWSPSKARLHLQGRSNAWRPQVNNPKEWLQVDFQKTMKVTGVTTQGVKSLDTSMYVKEFLISSSQDGHQWTLFFQNGKVKVFQGNQDSFTPVVNSLDPPLLTRYLRIHPQSWEHQIALRMEVLGCEAQDLY

SEQ ID NO: 685 - DNA, 4371 bp, synthetic construct
  misc_feature 1..4371: note = Variant of human B-domain deleted Factor VIII
  source 1..4371: mol_type = other DNA
atgcagattgaactgtctacctgcttcttcctctgtttgctgaggttctgctttagcgccactagacggtactaccttggcgctgtggagctgtcctgggactatatgcagagtgatttgggagagcttcccgtcgacgcacgatttcctcctcgcgttccaaagtcatttcccttcaacacaagcgtggtgtacaagaagacgctcttcgtcgaattcaccgatcacctgttcaatatcgccaaacccagaccaccatggatgggtcttttggggcctaccatacaagcggaggtgtatgacacagttgttatcactctcaagaacatggcttctcatccggtaagtcttcacgcagtgggcgtgtcctactggaaagcttcagaaggagccgagtatgatgatcagacatcccagagggagaaagaagacgacaaggtatttccaggtgggtctcatacctatgtgtggcaagtgctcaaagagaatggccctatggcaagcgatccgctctgtttgacttacagctacctttcacacgttgacctcgtcaaggacctcaactccgggttgattggagccttgttggtatgcagggaaggatctcttgccaaagagaagacacagaccctccacaagtttatccttctctttgctgtgttcgatgagggcaaaagttggcatagcgaaacgaagaattccctcatgcaggatcgcgacgcagccagcgccagagcttggcccaagatgcacactgtgaacggatatgtcaataggtcacttcctggcttgattgggtgtcatcggaaaagtgtctactggcacgtgatcggaatggggacaacaccagaggtccactccatatttctcgaaggccataccttccttgttcgaaaccacagacaggcatccttggagatctctcccattacctttctcactgcccaaacgctccttatggacttgggtcagttccttctcttctgccatatcagctcacaccagcatgatggtatggaagcttatgtgaaagtcgacagttgtcctgaggagccacagttgcgcatgaagaataatgaagaagccgaggattacgacgacgatctcaccgattctgagatggacgtggtgaggtttgatgacgacaactctccctccttcattcaaatccggagcgtggcgaagaaacaccccaagacttgggtccactatatagcggcggaagaggaggattgggattacgctcctcttgtattggcaccagatgaccgctcatacaaaagccagtacctcaacaacggaccgcagagaattggccggaagtataagaaagtgcgatttatggcctatacagacgaaacctttaagacaagggaggccatccagcatgagagtgggattttgggacctcttctttacggcgaagttggtgataccctcctcatcatcttcaagaatcaagcttctcgcccctataacatttacccacacgggatcactgacgttaggcctttgtatagcagaagacttcccaaaggcgtgaagcatctcaaagacttccccattttgccaggcgagatctttaagtacaaatggaccgtcacagtggaagatggaccgactaaatcagaccctcgatgccttacgcggtactattcctccttcgtgaatatggagagagatttggcaagcggactcataggaccactcctcatctgttacaaggaatctgtagaccagaggggtaaccagattatgagtgataaacgcaatgtgatcctttttagcgtcttcgacgagaaccggtcctggtacttgaccgagaatatacaaaggttccttcccaaccccgcaggcgttcagttggaagaccctgagtttcaggccagcaatattatgcactcaatcaacggctatgtgtttgatagtctccagctttctgtttgcctccatgaagtagcctattggtacatcttgtcaattggtgctcaaacagacttcctctccgtcttcttctccggctacacctttaagcacaagatggtgtatgaggacactctcacactctttccattttctggagaaaccgtgttcatgagcatggagaatccaggcctttggatcttgggttgccacaacagtgattttcgcaatcggggaatgactgctctcctcaaagtcagcagctgtgataagaacacaggcgactattacgaagattcttacgaggacataagtgcctacttgttgtccaagaataacgccattgagcccagatcattctcccagaatcctcccgtgcttaaaaggcatcagcgcgaaatcaccagaactactcttcagtctgatcaagaggagattgactatgacgacaccataagcgtggaaatgaagaaggaggatttcgatatctatgacgaagatgagaaccagtctccgcggagctttcagaagaagacgcgacactacttcattgcagcagtcgaaaggctttgggactacggtatgtcatcatcccctcatgtgttgcgcaatagagctcagagtggaagtgttccacagttcaagaaagtcgtctttcaagagtttacagatggcagcttcacacagcctctctatcggggcgagcttaacgaacatttgggactccttggtccctatatccgagccgaagtggaggacaacattatggttacctttaggaatcaagcctctcgcccctacagcttctactcctccctcatcagttatgaggaggatcagagacaaggcgctgaaccacggaagaactttgtgaaaccgaatgagacgaagacctacttctggaaagtacagcaccacatggcccccacaaaagacgaattcgattgcaaagcatgggcgtatttttcagacgttgacttggagaaagatgtacattcaggacttattggtcctttgttggtgtgtcacactaacactctcaatccagcccatggcaggcaggtgacagtccaggaattcgctcttttctttaccatctttgatgagaccaagtcctggtacttcacggaaaacatggagcgcaattgcagagccccctgtaacatacagatggaggaccctaccaacaaggaaaattatcggttccacgcaatcaacggatacattatggatacactccctggccttgtgatggctcaggaccaacgaatcaggtggtacctcctcagcatgggttctaatgagaacatacactccattcacttttcaggacatgtgttcactgtccggaagaaagaagagtataagatggccctctacaatttgtatccaggcgtgtttgagaccgttgaaatgcttccctctaaagctggcatctggagagtagagtgcttgatcggagaacatcttcacgcaggtatgagcaccttgttcctcgtgtacagcaacaaatgtcagaccccacttggcatggccagtggacacattcgcgactttcagatcacagcatctggccagtatggacaatgggccccaaagttggctcgcctccattactccggtagcataaatgcgtggtccactaaagaacctttcagctggattaaggtcgatcttcttgcccccatgatcatccacggcattaagacacagggagcgaggcagaaattctcctccctctacatctcacagttcattattatgtatagtttggacggcaagaagtggcaaacttatagaggtaacagtactggaacactcatggtgttcttcggcaacgttgatagctctggcatcaaacacaacatctttaatcctcccataatagctcggtacatcagattgcatccgacccactacagcattaggagtacactccgaatggagcttatgggttgcgacttgaattcctgttcaatgccactcggaatggagtctaaagccatctctgatgcacagataaccgccagtagctactttacgaacatgtttgctacgtggtcaccctctaaggcaaggcttcatttgcaaggccggtctaatgcctggagacctcaggtgaacaacccgaaagaatggctccaggtggactttcagaagaccatgaaagtaacaggtgtcactactcagggagttaagtccttggataccagcatgtatgtgaaggagttccttatttcctcatcacaagatggccaccagtggaccctcttctttcagaatggtaaggtcaaagtgtttcagggcaatcaagacagcttcacacccgtggtgaacagtcttgatcctccactcttgacacgataccttcgaatccatccacagtcttgggagcaccagattgcattgcgcatggaagtacttggatgcgaggctcaggacctctac

SEQ ID NO: 686 - protein, 1457 aa, synthetic construct
  REGION 1..1457: note = Variant of human B-domain deleted Factor VIII
MQIELSTCFFLCLLRFCFSATRRYYLGAVELSWDYMQSDLGELPVDARFPPRVPKSFPFNTSVVYKKTLFVEFTDHLFNIAKPRPPWMGLLGPTIQAEVYDTVVITLKNMASHPVSLHAVGVSYWKASEGAEYDDQTSQREKEDDKVFPGGSHTYVWQVLKENGPMASDPLCLTYSYLSHVDLVKDLNSGLIGALLVCREGSLAKEKTQTLHKFILLFAVFDEGKSWHSETKNSLMQDRDAASARAWPKMHTVNGYVNRSLPGLIGCHRKSVYWHVIGMGTTPEVHSIFLEGHTFLVRNHRQASLEISPITFLTAQTLLMDLGQFLLFCHISSHQHDGMEAYVKVDSCPEEPQLRMKNNEEAEDYDDDLTDSEMDVVRFDDDNSPSFIQIRSVAKKHPKTWVHYIAAEEEDWDYAPLVLAPDDRSYKSQYLNNGPQRIGRKYKKVRFMAYTDETFKTREAIQHESGILGPLLYGEVGDTLLIIFKNQASRPYNIYPHGITDVRPLYSRRLPKGVKHLKDFPILPGEIFKYKWTVTVEDGPTKSDPRCLTRYYSSFVNMERDLASGLIGPLLICYKESVDQRGNQIMSDKRNVILFSVFDENRSWYLTENIQRFLPNPAGVQLEDPEFQASNIMHSINGYVFDSLQLSVCLHEVAYWYILSIGAQTDFLSVFFSGYTFKHKMVYEDTLTLFPFSGETVFMSMENPGLWILGCHNSDFRNRGMTALLKVSSCDKNTGDYYEDSYEDISAYLLSKNNAIEPRSFSQNPPVLKRHQREITRTTLQSDQEEIDYDDTISVEMKKEDFDIYDEDENQSPRSFQKKTRHYFIAAVERLWDYGMSSSPHVLRNRAQSGSVPQFKKVVFQEFTDGSFTQPLYRGELNEHLGLLGPYIRAEVEDNIMVTFRNQASRPYSFYSSLISYEEDQRQGAEPRKNFVKPNETKTYFWKVQHHMAPTKDEFDCKAWAYFSDVDLEKDVHSGLIGPLLVCHTNTLNPAHGRQVTVQEFALFFTIFDETKSWYFTENMERNCRAPCNIQMEDPTNKENYRFHAINGYIMDTLPGLVMAQDQRIRWYLLSMGSNENIHSIHFSGHVFTVRKKEEYKMALYNLYPGVFETVEMLPSKAGIWRVECLIGEHLHAGMSTLFLVYSNKCQTPLGMASGHIRDFQITASGQYGQWAPKLARLHYSGSINAWSTKEPFSWIKVDLLAPMIIHGIKTQGARQKFSSLYISQFIIMYSLDGKKWQTYRGNSTGTLMVFFGNVDSSGIKHNIFNPPIIARYIRLHPTHYSIRSTLRMELMGCDLNSCSMPLGMESKAISDAQITASSYFTNMFATWSPSKARLHLQGRSNAWRPQVNNPKEWLQVDFQKTMKVTGVTTQGVKSLDTSMYVKEFLISSSQDGHQWTLFFQNGKVKVFQGNQDSFTPVVNSLDPPLLTRYLRIHPQSWEHQIALRMEVLGCEAQDLY

SEQ ID NO: 687 - DNA, 4371 bp, synthetic construct
  misc_feature 1..4371: note = Variant of human B-domain deleted Factor VIII
  source 1..4371: mol_type = other DNA
atgcagattgaactgtctacctgcttcttcctctgtttgctgaggttctgctttagcgccactagacggtactaccttggcgctgtggagctgtcctgggactatatgcagagtgatttgggagagcttcccgtcgacgcacgatttcctcctcgcgttccaaagtcatttcccttcaacacaagcgtggtgtacaagaagacgctcttcgtcgaattcaccgatcacctgttcaatatcgccaaacccagaccaccatggatgggtcttttggggcctaccatacaagcggaggtgtatgacacagttgttatcactctcaagaacatggcttctcatccggtaagtcttcacgcagtgggcgtgtcctactggaaagcttcagaaggagccgagtatgatgatcagacatcccagagggagaaagaagacgacaaggtatttccaggtgggtctcatacctatgtgtggcaagtgctcaaagagaatggccctatggcaagcgatccgctctgtttgacttacagctacctttcacacgttgacctcgtcaaggacctcaactccgggttgattggagccttgttggtatgcagggaaggatctcttgccaaagagaagacacagaccctccacaagtttatccttctctttgctgtgttcgatgagggcaaaagttggcatagcgaaacgaagaattccctcatgcaggatcgcgacgcagccagcgccagagcttggcccaagatgcacactgtgaacggatatgtcaataggtcacttcctggcttgattgggtgtcatcggaaaagtgtctactggcacgtgatcggaatggggacaacaccagaggtccactccatatttctcgaaggccataccttccttgttcgaaaccacagacaggcatccttggagatctctcccattacctttctcactgcccaaacgctccttatggacttgggtcagttccttctcttctgccatatcagctcacaccagcatgatggtatggaagcttatgtgaaagtcgacagttgtcctgaggagccacagttgcgcatgaagaataatgaagaagccgaggattacgacgacgatctcaccgattctgagatggacgtggtgaggtttgatgacgacaactctccctcccgcattcaaatccggagcgtggcgaagaaacaccccaagacttgggtccactatatagcggcggaagaggaggattgggattacgctcctcttgtattggcaccagatgaccgctcatacaaaagccagtacctcaacaacggaccgcagagaattggccggaagtataagaaagtgcgatttatggcctatacagacgaaacctttaagacaagggaggccatccagcatgagagtgggattttgggacctcttctttacggcgaagttggtgataccctcctcatcatcttcaagaatcaagcttctcgcccctataacatttacccacacgggatcactgacgttaggcctttgtatagcagaagacttcccaaaggcgtgaagcatctcaaagacttccccattttgccaggcgagatctttaagtacaaatggaccgtcacagtggaagatggaccgactaaatcagaccctcgatgccttacgcggtactattcctccttcgtgaatatggagagagatttggcaagcggactcataggaccactcctcatctgttacaaggaatctgtagaccagaggggtaaccagattatgagtgataaacgcaatgtgatcctttttagcgtcttcgacgagaaccggtcctggtacttgaccgagaatatacaaaggttccttcccaaccccgcaggcgttcagttggaagaccctgagtttcaggccagcaatattatgcactcaatcaacggctatgtgtttgatagtctccagctttctgtttgcctccatgaagtagcctattggtacatcttgtcaattggtgctcaaacagacttcctctccgtcttcttctccggctacacctttaagcacaagatggtgtatgaggacactctcacactctttccattttctggagaaaccgtgttcatgagcatggagaatccaggcctttggatcttgggttgccacaacagtgattttcgcaatcggggaatgactgctctcctcaaagtcagcagctgtgataagaacacaggcgactattacgaagattcttacgaggacataagtgcctacttgttgtccaagaataacgccattgagcccagatcattctcccagaatcctcccgtgcttaaaaggcatcagcgcgaaatcaccagaactactcttcagtctgatcaagaggagattgactatgacgacaccataagcgtggaaatgaagaaggaggatttcgatatctatgacgaagatgagaaccagtctccgcggagctttcagaagaagacgcgacactacttcattgcagcagtcgaaaggctttgggactacggtatgtcatcatcccctcatgtgttgcgcaatagagctcagagtggaagtgttccacagttcaagaaagtcgtctttcaagagtttacagatggcagcttcacacagcctctctatcggggcgagcttaacgaacatttgggactccttggtccctatatccgagccgaagtggaggacaacattatggttacctttaggaatcaagcctctcgcccctacagcttctactcctccctcatcagttatgaggaggatcagagacaaggcgctgaaccacggaagaactttgtgaaaccgaatgagacgaagacctacttctggaaagtacagcaccacatggcccccacaaaagacgaattcgattgcaaagcatgggcgtatttttcagacgttgacttggagaaagatgtacattcaggacttattggtcctttgttggtgtgtcacactaacactctcaatccagcccatggcaggcaggtgacagtccaggaattcgctcttttctttaccatctttgatgagaccaagtcctggtacttcacggaaaacatggagcgcaattgcagagccccctgtaacatacagatggaggaccctacctttaaggaaaattatcggttccacgcaatcaacggatacattatggatacactccctggccttgtgatggctcaggaccaacgaatcaggtggtacctcctcagcatgggttctaatgagaacatacactccattcacttttcaggacatgtgttcactgtccggaagaaagaagagtataagatggccctctacaatttgtatccaggcgtgtttgagaccgttgaaatgcttccctctaaagctggcatctggagagtagagtgcttgatcggagaacatcttcacgcaggtatgagcaccttgttcctcgtgtacagcaacaaatgtcagaccccacttggcatggccagtggacacattcgcgactttcagatcacagcatctggccagtatggacaatgggccccaaagttggctcgcctccattactccggtagcataaatgcgtggtccactaaagaacctttcagctggattaaggtcgatcttcttgcccccatgatcatccacggcattaagacacagggagcgaggcagaaattctcctcgctctacatctcacagttcattattatgtatagtttggacggcaagaagtggcaaacttatagaggtaacagtactggaacactcatggtgttcttcggcaacgttgatagctctggcatcaaacacaacatctttaatcctcccataatagctcggtacatcagattgcatccgacccactacagcattaggagtacactccgaatggagcttatgggttgcgacttgaattcctgttcaatgccactcggaatggagtctaaagccatctctgatgcacagataaccgccagtagctactttacgaacatgtttgctacgtggtcaccctctaaggcaaggcttcatttgcaaggccggtctaatgcctggagacctcaggtgaacaacccgaaagaatggctccaggtggactttcagaagaccatgaaagtaacaggtgtcactactcagggagttaagtccttggataccagcatgtatgtgaaggagttccttatttcctcatcacaagatggccaccagtggaccctcttctttcagaatggtaaggtcaaagtgtttcagggcaatcaagacagcttcacacccgtggtgaacagtcttgatcctccactcttgacacgataccttcgaatccatccacagtcttgggagcaccagattgcattgcgcatggaagtacttggatgcgaggctcaggacctctac

SEQ ID NO: 688 - protein, 1457 aa, synthetic construct
  REGION 1..1457: note = Variant of human B-domain deleted Factor VIII
MQIELSTCFFLCLLRFCFSATRRYYLGAVELSWDYMQSDLGELPVDARFPPRVPKSFPFNTSVVYKKTLFVEFTDHLFNIAKPRPPWMGLLGPTIQAEVYDTVVITLKNMASHPVSLHAVGVSYWKASEGAEYDDQTSQREKEDDKVFPGGSHTYVWQVLKENGPMASDPLCLTYSYLSHVDLVKDLNSGLIGALLVCREGSLAKEKTQTLHKFILLFAVFDEGKSWHSETKNSLMQDRDAASARAWPKMHTVNGYVNRSLPGLIGCHRKSVYWHVIGMGTTPEVHSIFLEGHTFLVRNHRQASLEISPITFLTAQTLLMDLGQFLLFCHISSHQHDGMEAYVKVDSCPEEPQLRMKNNEEAEDYDDDLTDSEMDVVRFDDDNSPSRIQIRSVAKKHPKTWVHYIAAEEEDWDYAPLVLAPDDRSYKSQYLNNGPQRIGRKYKKVRFMAYTDETFKTREAIQHESGILGPLLYGEVGDTLLIIFKNQASRPYNIYPHGITDVRPLYSRRLPKGVKHLKDFPILPGEIFKYKWTVTVEDGPTKSDPRCLTRYYSSFVNMERDLASGLIGPLLICYKESVDQRGNQIMSDKRNVILFSVFDENRSWYLTENIQRFLPNPAGVQLEDPEFQASNIMHSINGYVFDSLQLSVCLHEVAYWYILSIGAQTDFLSVFFSGYTFKHKMVYEDTLTLFPFSGETVFMSMENPGLWILGCHNSDFRNRGMTALLKVSSCDKNTGDYYEDSYEDISAYLLSKNNAIEPRSFSQNPPVLKRHQREITRTTLQSDQEEIDYDDTISVEMKKEDFDIYDEDENQSPRSFQKKTRHYFIAAVERLWDYGMSSSPHVLRNRAQSGSVPQFKKVVFQEFTDGSFTQPLYRGELNEHLGLLGPYIRAEVEDNIMVTFRNQASRPYSFYSSLISYEEDQRQGAEPRKNFVKPNETKTYFWKVQHHMAPTKDEFDCKAWAYFSDVDLEKDVHSGLIGPLLVCHTNTLNPAHGRQVTVQEFALFFTIFDETKSWYFTENMERNCRAPCNIQMEDPTFKENYRFHAINGYIMDTLPGLVMAQDQRIRWYLLSMGSNENIHSIHFSGHVFTVRKKEEYKMALYNLYPGVFETVEMLPSKAGIWRVECLIGEHLHAGMSTLFLVYSNKCQTPLGMASGHIRDFQITASGQYGQWAPKLARLHYSGSINAWSTKEPFSWIKVDLLAPMIIHGIKTQGARQKFSSLYISQFIIMYSLDGKKWQTYRGNSTGTLMVFFGNVDSSGIKHNIFNPPIIARYIRLHPTHYSIRSTLRMELMGCDLNSCSMPLGMESKAISDAQITASSYFTNMFATWSPSKARLHLQGRSNAWRPQVNNPKEWLQVDFQKTMKVTGVTTQGVKSLDTSMYVKEFLISSSQDGHQWTLFFQNGKVKVFQGNQDSFTPVVNSLDPPLLTRYLRIHPQSWEHQIALRMEVLGCEAQDLY

SEQ ID NO: 689 - DNA, 4371 bp, synthetic construct
  misc_feature 1..4371: note = Variant of human B-domain deleted Factor VIII
  source 1..4371: mol_type = other DNA
atgcagattgaactgtctacctgcttcttcctctgtttgctgaggttctgctttagcgccactagacggtactaccttggcgctgtggagctgtcctgggactatatgcagagtgatttgggagagcttcccgtcgacgcacgatttcctcctcgcgttccaaagtcatttcccttcaacacaagcgttgtgtacaagaagacgctcttcgtcgaattcaccgatcacctgttcaatatcgccaaacccagaccaccatggatgggtcttttggggcctaccatacaagcggaggtgtatgacacagttgttatcactctcaagaacatggcttctcatccggtaagtcttcacgcagtgggcgtgtcctactggaaagcttcagaaggagccgagtatgatgatcagacatcccagagggagaaagaagacgacaaggtatttccaggtgggtctcatacctatgtgtggcaagtgctcaaagagaatggccctatggcaagcgatccgctctgtttgacttacagctacctttcacacgttgacctcgtcaaggacctcaactccgggttgattggagccttgttggtatgcagggaaggatctcttgccaaagagaagacacagaccctccacaagtttatccttctctttgctgtgttcgatgagggcaaaagttggcatagcgaaacgaagaattccctcatgcaggatcgcgacgcagccagcgccagagcttggcccaagatgcacactgtgaacggatatgtcaataggtcacttcctggcttgattgggtgtcatcggaaaagtgtctactggcacgtgatcggaatggggacaacaccagaggtccactccatatttctcgaaggccataccttccttgttcgaaaccacagacaggcatccttggggatctctcccattacctttctcactgcccaaacgctccttatggacttgggtcagttccttctcttctgccatatcagctcacaccagcatgatggtatggaagcttatgtgaaagtcgacagttgtcctgaggagccacagttgcgcatgaagaataatgaagaagccgaggattacgacgacgatctcaccgattctgagatggacgtggtgaggtttgatgacgacaactctccctccttcattcaaatccggagcgtggcgaagaaacaccccaagacttgggtccactatatagcggcggaagaggaggattgggattacgctcctcttgtattggcaccagatgaccgctcatacaaaagccagtacctcaacaacggaccgcagagaattggccggaagtataagaaagtgcgatttatggcctatacagacgaaacctttaagacaagggaggccatccagcatgagagtgggattttgggacctcttctttacggcgaagttggtgataccctcctcatcatcttcaagaatcaagcttctcgcccctataacatttacccacacgggatcactgacgttaggcctttgtatagcagaagacttcccaaaggcgtgaagcatctcaaagacttccccattttgccaggcgagatctttaagtacaaatggaccgtcacagtggaagatggaccgactaaatcagaccctcgatgccttacgcggtactattcctccttcgtgaatatggagagagatttggcaagcggactcataggaccactcctcatctgttacaaggaatctgtagaccagaggggtaaccagattatgagtgataaacgcaatgtgatcctttttagcgtcttcgacgagaaccggtcctggtacttgaccgagaatatacaaaggttccttcccaaccccgcaggcgttcagttggaagaccctgagtttcaggccagcaatattatgcactcaatcaacggctatgtgtttgatagtctccagctttctgtttgcctccatgaagtagcctattggtacatcttgtcaattggtgctcaaacagacttcctctccgtcttcttctccggctacacctttaagcacaagatggtgtatgaggacactctcacactctttccattttctggagaaaccgtgttcatgagcatggagaatccaggcctttggatcttgggttgccacaacagtgattttcgcaatcggggaatgactgctctcctcaaagtcagcagctgtgataagaacacaggcgactattacgaagattcttacgaggacataagtgcctactttttgtccaagaataacgccattgagcccagatcattctcccagaatcctcccgtgcttaaaaggcatcagcgcgaaatcaccagaactactcttcagtctgatcaagaggagattgactatgacgacaccataagcgtggaaatgaagaaggaggatttcgatatctatgacgaagatgagaaccagtctccgcggagctttcagaagaagacgcgacactacttcattgcagcagtcgaaaggctttgggactacggtatgtcatcatcccctcatgtgttgcgcaatagagctcagagtggaagtgttccacagttcaagaaagtcgtctttcaagagtttacagatggcagcttcacacagcctctctatcggggcgagcttaacgaacatttgggactccttggtccctatatccgagccgaagtggaggacaacattatggttacctttaggaatcaagcctctcgcccctacagcttctactcctccctcatcagttatgaggaggatcagagacaaggcgctgaaccacggaagaactttgtgaaaccgaatgagacgaagacctacttctggaaagtacagcaccacatggcccccacaaaagacgaattcgattgcaaagcatgggcgtatttttcagacgttgacttggagaaagatgtacattcaggacttattggtcctttgttggtgtgtcacactaacactctcaatccagcccatggcaggcaggtgacagtccaggaattcgctcttttctttaccatctttgatgagaccaagtcctggtacttcacggaaaacatggagcgcaattgcagagccccctgtaacatacagatggaggaccctaccttcaaggaaaattatcggttccacgcaatcaacggatacattatggatacactccctggccttgtgatggctcaggaccaacgaatcaggtggtacctcctcagcatgggttctaatgagaacatacactccattcacttttcaggacatgtgttcactgtccggaagaaagaagagtataagatggccctctacaatttgtatccaggcgtgtttgagaccgttgaaatgcttccctctaaagctggcatctggagagtagagtgcttgatcggagaacatcttcacgcaggtatgagcaccttgttcctcgtgtacagcaacaaatgtcagaccccacttggcatggccagtggacacattcgcgactttcagatcacagcatctggccagtatggacaatgggccccaaagttggctcgcctccattactccggtagcataaatgcgtggtccactaaagaacctttcagctggattaaggtcgatcttcttgcccccatgatcatccacggcattaagacacagggagcgaggcagaaattctcctccctctacatctcacagttcattattatgtatagtttggacggcaagaagtggcaaacttatagaggtaacagtactggaacactcatggtgttcttcggcaacgttgatagctctggcatcaaacacaacatctttaatcctcccataatagctcggtacatcagattgcatccgacccactacagcattaggagtacactccgaatggagcttatgggttgcgacttgaattcctgttcaatgccactcggaatggagtctaaagccatctctgatgcacagataaccgccagtagctactttacgaacatgtttgctacgtggtcaccctctaaggcaaggcttcatttgcaaggccggtctaatgcctggagacctcaggtgaacaacccgaaagaatggctccaggtggactttcagaagaccatgaaagtaacaggtgtcactactcagggagttaagtccttggataccagcatgtatgtgaaggagttccttatttcctcatcacaagatggccaccagtggaccctcttctttcagaatggtaaggtcaaagtgtttcagggcaatcaagacagcttcacacccgtggtgaacagtcttgatcctccactcttgacacgataccttcgaatccatccacagtcttgggagcaccagattgcattgcgcatggaagtacttggatgcgaggctcaggacctctac

SEQ ID NO: 690 - protein, 1457 aa, synthetic construct
  REGION 1..1457: note = Variant of human B-domain deleted Factor VIII
MQIELSTCFFLCLLRFCFSATRRYYLGAVELSWDYMQSDLGELPVDARFPPRVPKSFPFNTSVVYKKTLFVEFTDHLFNIAKPRPPWMGLLGPTIQAEVYDTVVITLKNMASHPVSLHAVGVSYWKASEGAEYDDQTSQREKEDDKVFPGGSHTYVWQVLKENGPMASDPLCLTYSYLSHVDLVKDLNSGLIGALLVCREGSLAKEKTQTLHKFILLFAVFDEGKSWHSETKNSLMQDRDAASARAWPKMHTVNGYVNRSLPGLIGCHRKSVYWHVIGMGTTPEVHSIFLEGHTFLVRNHRQASLGISPITFLTAQTLLMDLGQFLLFCHISSHQHDGMEAYVKVDSCPEEPQLRMKNNEEAEDYDDDLTDSEMDVVRFDDDNSPSFIQIRSVAKKHPKTWVHYIAAEEEDWDYAPLVLAPDDRSYKSQYLNNGPQRIGRKYKKVRFMAYTDETFKTREAIQHESGILGPLLYGEVGDTLLIIFKNQASRPYNIYPHGITDVRPLYSRRLPKGVKHLKDFPILPGEIFKYKWTVTVEDGPTKSDPRCLTRYYSSFVNMERDLASGLIGPLLICYKESVDQRGNQIMSDKRNVILFSVFDENRSWYLTENIQRFLPNPAGVQLEDPEFQASNIMHSINGYVFDSLQLSVCLHEVAYWYILSIGAQTDFLSVFFSGYTFKHKMVYEDTLTLFPFSGETVFMSMENPGLWILGCHNSDFRNRGMTALLKVSSCDKNTGDYYEDSYEDISAYFLSKNNAIEPRSFSQNPPVLKRHQREITRTTLQSDQEEIDYDDTISVEMKKEDFDIYDEDENQSPRSFQKKTRHYFIAAVERLWDYGMSSSPHVLRNRAQSGSVPQFKKVVFQEFTDGSFTQPLYRGELNEHLGLLGPYIRAEVEDNIMVTFRNQASRPYSFYSSLISYEEDQRQGAEPRKNFVKPNETKTYFWKVQHHMAPTKDEFDCKAWAYFSDVDLEKDVHSGLIGPLLVCHTNTLNPAHGRQVTVQEFALFFTIFDETKSWYFTENMERNCRAPCNIQMEDPTFKENYRFHAINGYIMDTLPGLVMAQDQRIRWYLLSMGSNENIHSIHFSGHVFTVRKKEEYKMALYNLYPGVFETVEMLPSKAGIWRVECLIGEHLHAGMSTLFLVYSNKCQTPLGMASGHIRDFQITASGQYGQWAPKLARLHYSGSINAWSTKEPFSWIKVDLLAPMIIHGIKTQGARQKFSSLYISQFIIMYSLDGKKWQTYRGNSTGTLMVFFGNVDSSGIKHNIFNPPIIARYIRLHPTHYSIRSTLRMELMGCDLNSCSMPLGMESKAISDAQITASSYFTNMFATWSPSKARLHLQGRSNAWRPQVNNPKEWLQVDFQKTMKVTGVTTQGVKSLDTSMYVKEFLISSSQDGHQWTLFFQNGKVKVFQGNQDSFTPVVNSLDPPLLTRYLRIHPQSWEHQIALRMEVLGCEAQDLY

SEQ ID NO: 691 - DNA, 4371 bp, synthetic construct
  misc_feature 1..4371: note = Variant of human B-domain deleted Factor VIII
  source 1..4371: mol_type = other DNA
atgcagattgaactgtctacctgcttcttcctctgtttgctgaggttctgctttagcgccactagacggtactaccttggcgctgtggagctgtcctgggactatatgcagagtgatttgggagagcttcccgtcgacgcacgatttcctcctcgcgttccaaagtcatttcccttcaacacaagcgtggtgtacaagaagacgctcttcgtcgaattcaccgatcacctgttcaatatcgccaaacccagaccaccatggatgggtcttttggggcctaccatacaagcggaggtgtatgacacagttgttatcactctcaagaacatggcttctcatccggtaagtcttcacgcagtgggcgtgtcctactggaaagcttcagaaggagccgagtatgatgatcagacatcccagagggagaaagaagacgacaaggtatttccaggtgggtctcatacctatgtgtggcaagtgctcaaagagaatggccctatggcaagcgatccgctctgtttgacttacagctacctttcacacgttgacctcgtcaaggacctcaactccgggttgattggagccttgttggtatgcagggaaggatctcttgccaaagagaagacacagaccctccacaagtttatccttctctttgctgtgttcgatgagggcaaaagttggcatagcgaaacgaagaattccctcatgcaggatcgcgacgcagccagcgccagagcttggcccaagatgcacactgtgaacggatatgtcaataggtcacttcctggcttgattgggtgtcatcggaaaagtgtctactggcacgtgatcggaatggggacaacaccagaggtccactccatatttctcgaaggccataccttccttgttcgaaaccacagacaggcatccttggagatctctcccattacctttctcactgcccaaacgctccttatggacttgggtcagttccttctcttctgccatatcagctcacaccagcatgatggtatggaagcttatgtgaaagtcgacagttgtcctgaggagccacagttgcgcatgaagaataatgaagaagccgaggattacgacgacgatctcaccgattctgagatggacgtggtgaggtttgatgacgacaactctccctccttcattcaaatccggagcgtggcgaagaaacaccccaagacttgggtccactatatagcggcggaagaggaggattgggattacgctcctcttgtattggcaccagatgaccgctcatacaaaagccagtacctcaacaacggaccgcagagaattggccggaagtataagaaagtgcgatttatggcctatacagacgaaacctttaagacaagggaggccatccagcatgagagtgggattttgggacctcttctttacggcgaagttggtgataccctcctcatcatcttcaagaatcaagcttctcgcccctataacatttacccacacgggatcactgacgttaggcctttgtatagcagaagacttcccaaaggcgtgaagcatctcaaagacttccccattttgccaggcgagatctttaagtacaaatggaccgtcacagtggaagatggaccgactaaatcagaccctcgatgccttacgcggtactattcctccttcgtgaatatggagagagatttggcaagcggactcataggaccactcctcatctgttacaaggaatctgtagaccagaggggtaaccagattatgagtgataaacgcaatgtgatcctttttagcgtcttcgacgagaaccggtcctggtacttgaccgagaatatacaaaggttccttcccaaccccgcaggcgttcagttggaagaccctgagtttcaggccagcaatattatgcactcaatcaacggctatgtgtttgatagtctccagctttctgtttgcctccatgaagtagcctattggtacatcttgtcaattggtgctcaaacagacttcctctccgtcttcttctccggctacacctttaagcacaagatggtgtatgaggacactctcacactctttccattttctggagaaaccgtgttcatgagcatggagaatccaggcctttggatcttgggttgccacaacagtgattttcgcaatcggggaatgactgctctcctcaaagtcagcagctgtgataagaacacaggcgactattacgaagattcttacgaggacataagtgcctacttgttgtccaagaataacgccattgagcccagatcattctcccagaatcctcccgtgcttaaaaggcatcagcgcgaaatcaccagaactactcttcagtctgatcaagaggagattgactatgacgacaccataagcgtggaaatgaagaaggaggatttcgatatctatgacgaagatgagaaccagtctccgcggagctttcagaagaagacgcgacactacttcattgcagcagtcgaaaggctttgggactacggtatgtcatcatcccctcatgtgttgcgcaatagagctcagagtggaagtgttccacagttcaagaaagtcgtctttcaagagtttacagatggcagcttcacacagcctctctatcggggcgagcttaacgaacatttgggactccttggtccctatatccgagccgaagtggaggacaacattatggttacctttaggaatcaagcctctcgcccctacagcttctactcctccctcatcagttatgaggaggatcagagacaaggcgctgaaccacggaagaactttgtgaaaccgaatgagacgaagacctacttctggaaagtacagcaccacatggcccccacaaaagacgaattcgattgcaaagcatgggcgtatttttcagacgttgacttggagaaagatgtacattcaggacttattggtcctttgttggtgtgtcacactaacactctcaatccagcccatggcaggcaggtgacagtccaggaattcgctcttttctttaccatctttgatgagaccaagtcctggtacttcacggaaaacatggagcgcaattgcagagccccctgtaacatacagatggaggaccctacctttaaggaaaattatcggttccacgcaatcaacggatacattatggatacactccctggccttgtgatggctcaggaccaacgaatcaggtggtacctcctcagcatgggttctaatgagaacatacactccattcacttttcaggacatgtgttcactgtccggaagaaagaagagtataagatggccctctacaatttgtatccaggcgtgtttgagaccgttgaaatgcttccctctaaagctggcatctggagagtagagtgcttgatcggagaacatcttcacgcaggtatgagcaccttgttcctcgtgtacagcaacaaatgtcagaccccacttggcatggccagtggacacattcgcgactttcagatcacagcatctggccagtatggacaatgggccccaaagttggctcgcctccattactccggtagcataaatgcgtggtccactaaagaacctttcagctggattaaggtcgatcttcttgcccccatgatcatccacggcattaagacacagggagcgaggcagaaattctcctccctctacatctcacagttcattattatgtatagtttggacggcaagaagtggcaaacttatagaggtaacagtactggaacactcatggtgttcttcggcaacgttgatagctctggcatcaaacacaacatctttaatcctcccatagtggctcggtacatcagattgcatccgacccactacagcattaggagtacactccgaatggagcttatgggttgcgacttgaattcctgttcaatgccactcggaatggagtctaaagccatctctgatgcacagataaccgccagtagctactttacgaacatgtttgctacgtggtcaccctctaaggcaaggcttcatttgcaaggccggtctaatgcctggagacctcaggtgaacaacccgaaagaatggctccaggtggactttcagaagaccatgaaagtaacaggtgtcactactcagggagttaagtccttggataccagcatgtatgtgaaggagttccttatttcctcatcacaagatggccaccagtggaccctcttctttcagaatggtaaggtcaaagtgtttcagggcaatcaagacagcttcacacccgtggtgaacagtcttgatcctccactcttgacacgataccttcgaatccatccacagtcttgggagcaccagattgcattgcgcatggaagtacttggatgcgaggctcaggacctctac

SEQ ID NO: 692 - protein, 1457 aa, synthetic construct
  REGION 1..1457: note = Variant of human B-domain deleted Factor VIII
MQIELSTCFFLCLLRFCFSATRRYYLGAVELSWDYMQSDLGELPVDARFPPRVPKSFPFNTSVVYKKTLFVEFTDHLFNIAKPRPPWMGLLGPTIQAEVYDTVVITLKNMASHPVSLHAVGVSYWKASEGAEYDDQTSQREKEDDKVFPGGSHTYVWQVLKENGPMASDPLCLTYSYLSHVDLVKDLNSGLIGALLVCREGSLAKEKTQTLHKFILLFAVFDEGKSWHSETKNSLMQDRDAASARAWPKMHTVNGYVNRSLPGLIGCHRKSVYWHVIGMGTTPEVHSIFLEGHTFLVRNHRQASLEISPITFLTAQTLLMDLGQFLLFCHISSHQHDGMEAYVKVDSCPEEPQLRMKNNEEAEDYDDDLTDSEMDVVRFDDDNSPSFIQIRSVAKKHPKTWVHYIAAEEEDWDYAPLVLAPDDRSYKSQYLNNGPQRIGRKYKKVRFMAYTDETFKTREAIQHESGILGPLLYGEVGDTLLIIFKNQASRPYNIYPHGITDVRPLYSRRLPKGVKHLKDFPILPGEIFKYKWTVTVEDGPTKSDPRCLTRYYSSFVNMERDLASGLIGPLLICYKESVDQRGNQIMSDKRNVILFSVFDENRSWYLTENIQRFLPNPAGVQLEDPEFQASNIMHSINGYVFDSLQLSVCLHEVAYWYILSIGAQTDFLSVFFSGYTFKHKMVYEDTLTLFPFSGETVFMSMENPGLWILGCHNSDFRNRGMTALLKVSSCDKNTGDYYEDSYEDISAYLLSKNNAIEPRSFSQNPPVLKRHQREITRTTLQSDQEEIDYDDTISVEMKKEDFDIYDEDENQSPRSFQKKTRHYFIAAVERLWDYGMSSSPHVLRNRAQSGSVPQFKKVVFQEFTDGSFTQPLYRGELNEHLGLLGPYIRAEVEDNIMVTFRNQASRPYSFYSSLISYEEDQRQGAEPRKNFVKPNETKTYFWKVQHHMAPTKDEFDCKAWAYFSDVDLEKDVHSGLIGPLLVCHTNTLNPAHGRQVTVQEFALFFTIFDETKSWYFTENMERNCRAPCNIQMEDPTFKENYRFHAINGYIMDTLPGLVMAQDQRIRWYLLSMGSNENIHSIHFSGHVFTVRKKEEYKMALYNLYPGVFETVEMLPSKAGIWRVECLIGEHLHAGMSTLFLVYSNKCQTPLGMASGHIRDFQITASGQYGQWAPKLARLHYSGSINAWSTKEPFSWIKVDLLAPMIIHGIKTQGARQKFSSLYISQFIIMYSLDGKKWQTYRGNSTGTLMVFFGNVDSSGIKHNIFNPPIVARYIRLHPTHYSIRSTLRMELMGCDLNSCSMPLGMESKAISDAQITASSYFTNMFATWSPSKARLHLQGRSNAWRPQVNNPKEWLQVDFQKTMKVTGVTTQGVKSLDTSMYVKEFLISSSQDGHQWTLFFQNGKVKVFQGNQDSFTPVVNSLDPPLLTRYLRIHPQSWEHQIALRMEVLGCEAQDLY

SEQ ID NO: 693 - DNA, 4371 bp, synthetic construct
  misc_feature 1..4371: note = Variant of human B-domain deleted Factor VIII
  source 1..4371: mol_type = other DNA
atgcagattgaactgtctacctgcttcttcctctgtttgctgaggttctgctttagcgccactagacggtactaccttggcgctgtggagctgtcctgggactatatgcagagtgatttgggagagcttcccgtcgacgcacgatttcctcctcgcgttccaaagtcatttcccttcaacacaagcgtggtgtacaagaagacgctcttcgtcgaattcaccgatcacctgttcaatatcgccaaacccagaccaccatggatgggtcttttggggcctaccatacaagcggaggtgtatgacacagttgttatcactctcaagaacatggcttctcatccggtaagtcttcacgcagtgggcgtgtcctactggaaagcttcagaaggagccgagtatgatgatcagacatcccagagggagaaagaagacgacaaggtatttccaggtgggtctcatacctatgtgtggcaagtgctcaaagagaatggccctatggcaagcgatccgctctgtttgacttacagctacctttcacacgttgacctcgtcaaggacctcaactccgggttgattggagccttgttggtatgcagggaaggatctcttgccaaagagaagacacagaccctccacaagtttatccttctctttgctgtgttcgatgagggcaaaagttggcatagcgaaacgaagaattccctcatgcaggatcgcgacgcagccagcgccagagcttggcccaagatgcacactgtgaacggatatgtcaataggtcacttcctggcttgattgggtgtcatcggaaaagtgtctactggcacgtgatcggaatggggacaacaccagaggtccactccatatttctcgaaggccataccttccttgttcgaaaccacagacaggcatccttggagatctctcccattacctttctcactgcccaaacgctccttatggacttgggtcagttccttctcttctgccatatcagctcacaccagcatgatggtatggaagcttatgtgaaagtcgacagttgtcctgaggagccacagttgcgcatgaagaataatgaagaagccgaggattacgacgacgatctcaccgattctgagatggacgtggtgaggtttgatgacgacaactctccctccttcattcaaatccggagcgtggcgaagaaacaccccaagacttgggtccactatatagcggcggaagaggaggattgggattacgctcctcttgtattggcaccagatgaccgctcatacaaaagccagtacctcaacaacggaccgcagagaattggccggaagtataagaaagtgcgatttatggcctatacagacgaaacctttaagacaagggaggccatccagcatgagagtgggattttgggacctcttctttacggcgaagttggtgataccctcctcatcatcttcaagaatcaagctgagcgcccctataacatttacccacacgggatcactgacgttaggcctttgtatagcagaagacttcccaaaggcgtgaagcatctcaaagacttccccattttgccaggcgagatctttaagtacaaatggaccgtcacagtggaagatggaccgactaaatcagaccctcgatgccttacgcggtactattcctccttcgtgaatatggagagagatttggcaagcggactcataggaccactcctcatctgttacaaggaatctgtagaccagaggggtaaccagattatgagtgataaacgcaatgtgatcctttttagcgtcttcgacgagaaccggtcctggtacttgaccgagaatatacaaaggttccttcccaaccccgcaggcgttcagttggaagaccctgagtttcaggccagcaatattatgcactcaatcaacggctatgtgtttgatagtctccagctttctgtttgcctccatgaagtagcctattggtacatcttgtcaattggtgctcaaacagacttcctctccgtcttcttctccggctacacctttaagcacaagatggtgtatgaggacactctcacactctttccattttctggagaaaccgtgttcatgagcatggagaatccaggcctttggatcttgggttgccacaacagtgattttcgcaatcggggaatgactgctctcctcaaagtcagcagctgtgataagaacacaggcgactattacgaagattcttacgaggacataagtgcctacttgttgtccaagaataacgccattgagcccagatcattctcccagaatcctcccgtgcttaaaaggcatcagcgcgaaatcaccagaactactcttcagtctgatcaagaggagattgactatgacgacaccataagcgtggaaatgaagaaggaggatttcgatatctatgacgaagatgagaaccagtctccgcggagctttcagaagaagacgcgacactacttcattgcagcagtcgaaaggctttgggactacggtatgtcatcatcccctcatgtgttgcgcaatagagctcagagtggaagtgttccacagttcaagaaagtcgtctttcaagagtttacagatggcagcttcacacagcctctctatcggggcgagcttaacgaacatttgggactccttggtccctatatccgagccgaagtggaggacaacattatggttacctttaggaatcaagcctctcgcccctacagcttctactcctccctcatcagttatgaggaggatcagagacaaggcgctgaaccacggaagaactttgtgaaaccgaatgagacgaagacctacttctggaaagtacagcaccacatggcccccacaaaagacgaattcgattgcaaagcatgggcgtatttttcagacgttgacttggagaaagatgtacattcaggacttattggtcctttgttggtgtgtcacactaacactctcaatccagcccatggcaggcaggtgacagtccaggaattcgctcttttctttaccatctttgatgagaccaagtcctggtacttcacggaaaacatggagcgcaattgcagagccccctgtaacatacagatggaggaccctacctttaaggaaaattatcggttccacgcaatcaacggatacattatggatacactccctggccttgtgatggctcaggaccaacgaatcaggtggtacctcctcagcatgggttctaatgagaacatacactccattcacttttcaggacatgtgttcactgtccggaagaaagaagagtataagatggccctctacaatttgtatccaggcgtgtttgagaccgttgaaatgcttccctctaaagctggcatctggagagtagagtgcttgatcggagaacatcttcacgcaggtatgagcaccttgttcctcgtgtacagcaacaaatgtcagaccccacttggcatggccagtggacacattcgcgactttcagatcacagcatctggccagtatggacaatgggccccaaagttggctcgcctccattactccggtagcataaatgcgtggtccactaaagaacctttcagctggattaaggtcgatcttcttgcccccatgatcatccacggcattaagacacagggagcgaggcagaaattctcctccctctacatctcacagttcattattatgtatagtttggacggcaagaagtggcaaacttatagaggtaacagtactggaacactcatggtgttcttcggcaacgttgatagctctggcatcaaacacaacatctttaatcctcccataatagctcggtacatcagattgcatccgacccactacagcattaggagtacactccgaatggagcttatgggttgcgacttgaattcctgttcaatgccactcggaatggagtctaaagccatctctgatgcacagataaccgccagtagctactttacgaacatgtttgctacgtggtcaccctctaaggcaaggcttcatttgcaaggccggtctaatgcctggagacctcaggtgaacaacccgaaagaatggctccaggtggactttcagaagaccatgaaagtaacaggtgtcactactcagggagttaagtccttggataccagcatgtatgtgaaggagttccttatttcctcatcacaagatggccaccagtggaccctcttctttcagaatggtaaggtcaaagtgtttcagggcaatcaagacagcttcacacccgtggtgaacagtcttgatcctccactcttgacacgataccttcgaatccatccacagtcttgggagcaccagattgcattgcgcatggaagtacttggatgcgaggctcaggacctctac

SEQ ID NO: 694 - protein, 1457 aa, synthetic construct
  REGION 1..1457: note = Variant of human B-domain deleted Factor VIII
MQIELSTCFFLCLLRFCFSATRRYYLGAVELSWDYMQSDLGELPVDARFPPRVPKSFPFNTSVVYKKTLFVEFTDHLFNIAKPRPPWMGLLGPTIQAEVYDTVVITLKNMASHPVSLHAVGVSYWKASEGAEYDDQTSQREKEDDKVFPGGSHTYVWQVLKENGPMASDPLCLTYSYLSHVDLVKDLNSGLIGALLVCREGSLAKEKTQTLHKFILLFAVFDEGKSWHSETKNSLMQDRDAASARAWPKMHTVNGYVNRSLPGLIGCHRKSVYWHVIGMGTTPEVHSIFLEGHTFLVRNHRQASLEISPITFLTAQTLLMDLGQFLLFCHISSHQHDGMEAYVKVDSCPEEPQLRMKNNEEAEDYDDDLTDSEMDVVRFDDDNSPSFIQIRSVAKKHPKTWVHYIAAEEEDWDYAPLVLAPDDRSYKSQYLNNGPQRIGRKYKKVRFMAYTDETFKTREAIQHESGILGPLLYGEVGDTLLIIFKNQAERPYNIYPHGITDVRPLYSRRLPKGVKHLKDFPILPGEIFKYKWTVTVEDGPTKSDPRCLTRYYSSFVNMERDLASGLIGPLLICYKESVDQRGNQIMSDKRNVILFSVFDENRSWYLTENIQRFLPNPAGVQLEDPEFQASNIMHSINGYVFDSLQLSVCLHEVAYWYILSIGAQTDFLSVFFSGYTFKHKMVYEDTLTLFPFSGETVFMSMENPGLWILGCHNSDFRNRGMTALLKVSSCDKNTGDYYEDSYEDISAYLLSKNNAIEPRSFSQNPPVLKRHQREITRTTLQSDQEEIDYDDTISVEMKKEDFDIYDEDENQSPRSFQKKTRHYFIAAVERLWDYGMSSSPHVLRNRAQSGSVPQFKKVVFQEFTDGSFTQPLYRGELNEHLGLLGPYIRAEVEDNIMVTFRNQASRPYSFYSSLISYEEDQRQGAEPRKNFVKPNETKTYFWKVQHHMAPTKDEFDCKAWAYFSDVDLEKDVHSGLIGPLLVCHTNTLNPAHGRQVTVQEFALFFTIFDETKSWYFTENMERNCRAPCNIQMEDPTFKENYRFHAINGYIMDTLPGLVMAQDQRIRWYLLSMGSNENIHSIHFSGHVFTVRKKEEYKMALYNLYPGVFETVEMLPSKAGIWRVECLIGEHLHAGMSTLFLVYSNKCQTPLGMASGHIRDFQITASGQYGQWAPKLARLHYSGSINAWSTKEPFSWIKVDLLAPMIIHGIKTQGARQKFSSLYISQFIIMYSLDGKKWQTYRGNSTGTLMVFFGNVDSSGIKHNIFNPPIIARYIRLHPTHYSIRSTLRMELMGCDLNSCSMPLGMESKAISDAQITASSYFTNMFATWSPSKARLHLQGRSNAWRPQVNNPKEWLQVDFQKTMKVTGVTTQGVKSLDTSMYVKEFLISSSQDGHQWTLFFQNGKVKVFQGNQDSFTPVVNSLDPPLLTRYLRIHPQSWEHQIALRMEVLGCEAQDLY

SEQ ID NO: 695 - DNA, 4371 bp, synthetic construct
  misc_feature 1..4371: note = Variant of human B-domain deleted Factor VIII
  source 1..4371: mol_type = other DNA
atgcagattgaactgtctacctgcttcttcctctgtttgctgaggttctgctttagcgccactagacggtactaccttggcgctgtggagctgtcctgggactatatgcagagtgatttgggagagcttcccgtcgacgcacgatttcctcctcgcgttccaaagtcatttcccttcaacacaagcgtggtgtacaagaagacgctcttcgtcgaattcaccgatcacctgttcaatatcgccaaacccagaccaccatggatgggtcttttggggcctaccatacaagcggaggtgtatgacacagttgttatcactctcaagaacatggcttctcatccggtaagtcttcacgcagtgggcgtgtcctactggaaagcttcagaaggagccgagtatgatgatcagacatcccagagggagaaagaagacgacaaggtatttccaggtgggtctcatacctatgtgtggcaagtgctcaaagagaatggccctatggcaagcgatccgctctgtttgacttacagctacctttcacacgttgacctcgtcaaggacctcaactccgggttgattggagccttgttggtatgcagggaaggatctcttgccaaagagaagacacagaccctccacaagtttatccttctctttgctgtgttcgatgagggcaaaagttggcatagcgaaacgaagaattccctcatgcaggatcgcgacgcagccagcgccagagcttggcccaagatgcacactgtgaacggatatgtcaataggtcacttcctggcttgattgggtgtcatcggaaaagtgtctactggcacgtgatcggaatggggacaacaccagaggtccactccatatttctcgaaggccataccttccttgttcgaaaccacagacaggcatccttggagatctctcccattacctttctcactgcccaaacgctccttatggacttgggtcagttccttctcttctgccatatcagctcacaccagcatgatggtatggaagcttatgtgaaagtcgacagttgtcctgaggagccacagttgcgcatgaagaataatgaagaagccgaggattacgacgacgatctcaccgattctgagatggacgtggtgaggtttgatgacgacaactctccctccttcattcaaatccggagcgtggcgaagaaacaccccaagacttgggtccactatatagcggcggaagaggaggattgggattacgctcctcttgtattggcaccagatgaccgctcatacaaaagccagtacctcaacaacggaccgcagagaattggccggaagtataagaaagtgcgatttatggcctatacagacgaaacctttaagacaagggaggccatccagcatgagagtgggattttgggacctcttctttacggcgaagttggtgataccctcctcatcatcttcaagaataatgcttctcgcccctataacatttacccacacgggatcactgacgttaggcctttgtatagcagaagacttcccaaaggcgtgaagcatctcaaagacttccccattttgccaggcgagatctttaagtacaaatggaccgtcacagtggaagatggaccgactaaatcagaccctcgatgccttacgcggtactattcctccttcgtgaatatggagagagatttggcaagcggactcataggaccactcctcatctgttacaaggaatctgtagaccagaggggtaaccagattatgagtgataaacgcaatgtgatcctttttagcgtcttcgacgagaaccggtcctggtacttgaccgagaatatacaaaggttccttcccaaccccgcaggcgttcagttggaagaccctgagtttcaggccagcaatattatgcactcaatcaacggctatgtgtttgatagtctccagctttctgtttgcctccatgaagtagcctattggtacatcttgtcaattggtgctcaaacagacttcctctccgtcttcttctccggctacacctttaagcacaagatggtgtatgaggacactctcacactctttccattttctggagaaaccgtgttcatgagcatggagaatccaggcctttggatcttgggttgccacaacagtgattttcgcaatcggggaatgactgctctcctcaaagtcagcagctgtgataagaacacaggcgactattacgaagattcttacgaggacataagtgcctacttgttgtccaagaataacgccattgagcccagatcattctcccagaatcctcccgtgcttaaaaggcatcagcgcgaaatcaccagaactactcttcagtctgatcaagaggagattgactatgacgacaccataagcgtggaaatgaagaaggaggatttcgatatctatgacgaagatgagaaccagtctccgcggagctttcagaagaagacgcgacactacttcattgcagcagtcgaaaggctttgggactacggtatgtcatcatcccctcatgtgttgcgcaatagagctcagagtggaagtgttccacagttcaagaaagtcgtctttcaagagtttacagatggcagcttcacacagcctctctatcggggcgagcttaacgaacatttgggactccttggtccctatatccgagccgaagtggaggacaacattatggttacctttaggaatcaagcctctcgcccctacagcttctactcctccctcatcagttatgaggaggatcagagacaaggcgctgaaccacggaagaactttgtgaaaccgaatgagacgaagacctacttctggaaagtacagcaccacatggcccccacaaaagacgaattcgattgcaaagcatgggcgtatttttcagacgttgacttggagaaagatgtacattcaggacttattggtcctttgttggtgtgtcacactaacactctcaatccagcccatggcaggcaggtgacagtccaggaattcgctcttttctttaccatctttgatgagaccaagtcctggtacttcacggaaaacatggagcgcaattgcagagccccctgtaacatacagatggaggaccctacctttaaggaaaattatcggttccacgcaatcaacggatacattatggatacactccctggccttgtgatggctcaggaccaacgaatcaggtggtacctcctcagcatgggttctaatgagaacatacactccattcacttttcaggacatgtgttcactgtccggaagaaagaagagtataagatggccctctacaatttgtatccaggcgtgtttgagaccgttgaaatgcttccctctaaagctggcatctggagagtagagtgcttgatcggagaacatcttcacgcaggtatgagcaccttgttcctcgtgtacagcaacaaatgtcagaccccacttggcatggccagtggacacattcgcgactttcagatcacagcatctggccagtatggacaatgggccccaaagttggctcgcctccattactccggtagcataaatgcgtggtccactaaagaacctttcagctggattaaggtcgatcttcttgcccccatgatcatccacggcattaagacacagggagcgaggcagaaattctcctccctctacatctcacagttcattattatgtatagtttggacggcaagaagtggcaaacttatagaggtaacagtactggaacactcatggtgttcttcggcaacgttgatagctctggcatcaaacacaacatctttaatcctcccataatagctcggtacatcagattgcatccgacccactacagcattaggagtacactccgaatggagcttatgggttgcgacttgaattcctgttcaatgccactcggaatggagtctaaagccatctctgatgcacagataaccgccagtagctactttacgaacatgtttgctacgtggtcaccctctaaggcaaggcttcatttgcaaggccggtctaatgcctggagacctcaggtgaacaacccgaaagaatggctccaggtggactttcagaagaccatgaaagtaacaggtgtcactactcagggagttaagtccttggataccagcatgtatgtgaaggagttccttatttcctcatcacaagatggccaccagtggaccctcttctttcagaatggtaaggtcaaagtgtttcagggcaatcaagacagcttcacacccgtggtgaacagtcttgatcctccactcttgacacgataccttcgaatccatccacagtcttgggagcaccagattgcattgcgcatggaagtacttggatgcgaggctcaggacctctac

SEQ ID NO: 696 - protein, 1457 aa, synthetic construct
  REGION 1..1457: note = Variant of human B-domain deleted Factor VIII
MQIELSTCFFLCLLRFCFSATRRYYLGAVELSWDYMQSDLGELPVDARFPPRVPKSFPFNTSVVYKKTLFVEFTDHLFNIAKPRPPWMGLLGPTIQAEVYDTVVITLKNMASHPVSLHAVGVSYWKASEGAEYDDQTSQREKEDDKVFPGGSHTYVWQVLKENGPMASDPLCLTYSYLSHVDLVKDLNSGLIGALLVCREGSLAKEKTQTLHKFILLFAVFDEGKSWHSETKNSLMQDRDAASARAWPKMHTVNGYVNRSLPGLIGCHRKSVYWHVIGMGTTPEVHSIFLEGHTFLVRNHRQASLEISPITFLTAQTLLMDLGQFLLFCHISSHQHDGMEAYVKVDSCPEEPQLRMKNNEEAEDYDDDLTDSEMDVVRFDDDNSPSFIQIRSVAKKHPKTWVHYIAAEEEDWDYAPLVLAPDDRSYKSQYLNNGPQRIGRKYKKVRFMAYTDETFKTREAIQHESGILGPLLYGEVGDTLLIIFKNNASRPYNIYPHGITDVRPLYSRRLPKGVKHLKDFPILPGEIFKYKWTVTVEDGPTKSDPRCLTRYYSSFVNMERDLASGLIGPLLICYKESVDQRGNQIMSDKRNVILFSVFDENRSWYLTENIQRFLPNPAGVQLEDPEFQASNIMHSINGYVFDSLQLSVCLHEVAYWYILSIGAQTDFLSVFFSGYTFKHKMVYEDTLTLFPFSGETVFMSMENPGLWILGCHNSDFRNRGMTALLKVSSCDKNTGDYYEDSYEDISAYLLSKNNAIEPRSFSQNPPVLKRHQREITRTTLQSDQEEIDYDDTISVEMKKEDFDIYDEDENQSPRSFQKKTRHYFIAAVERLWDYGMSSSPHVLRNRAQSGSVPQFKKVVFQEFTDGSFTQPLYRGELNEHLGLLGPYIRAEVEDNIMVTFRNQASRPYSFYSSLISYEEDQRQGAEPRKNFVKPNETKTYFWKVQHHMAPTKDEFDCKAWAYFSDVDLEKDVHSGLIGPLLVCHTNTLNPAHGRQVTVQEFALFFTIFDETKSWYFTENMERNCRAPCNIQMEDPTFKENYRFHAINGYIMDTLPGLVMAQDQRIRWYLLSMGSNENIHSIHFSGHVFTVRKKEEYKMALYNLYPGVFETVEMLPSKAGIWRVECLIGEHLHAGMSTLFLVYSNKCQTPLGMASGHIRDFQITASGQYGQWAPKLARLHYSGSINAWSTKEPFSWIKVDLLAPMIIHGIKTQGARQKFSSLYISQFIIMYSLDGKKWQTYRGNSTGTLMVFFGNVDSSGIKHNIFNPPIIARYIRLHPTHYSIRSTLRMELMGCDLNSCSMPLGMESKAISDAQITASSYFTNMFATWSPSKARLHLQGRSNAWRPQVNNPKEWLQVDFQKTMKVTGVTTQGVKSLDTSMYVKEFLISSSQDGHQWTLFFQNGKVKVFQGNQDSFTPVVNSLDPPLLTRYLRIHPQSWEHQIALRMEVLGCEAQDLY

SEQ ID NO: 697 - DNA, 4371 bp, synthetic construct
  misc_feature 1..4371: note = Variant of human B-domain deleted Factor VIII
  source 1..4371: mol_type = other DNA
atgcagattgaactgtctacctgcttcttcctctgtttgctgaggttctgctttagcgccactagacggtactaccttggcgctgtggagctgtcctgggactatatgcagagtgatttgggagagcttcccgtcgacgcacgatttcctcctcgcgttccaaagtcatttcccttcaacacaagcgtggtgtacaagaagacgctcttcgtcgaattcaccgatcacctgttcaatatcgccaaacccagaccaccatggatgggtcttttggggcctaccatacaagcggaggtgtatgacacagttgttatcactctcaagaacatggcttctcatccggtaagtcttcacgcagtgggcgtgtcctactggaaagcttcagaaggagccgagtatgatgatcagacatcccagagggagaaagaagacgacaaggtatttccaggtgggtctcatacctatgtgtggcaagtgctcaaagagaatggccctatggcaagcgatccgctctgtttgacttacagctacctttcacacgttgacctcgtcaaggacctcaactccgggttgattggagccttgttggtatgcagggaaggatctcttgccaaagagaagacacagaccctccacaagtttatccttctctttgctgtgttcgatgagggcaaaagttggcatagcgaaacgaagaattccctcatgcaggatcgcgacgcagccagcgccagagcttggcccaagatgcacactgtgaacggatatgtcaataggtcacttcctggcttgattgggtgtcatcggaaaagtgtctactggcacgtgatcggaatggggacaacaccagaggtccactccatatttctcgaaggccataccttccttgttcgaaaccacagacaggcatccttggagatctctcccattacctttctcactgcccaaacgctccttatggacttgggtcagttccttctcttctgccatatcagctcacaccagcatgatggtatggaagcttatgtgaaagtcgacagttgtcctgaggagccacagttgcgcatgaagaataatgaagaagccgaggattacgacgacgatctcaccgattctgagatggacgtggtgaggtttgatgacgacaactctccctccttcattcaaatccggagcgtggcgaagaaacaccccaagacttgggtccactatatagcggcggaagaggaggattgggattacgctcctcttgtattggcaccagatgaccgctcatacaaaagccagtacctcaacaacggaccgcagagaattggccggaagtataagaaagtgcgatttatggcctatacagacgaaacctttaagacaagggaggccatccagcatgagagtgggattttgggacctcttctttacggcgaagttggtgataccctcctcatcatcttcaagaatcaaggctctcgcccctataacatttacccacacgggatcactgacgttaggcctttgtatagcagaagacttcccaaaggcgtgaagcatctcaaagacttccccattttgccaggcgagatctttaagtacaaatggaccgtcacagtggaagatggaccgactaaatcagaccctcgatgccttacgcggtactattcctccttcgtgaatatggagagagatttggcaagcggactcataggaccactcctcatctgttacaaggaatctgtagaccagaggggtaaccagattatgagtgataaacgcaatgtgatcctttttagcgtcttcgacgagaaccggtcctggtacttgaccgagaatatacaaaggttccttcccaaccccgcaggcgttcagttggaagaccctgagtttcaggccagcaatattatgcactcaatcaacggctatgtgtttgatagtctccagctttctgtttgcctccatgaagtagcctattggtacatcttgtcaattggtgctcaaacagacttcctctccgtcttcttctccggctacacctttaagcacaagatggtgtatgaggacactctcacactctttccattttctggagaaaccgtgttcatgagcatggagaatccaggcctttggatcttgggttgccacaacagtgattttcgcaatcggggaatgactgctctcctcaaagtcagcagctgtgataagaacacaggcgactattacgaagattcttacgaggacataagtgcctacttgttgtccaagaataacgccattgagcccagatcattctcccagaatcctcccgtgcttaaaaggcatcagcgcgaaatcaccagaactactcttcagtctgatcaagaggagattgactatgacgacaccataagcgtggaaatgaagaaggaggatttcgatatctatgacgaagatgagaaccagtctccgcggagctttcagaagaagacgcgacactacttcattgcagcagtcgaaaggctttgggactacggtatgtcatcatcccctcatgtgttgcgcaatagagctcagagtggaagtgttccacagttcaagaaagtcgtctttcaagagtttacagatggcagcttcacacagcctctctatcggggcgagcttaacgaacatttgggactccttggtccctatatccgagccgaagtggaggacaacattatggttacctttaggaatcaagcctctcgcccctacagcttctactcctccctcatcagttatgaggaggatcagagacaaggcgctgaaccacggaagaactttgtgaaaccgaatgagacgaagacctacttctggaaagtacagcaccacatggcccccacaaaagacgaattcgattgcaaagcatgggcgtatttttcagacgttgacttggagaaagatgtacattcaggacttattggtcctttgttggtgtgtcacactaacactctcaatccagcccatggcaggcaggtgacagtccaggaattcgctcttttctttaccatctttgatgagaccaagtcctggtacttcacggaaaacatggagcgcaattgcagagccccctgtaacatacagatggaggaccctacctttaaggaaaattatcggttccacgcaatcaacggatacattatggatacactccctggccttgtgatggctcaggaccaacgaatcaggtggtacctcctcagcatgggttctaatgagaacatacactccattcacttttcaggacatgtgttcactgtccggaagaaagaagagtataagatggccctctacaatttgtatccaggcgtgtttgagaccgttgaaatgcttccctctaaagctggcatctggagagtagagtgcttgatcggagaacatcttcacgcaggtatgagcaccttgttcctcgtgtacagcaacaaatgtcagaccccacttggcatggccagtggacacattcgcgactttcagatcacagcatctggccagtatggacaatgggccccaaagttggctcgcctccattactccggtagcataaatgcgtggtccactaaagaacctttcagctggattaaggtcgatcttcttgcccccatgatcatccacggcattaagacacagggagcgaggcagaaattctcctccctctacatctcacagttcattattatgtatagtttggacggcaagaagtggcaaacttatagaggtaacagtactggaacactcatggtgttcttcggcaacgttgatagctctggcatcaaacacaacatctttaatcctcccataatagctcggtacatcagattgcatccgacccactacagcattaggagtacactccgaatggagcttatgggttgcgacttgaattcctgttcaatgccactcggaatggagtctaaagccatctctgatgcacagataaccgccagtagctactttacgaacatgtttgctacgtggtcaccctctaaggcaaggcttcatttgcaaggccggtctaatgcctggagacctcaggtgaacaacccgaaagaatggctccaggtggactttcagaagaccatgaaagtaacaggtgtcactactcagggagttaagtccttggataccagcatgtatgtgaaggagttccttatttcctcatcacaagatggccaccagtggaccctcttctttcagaatggtaaggtcaaagtgtttcagggcaatcaagacagcttcacacccgtggtgaacagtcttgatcctccactcttgacacgataccttcgaatccatccacagtcttgggagcaccagattgcattgcgcatggaagtacttggatgcgaggctcaggacctctac

SEQ ID NO: 698 - protein, 1457 aa, synthetic construct
  REGION 1..1457: note = Variant of human B-domain deleted Factor VIII
MQIELSTCFFLCLLRFCFSATRRYYLGAVELSWDYMQSDLGELPVDARFPPRVPKSFPFNTSVVYKKTLFVEFTDHLFNIAKPRPPWMGLLGPTIQAEVYDTVVITLKNMASHPVSLHAVGVSYWKASEGAEYDDQTSQREKEDDKVFPGGSHTYVWQVLKENGPMASDPLCLTYSYLSHVDLVKDLNSGLIGALLVCREGSLAKEKTQTLHKFILLFAVFDEGKSWHSETKNSLMQDRDAASARAWPKMHTVNGYVNRSLPGLIGCHRKSVYWHVIGMGTTPEVHSIFLEGHTFLVRNHRQASLEISPITFLTAQTLLMDLGQFLLFCHISSHQHDGMEAYVKVDSCPEEPQLRMKNNEEAEDYDDDLTDSEMDVVRFDDDNSPSFIQIRSVAKKHPKTWVHYIAAEEEDWDYAPLVLAPDDRSYKSQYLNNGPQRIGRKYKKVRFMAYTDETFKTREAIQHESGILGPLLYGEVGDTLLIIFKNQGSRPYNIYPHGITDVRPLYSRRLPKGVKHLKDFPILPGEIFKYKWTVTVEDGPTKSDPRCLTRYYSSFVNMERDLASGLIGPLLICYKESVDQRGNQIMSDKRNVILFSVFDENRSWYLTENIQRFLPNPAGVQLEDPEFQASNIMHSINGYVFDSLQLSVCLHEVAYWYILSIGAQTDFLSVFFSGYTFKHKMVYEDTLTLFPFSGETVFMSMENPGLWILGCHNSDFRNRGMTALLKVSSCDKNTGDYYEDSYEDISAYLLSKNNAIEPRSFSQNPPVLKRHQREITRTTLQSDQEEIDYDDTISVEMKKEDFDIYDEDENQSPRSFQKKTRHYFIAAVERLWDYGMSSSPHVLRNRAQSGSVPQFKKVVFQEFTDGSFTQPLYRGELNEHLGLLGPYIRAEVEDNIMVTFRNQASRPYSFYSSLISYEEDQRQGAEPRKNFVKPNETKTYFWKVQHHMAPTKDEFDCKAWAYFSDVDLEKDVHSGLIGPLLVCHTNTLNPAHGRQVTVQEFALFFTIFDETKSWYFTENMERNCRAPCNIQMEDPTFKENYRFHAINGYIMDTLPGLVMAQDQRIRWYLLSMGSNENIHSIHFSGHVFTVRKKEEYKMALYNLYPGVFETVEMLPSKAGIWRVECLIGEHLHAGMSTLFLVYSNKCQTPLGMASGHIRDFQITASGQYGQWAPKLARLHYSGSINAWSTKEPFSWIKVDLLAPMIIHGIKTQGARQKFSSLYISQFIIMYSLDGKKWQTYRGNSTGTLMVFFGNVDSSGIKHNIFNPPIIARYIRLHPTHYSIRSTLRMELMGCDLNSCSMPLGMESKAISDAQITASSYFTNMFATWSPSKARLHLQGRSNAWRPQVNNPKEWLQVDFQKTMKVTGVTTQGVKSLDTSMYVKEFLISSSQDGHQWTLFFQNGKVKVFQGNQDSFTPVVNSLDPPLLTRYLRIHPQSWEHQIALRMEVLGCEAQDLY

SEQ ID NO: 699 - DNA, 4371 bp, synthetic construct
  misc_feature 1..4371: note = Variant of human B-domain deleted Factor VIII
  source 1..4371: mol_type = other DNA
atgcagattgaactgtctacctgcttcttcctctgtttgctgaggttctgctttagcgccactagacggtactaccttggcgctgtggagctgtcctgggactatatgcagagtgatttgggagagcttcccgtcgacgcacgatttcctcctcgcgttccaaagtcatttcccttcaacacaagcgtggtgtacaagaagacgctcttcgtcgaattcaccgatcacctgttcaatatcgccaaacccagaccaccatggatgggtcttttggggcctaccatacaagcggaggtgtatgacacagttgttatcactctcaagaacatggcttctcatccggtaagtcttcacgcagtgggcgtgtcctactggaaagcttcagaaggagccgagtatgatgatcagacatcccagagggagaaagaagacgacaaggtatttccaggtgggtctcatacctatgtgtggcaagtgctcaaagagaatggccctatggcaagcgatccgctctgtttgacttacagctacctttcacacgttgacctcgtcaaggacctcaactccgggttgattggagccttgttggtatgcagggaaggatctcttgccaaagagaagacacagaccctccacaagtttatccttctctttgctgtgttcgatgagggcaaaagttggcatagcgaaacgaagaattccctcatgcaggatcgcgacgcagccagcgccagagcttggcccaagatgcacactgtgaacggatatgtcaataggtcacttcctggcttgattgggtgtcatcggaaaagtgtctactggcacgtgatcggaatggggacaacaccagaggtccactccatatttctcgaaggccataccttccttgttcgaaaccacagacaggcatccttggagatctctcccattacctttctcactgcccaaacgctccttatggacttgggtcagttccttctcttctgccatatcagctcacaccagcatgatggtatggaagcttatgtgaaagtcgacagttgtcctgaggagccacagttgcgcatgaagaataatgaagaagccgaggattacgacgacgatctcaccgattctgagatggacgtggtgaggtttgatgacgacaactctccctccttcattcaaatccggagcgtggcgaagaaacaccccaagacttgggtccactatatagcggcggaagaggaggattgggattacgctcctcttgtattggcaccagatgaccgctcatacaaaagccagtacctcaacaacggaccgcagagaattggccggaagtataagaaagtgcgatttatggcctatacagacgaaacctttaagacaagggaggccatccagcatgagagtgggattttgggacctcttctttacggcgaagttggtgataccctcctcatcatcttcaagaatcaagcttctcgcccctataacatttacccacacgggatcactgacgttaggcctttgtatagcagaagacttcccaaaggcgtgaagcatctcaaagacttccccattttgccaggcgagatctttaagtacaaatggaccgtcacagtggaagatggaccgactaaatcagaccctcgatgccttacgcggtactattcctccttcgtgaatatggagagagatttggcaagcggactcataggaccactcctcatctgttacaaggaatctgtagaccagaggggtaaccagattatgagtgataaacgcaatgtgatcctttttagcgtcttcgacgagaaccggtcctggtacttgaccgagaatatacaaaggttccttcccaaccccgcaggcgttcagttggaagaccctgagtttcaggccagcaatattatgcactcaatcaacggctatgtgtttgatagtctccagctttctgtttgcctccatgaagtagcctattggtacatcttgtcaattggtgctcaaacagacttcctctccgtcttcttctccggctacacctttaagcacaagatggtgtatgaggacactctcacactctttccattttctggagaaaccgtgttcatgagcatggagaatccaggcctttggatcttgggttgccacaacagtgattttcgcaatcggggaatgactgctctcctcaaagtcagcagctgtgataagaacacaggcgactattacgaagattcttacgaggacataagtgcctacttgttgtccaagaataacgccattgagcccagatcattctcccagaatcctcccgtgcttaaaaggcatcagcgcgaaatcaccagaactactcttcagtctgatcaagaggagattgactatgacgacaccataagcgtggaaatgaagaaggaggatttcgatatctatgacgaagatgagaaccagtctccgcggagctttcagaagaagacgcgacactacttcattgcagcagtcgaaaggctttgggactacggtatgtcatcatcccctcatgtgttgcgcaatagagctcagagtggaagtgttccacagttcaagaaagtcgtctttcaagagtttacagatggcagcttcacacagcctctctatcggggcgagcttaacgaacatttgggactccttggtccctatatccgagccgaagtggaggacaacattatggttacctttaggaatgaggcctctcgcccctacagcttctactcctccctcatcagttatgaggaggatcagagacaaggcgctgaaccacggaagaactttgtgaaaccgaatgagacgaagacctacttctggaaagtacagcaccacatggcccccacaaaagacgaattcgattgcaaagcatgggcgtatttttcagacgttgacttggagaaagatgtacattcaggacttattggtcctttgttggtgtgtcacactaacactctcaatccagcccatggcaggcaggtgacagtccaggaattcgctcttttctttaccatctttgatgagaccaagtcctggtacttcacggaaaacatggagcgcaattgcagagccccctgtaacatacagatggaggaccctacctttaaggaaaattatcggttccacgcaatcaacggatacattatggatacactccctggccttgtgatggctcaggaccaacgaatcaggtggtacctcctcagcatgggttctaatgagaacatacactccattcacttttcaggacatgtgttcactgtccggaagaaagaagagtataagatggccctctacaatttgtatccaggcgtgtttgagaccgttgaaatgcttccctctaaagctggcatctggagagtagagtgcttgatcggagaacatcttcacgcaggtatgagcaccttgttcctcgtgtacagcaacaaatgtcagaccccacttggcatggccagtggacacattcgcgactttcagatcacagcatctggccagtatggacaatgggccccaaagttggctcgcctccattactccggtagcataaatgcgtggtccactaaagaacctttcagctggattaaggtcgatcttcttgcccccatgatcatccacggcattaagacacagggagcgaggcagaaattctcctccctctacatctcacagttcattattatgtatagtttggacggcaagaagtggcaaacttatagaggtaacagtactggaacactcatggtgttcttcggcaacgttgatagctctggcatcaaacacaacatctttaatcctcccataatagctcggtacatcagattgcatccgacccactacagcattaggagtacactccgaatggagcttatgggttgcgacttgaattcctgttcaatgccactcggaatggagtctaaagccatctctgatgcacagataaccgccagtagctactttacgaacatgtttgctacgtggtcaccctctaaggcaaggcttcatttgcaaggccggtctaatgcctggagacctcaggtgaacaacccgaaagaatggctccaggtggactttcagaagaccatgaaagtaacaggtgtcactactcagggagttaagtccttggataccagcatgtatgtgaaggagttccttatttcctcatcacaagatggccaccagtggaccctcttctttcagaatggtaaggtcaaagtgtttcagggcaatcaagacagcttcacacccgtggtgaacagtcttgatcctccactcttgacacgataccttcgaatccatccacagtcttgggagcaccagattgcattgcgcatggaagtacttggatgcgaggctcaggacctctac

SEQ ID NO: 700 - protein, 1457 aa, synthetic construct
  REGION 1..1457: note = Variant of human B-domain deleted Factor VIII
MQIELSTCFFLCLLRFCFSATRRYYLGAVELSWDYMQSDLGELPVDARFPPRVPKSFPFNTSVVYKKTLFVEFTDHLFNIAKPRPPWMGLLGPTIQAEVYDTVVITLKNMASHPVSLHAVGVSYWKASEGAEYDDQTSQREKEDDKVFPGGSHTYVWQVLKENGPMASDPLCLTYSYLSHVDLVKDLNSGLIGALLVCREGSLAKEKTQTLHKFILLFAVFDEGKSWHSETKNSLMQDRDAASARAWPKMHTVNGYVNRSLPGLIGCHRKSVYWHVIGMGTTPEVHSIFLEGHTFLVRNHRQASLEISPITFLTAQTLLMDLGQFLLFCHISSHQHDGMEAYVKVDSCPEEPQLRMKNNEEAEDYDDDLTDSEMDVVRFDDDNSPSFIQIRSVAKKHPKTWVHYIAAEEEDWDYAPLVLAPDDRSYKSQYLNNGPQRIGRKYKKVRFMAYTDETFKTREAIQHESGILGPLLYGEVGDTLLIIFKNQASRPYNIYPHGITDVRPLYSRRLPKGVKHLKDFPILPGEIFKYKWTVTVEDGPTKSDPRCLTRYYSSFVNMERDLASGLIGPLLICYKESVDQRGNQIMSDKRNVILFSVFDENRSWYLTENIQRFLPNPAGVQLEDPEFQASNIMHSINGYVFDSLQLSVCLHEVAYWYILSIGAQTDFLSVFFSGYTFKHKMVYEDTLTLFPFSGETVFMSMENPGLWILGCHNSDFRNRGMTALLKVSSCDKNTGDYYEDSYEDISAYLLSKNNAIEPRSFSQNPPVLKRHQREITRTTLQSDQEEIDYDDTISVEMKKEDFDIYDEDENQSPRSFQKKTRHYFIAAVERLWDYGMSSSPHVLRNRAQSGSVPQFKKVVFQEFTDGSFTQPLYRGELNEHLGLLGPYIRAEVEDNIMVTFRNEASRPYSFYSSLISYEEDQRQGAEPRKNFVKPNETKTYFWKVQHHMAPTKDEFDCKAWAYFSDVDLEKDVHSGLIGPLLVCHTNTLNPAHGRQVTVQEFALFFTIFDETKSWYFTENMERNCRAPCNIQMEDPTFKENYRFHAINGYIMDTLPGLVMAQDQRIRWYLLSMGSNENIHSIHFSGHVFTVRKKEEYKMALYNLYPGVFETVEMLPSKAGIWRVECLIGEHLHAGMSTLFLVYSNKCQTPLGMASGHIRDFQITASGQYGQWAPKLARLHYSGSINAWSTKEPFSWIKVDLLAPMIIHGIKTQGARQKFSSLYISQFIIMYSLDGKKWQTYRGNSTGTLMVFFGNVDSSGIKHNIFNPPIIARYIRLHPTHYSIRSTLRMELMGCDLNSCSMPLGMESKAISDAQITASSYFTNMFATWSPSKARLHLQGRSNAWRPQVNNPKEWLQVDFQKTMKVTGVTTQGVKSLDTSMYVKEFLISSSQDGHQWTLFFQNGKVKVFQGNQDSFTPVVNSLDPPLLTRYLRIHPQSWEHQIALRMEVLGCEAQDLY

SEQ ID NO: 701 - DNA, 4371 bp, synthetic construct
  misc_feature 1..4371: note = Variant of human B-domain deleted Factor VIII
  source 1..4371: mol_type = other DNA
atgcagattgaactgtctacctgcttcttcctctgtttgctgaggttctgctttagcgccactagacggtactaccttggcgctgtggagctgtcctgggactatatgcagagtgatttgggagagcttcccgtcgacgcacgatttcctcctcgcgttccaaagtcatttccctttaacacaagcgtggtgtacaagaagacgctcttcgtcgaattcaccgatcacctgttcaatatcgccaaacccagaccaccatggatgggtcttttggggcctaccatacaagcggaggtgtatgacacagttgttatcactctcaagaacatggcttctcatccggtaagtcttcacgcagtgggcgtgtcctactggaaagcttcagaaggagccgagtatgatgatcagacatcccagagggagaaagaagacgacaaggtatttccaggtgggtctcatacctatgtgtggcaagtgctcaaagagaatggccctatggcaagcgatccgccgtgtttgacttacagctacctttcacacgttgacctcgtcaaggacctcaactccgggttgattggagccttgttggtatgcagggaaggatctcttgccaaagagaagacacagaccctccacaagtttatccttctctttgctgtgttcgatgagggcaaaagttggcatagcgaaacgaagaattccctcatgcaggatcgcgacgcagccagcgccagagcttggcccaagatgcacactgtgaacggatatgtcaataggtcgcttcctggcttgattgggtgtcatcggaaaagtgtctactggcacgtgatcggaatggggacaacaccagaggtccactccatatttctcgaaggccataccttccttgttcgaaaccacagacaggcatccttggagatctctcccattacctttctcactgcccaaacgctccttatggacttgggtcagttccttctcttctgccatatcagctcacaccagcatgatggtatggaagcttatgtgaaagtcgacagttgtcctgaggagccacagttgcgcatgaagaataatgaagaagccgaggattacgacgacgatctcaccgattctgagatggacgtggtgaggtttgatgacgacaactctccctccttcattcaaatccggagcgtggcgaagaaacaccccaagacttgggtccactatatagcggcggaagaggaggattgggattacgctcctcttgtattggcaccagatgaccgctcatacaaaagccagtacctcaacaacggaccgcagagaattggccggaagtataagaaagtgcgatttatggcctatacagacgaaacctttaagacaagggaggccatccagcatgagagtgggattttgggacctcttctttacggcgaagttggtgataccctcctcatcatcttcaagaatcaagcttctcgcccctataacatttacccacacgggatcactgacgttaggcctttgtatagcagaagacttcccaaaggcgtgaagcatctcaaagacttccccattttgccaggcgagatctttaagtacaaatggaccgtcacagtggaagatggaccgactaaatcagaccctcgatgccttacgcggtactattcctccttcgtgaatatggagagagatttggcaagcggactcataggaccactcctcatctgttacaaggaatctgtagaccagaggggtaaccagattatgagtgataaacgcaatgtgatcctttttagcgtcttcgacgagaaccggtcctggtacttgaccgagaatatacaaaggttccttcccaaccccgcaggcgttcagttggaagaccctgagtttcaggccagcaatattatgcactcaatcaacggctatgtgtttgatagtctccagctttctgtttgcctccatgaagtagcctattggtacatcttgtcaattggtgctcaaacagacttcctctccgtcttcttctccggctacacctttaagcacaagatggtgtatgaggacactctcacactctttccattttctggagaaaccgtgttcatgagcatggagaatccaggcctttggatcttgggttgccacaacagtgattttcgcaatcggggaatgactgctctcctcaaagtcagcagctgtgataagaacacaggcgactattacgaagattcttacgaggacataagtgcctacttgctgtccaagaataacgccattgagcccagatcattctcccagaatcctcccgtgcttaaaaggcatcagcgcgaaatcaccagaactactcttcagtctgatcaagaggagattgactatgacgacaccataagcgtggaaatgaagaaggaggatttcgatatctatgacgaagatgagaaccagtctccgcggagctttcagaagaagacgcgacactacttcattgcagcagtcgaaaggctttgggactacggtatgtcatcatcccctcatgtgttgcgcaatagagctcagagtggaagtgttccacagttcaagaaagtcgtctttcaagagtttacagatggcagcttcacacagcctctctatcggggcgagcttaacgaacatttgggactccttggtccctatatccgagccgaagtggaggacaacattatggttacctttaggaatcaagcctctcgcccctacagcttctactcctccctcatcagttatgaggaggatcagagacaaggcgctgaaccacggaagaactttgtgaaaccgaatgagacgaagacctacttctggaaagtacagcaccacatggcccccacaaaagacgaattcgattgcaaagcatgggcgtatttttcagacgttgacttggagaaagatgtacattcaggacttattggtcctttgttggtgtgtcacactaacactctcaatccagcccatggcaggcaggtgacagtccaggaattcgctcttttctttaccatctttgatgagaccaagtcctggtacttcacggaaaacatggagcgcaattgcagagccccctgtaacatacagatggaggaccctacctttaaggaaaattatcggttccacgcaatcaacggatacattatggatacactccctggccttgtgatggctcaggaccaacgaatcaggtggtacctcctcagcatgggttctaatgagaacatacactccattcacttttcaggacatgtgttcactgtccggaagaaagaagagtataagatggccctctacaatttgtatccaggcgtgtttgagaccgttgaaatgcttccctctaaagctggcatctggagagtagagtgcttgatcggagaacatcttcacgcaggtatgagcaccttgttcctcgtgtacagcaacaaatgtcagaccccacttggcatggccagtggacacattcgcgactttcagatcacagcatctggccagtatggacaatgggccccaaagttggctcgcctccattactccggtagcataaatgcgtggtccactaaagaacctttcagctggattaaggtcgatcttcttgcccccatgatcatccacggcattaagacacagggagcgaggcagaaattctcctccctgtacatctcacagttcattattatgtatagtttggacggcaagaagtggcaaacttatagaggtaacagtactggaacagacatggtgttcttcggcaacgttgatagctctggcatcaaacacaacatctttaatcctcccataatagctcggtacatcagattgcatccgacccactacagcattaggagtacactccgaatggagcttatgggttgcgacttgaattcctgttcaatgccactcggaatggagtctaaagccatctctgatgcacagataaccgccagtagctactttacgaacatgtttgctacgtggtcaccctctaaggcaaggcttcatttgcaaggccggtctaatgcctggagacctcaggtgaacaacccgaaagaatggctccaggtggactttcagaagaccatgaaagtaacaggtgtcactactcagggagttaagtccttggatactagcatgtatgtgaaggagttccttatttcctcatcacaagatggccaccagtggaccctcttctttcagaatggtaaggtcaaagtgtttcagggcaatcaagacagcttcacacccgtggtgaacagtcttgatcctccactcttgacacgataccttcgaatccatccacagtcttgggagacgcagattgcattgcgcatggaagtacttggatgcgaggctcaggacctctac

SEQ ID NO: 702 - protein, 1457 aa, synthetic construct
  REGION 1..1457: note = Variant of human B-domain deleted Factor VIII
MQIELSTCFFLCLLRFCFSATRRYYLGAVELSWDYMQSDLGELPVDARFPPRVPKSFPFNTSVVYKKTLFVEFTDHLFNIAKPRPPWMGLLGPTIQAEVYDTVVITLKNMASHPVSLHAVGVSYWKASEGAEYDDQTSQREKEDDKVFPGGSHTYVWQVLKENGPMASDPPCLTYSYLSHVDLVKDLNSGLIGALLVCREGSLAKEKTQTLHKFILLFAVFDEGKSWHSETKNSLMQDRDAASARAWPKMHTVNGYVNRSLPGLIGCHRKSVYWHVIGMGTTPEVHSIFLEGHTFLVRNHRQASLEISPITFLTAQTLLMDLGQFLLFCHISSHQHDGMEAYVKVDSCPEEPQLRMKNNEEAEDYDDDLTDSEMDVVRFDDDNSPSFIQIRSVAKKHPKTWVHYIAAEEEDWDYAPLVLAPDDRSYKSQYLNNGPQRIGRKYKKVRFMAYTDETFKTREAIQHESGILGPLLYGEVGDTLLIIFKNQASRPYNIYPHGITDVRPLYSRRLPKGVKHLKDFPILPGEIFKYKWTVTVEDGPTKSDPRCLTRYYSSFVNMERDLASGLIGPLLICYKESVDQRGNQIMSDKRNVILFSVFDENRSWYLTENIQRFLPNPAGVQLEDPEFQASNIMHSINGYVFDSLQLSVCLHEVAYWYILSIGAQTDFLSVFFSGYTFKHKMVYEDTLTLFPFSGETVFMSMENPGLWILGCHNSDFRNRGMTALLKVSSCDKNTGDYYEDSYEDISAYLLSKNNAIEPRSFSQNPPVLKRHQREITRTTLQSDQEEIDYDDTISVEMKKEDFDIYDEDENQSPRSFQKKTRHYFIAAVERLWDYGMSSSPHVLRNRAQSGSVPQFKKVVFQEFTDGSFTQPLYRGELNEHLGLLGPYIRAEVEDNIMVTFRNQASRPYSFYSSLISYEEDQRQGAEPRKNFVKPNETKTYFWKVQHHMAPTKDEFDCKAWAYFSDVDLEKDVHSGLIGPLLVCHTNTLNPAHGRQVTVQEFALFFTIFDETKSWYFTENMERNCRAPCNIQMEDPTFKENYRFHAINGYIMDTLPGLVMAQDQRIRWYLLSMGSNENIHSIHFSGHVFTVRKKEEYKMALYNLYPGVFETVEMLPSKAGIWRVECLIGEHLHAGMSTLFLVYSNKCQTPLGMASGHIRDFQITASGQYGQWAPKLARLHYSGSINAWSTKEPFSWIKVDLLAPMIIHGIKTQGARQKFSSLYISQFIIMYSLDGKKWQTYRGNSTGTDMVFFGNVDSSGIKHNIFNPPIIARYIRLHPTHYSIRSTLRMELMGCDLNSCSMPLGMESKAISDAQITASSYFTNMFATWSPSKARLHLQGRSNAWRPQVNNPKEWLQVDFQKTMKVTGVTTQGVKSLDTSMYVKEFLISSSQDGHQWTLFFQNGKVKVFQGNQDSFTPVVNSLDPPLLTRYLRIHPQSWETQIALRMEVLGCEAQDLY

SEQ ID NO: 703 - DNA, 4371 bp, synthetic construct
  misc_feature 1..4371: note = Variant of human B-domain deleted Factor VIII
  source 1..4371: mol_type = other DNA
atgcagattgaactgtctacctgcttcttcctctgtttgctgaggttctgctttagcgccactagacggtactaccttggcgctgtggagctgtcctgggactatatgcagagtgatttgggagagcttcccgtcgacgcacgatttcctcctcgcgttccaaagtcatttcccttcaacacaagcgtggtgtacaagaagacgctcttcgtcgaattcaccgatcacctgttcaatatcgccaaacccagaccaccatggatgggtcttttggggcctaccatacaagcggaggtgtatgacacagttgttatcactctcaagaacatggcttctcatccggtaagtcttcacgcagtgggcgtgtcctactggaaagcttcagaaggagccgagtatgatgatcagacatcccagagggagaaagaagacgacaaggtatttccaggtgggtctcatacctatgtgtggcaagtgctcaaagagaatggccctatggcaagcgatccgctctgtttgacttacagctacctttcacacgttgacctcgtcaaggacctcaactccgggttgattggagccttgttggtatgcagggaaggatctcttgccaaagagaagacacagaccctccacaagtttatccttctctttgctgtgttcgatgagggcaaaagttggcatagcgaaacgaagaattccctcatgcaggatcgcgacgcagccagcgccagagcttggcccaagatgcacactgtgaacggatatgtcaataggacgcttcctggcttgattgggtgtcatcggaaaagtgtctactggcacgtgatcggaatggggacaacaccagaggtccactccatatttctcgaaggccataccttccttgttcgaaaccacagacaggcatccttggagatctctcccattacctttctcactgcccaaacgctccttatggacttgggtcagttccttctcttctgccatatcagctcacaccagcatgatggtatggaagcttatgtgaaagtcgacagttgtcctgaggagccacagttgcgcatgaagaataatgaagaagccgaggattacgacgacgatctcaccgattctgagatggacgtggtgaggtttgatgacgacaactctccctccttcattcaaatccggagcgtggcgaagaaacaccccaagacttgggtccactatatagcggcggaagaggaggattgggattacgctcctcttgtattggcaccagatgaccgctcatacaaaagccagtacctcaacaacggaccgcagagaattggccggaagtataagaaagtgcgatttatggcctatacagacgaaacctttaagacaagggaggccatccagcatgagagtgggattttgggacctcttctttacggcgaagttggtgataccctcctcatcatcttcaagaatcaagcttctcgcccctataacatttacccacacgggatcactgacgttaggcctttgtatagcagaagacttcccaaaggcgtgaagcatctcaaagacttccccattttgccaggcgagatctttaagtacaaatggaccgtcacagtggaagatggaccgactaaatcagaccctcgatgccttacgcggtactattcctccttcgtgaatatggagagagatttggcaagcggactcataggaccactcctcatctgttacaaggaatctgtagaccagaggggtaaccagattatgagtgataaacgcaatgtgatcctttttagcgtcttcgacgagaaccggtcctggtacttgaccgagaatatacaaaggttccttcccaaccccgcaggcgttcagttggaagaccctgagtttcaggccagcaatattatgcactcaatcaacggctatgtgtttgatagtctccagctttctgtttgcctccatgaagtagcctattggtacatcttgtcaattggtgctcaaacagacttcctctccgtcttcttctccggctacacctttaagcacaagatggtgtatgaggacactctcacactctttccattttctggagaaaccgtgttcatgagcatggagaatccaggcctttggatcttgggttgccacaacagtgattttcgcaatcggggaatgactgctctcctcaaagtcagcagctgtgataagaacacaggcgactattacgaagattcttacgaggacataagtgcctacttgctgtccaagaataacgccattgagcccagatcattctcccagaatcctcccgtgcttaaaaggcatcagcgcgaaatcaccagaactactcttcagtctgatcaagaggagattgactatgacgacaccataagcgtggaaatgaagaaggaggatttcgatatctatgacgaagatgagaaccagtctccgcggagctttcagaagaagacgcgacactacttcattgcagcagtcgaaaggctttgggactacggtatgtcatcatcccctcatgtgttgcgcaatagagctcagagtggaagtgttccacagttcaagaaagtcgtctttcaagagtttacagatggcagcttcacacagcctctctatcggggcgagcttaacgaacatttgggactccttggtccctatatccgagccgaagtggaggacaacattatggttacctttaggaatcaagcctctcgcccctacagcttctactcctccctcatcagttatgaggaggatcagagacaaggcgctgaaccacggaagaactttgtgaaaccgaatgagacgaagacctacttctggaaagtacagcaccacatggcccccacaaaagacgaattcgattgcaaagcatgggcgtatttttcagacgttgacttggagaaagatgtacattcaggacttattggtcctttgttggtgtgtcacactaacactctcaatccagcccatggcaggcaggtgacagtccaggaattcgctcttttctttaccatctttgatgagaccaagtcctggtacttcacggaaaacatggagcgcaattgcagagccccctgtaacatacagatggaggaccctacctttaaggaaaattatcggttccacgcaatcaacggatacattatggatacactccctggccttgtgatggctcaggaccaacgaatcaggtggtacctcctcagcatgggttctaatgagaacatacactccattcacttttcaggacatgtgttcactgtccggaagaaagaagagtataagatggccctctacaatttgtatccaggcgtgtttgagaccgttgaaatgcttccctctaaagctggcatctggagagtagagtgcttgatcggagaacatcttcacgcaggtatgagcaccttgttcctcgtgtacagcaacaaatgtcagaacccacttggcatggccagtggacacattcgcgactttcagatcacagcatctggccagtatggacaatgggccccaaagttggctcgcctccattactccggtagcataaatgcgtggtccactaaagaacctttcagctggattaaggtcgatcttcttgcccccatgatcatccacggcattaagacacagggagcgaggcagaaattctcctccctctacatctcacagttcattattatgtatagtttggacggcaagaagtggcaaacttatagaggtaacagtactggaacactcatggtgttcttcggcaacgttgatagctctggcatcaaacacaacatctttaatcctcccataatagctcggtacatcagattgcatccgacccactacagcattaggagtacactccgaatggagcttatgggttgcgacttgaattcctgttcaatgccactcggaatggagtctaaagccatctctgatgcacagataaccgccagtagctactttacgaacatgtttgctacgtggtcaccctctaaggcaaggcttcatttgcaaggccggtctaatgcctggagacctcaggtgaacaacccgaaagaatggctccaggtggactttcagaagaccatgaaagtaacaggtgtcactactcagggagttaagtccttggatgatagcatgtatgtgaaggagttccttatttcctcatcacaagatggccaccagtggaccctcttctttcagaatggtaaggtcaaagtgtttcagggcaatcaagacagcttcacacccgtggtgaacagtcttgatcctccactcttgacacgataccttcgaatccatccacagtcttgggagcaccagattgcattgcgcatggaagtacttggatgcgaggctcaggacctctac

SEQ ID NO: 704 - protein, 1457 aa, synthetic construct
  REGION 1..1457: note = Variant of human B-domain deleted Factor VIII
MQIELSTCFFLCLLRFCFSATRRYYLGAVELSWDYMQSDLGELPVDARFPPRVPKSFPFNTSVVYKKTLFVEFTDHLFNIAKPRPPWMGLLGPTIQAEVYDTVVITLKNMASHPVSLHAVGVSYWKASEGAEYDDQTSQREKEDDKVFPGGSHTYVWQVLKENGPMASDPLCLTYSYLSHVDLVKDLNSGLIGALLVCREGSLAKEKTQTLHKFILLFAVFDEGKSWHSETKNSLMQDRDAASARAWPKMHTVNGYVNRTLPGLIGCHRKSVYWHVIGMGTTPEVHSIFLEGHTFLVRNHRQASLEISPITFLTAQTLLMDLGQFLLFCHISSHQHDGMEAYVKVDSCPEEPQLRMKNNEEAEDYDDDLTDSEMDVVRFDDDNSPSFIQIRSVAKKHPKTWVHYIAAEEEDWDYAPLVLAPDDRSYKSQYLNNGPQRIGRKYKKVRFMAYTDETFKTREAIQHESGILGPLLYGEVGDTLLIIFKNQASRPYNIYPHGITDVRPLYSRRLPKGVKHLKDFPILPGEIFKYKWTVTVEDGPTKSDPRCLTRYYSSFVNMERDLASGLIGPLLICYKESVDQRGNQIMSDKRNVILFSVFDENRSWYLTENIQRFLPNPAGVQLEDPEFQASNIMHSINGYVFDSLQLSVCLHEVAYWYILSIGAQTDFLSVFFSGYTFKHKMVYEDTLTLFPFSGETVFMSMENPGLWILGCHNSDFRNRGMTALLKVSSCDKNTGDYYEDSYEDISAYLLSKNNAIEPRSFSQNPPVLKRHQREITRTTLQSDQEEIDYDDTISVEMKKEDFDIYDEDENQSPRSFQKKTRHYFIAAVERLWDYGMSSSPHVLRNRAQSGSVPQFKKVVFQEFTDGSFTQPLYRGELNEHLGLLGPYIRAEVEDNIMVTFRNQASRPYSFYSSLISYEEDQRQGAEPRKNFVKPNETKTYFWKVQHHMAPTKDEFDCKAWAYFSDVDLEKDVHSGLIGPLLVCHTNTLNPAHGRQVTVQEFALFFTIFDETKSWYFTENMERNCRAPCNIQMEDPTFKENYRFHAINGYIMDTLPGLVMAQDQRIRWYLLSMGSNENIHSIHFSGHVFTVRKKEEYKMALYNLYPGVFETVEMLPSKAGIWRVECLIGEHLHAGMSTLFLVYSNKCQNPLGMASGHIRDFQITASGQYGQWAPKLARLHYSGSINAWSTKEPFSWIKVDLLAPMIIHGIKTQGARQKFSSLYISQFIIMYSLDGKKWQTYRGNSTGTLMVFFGNVDSSGIKHNIFNPPIIARYIRLHPTHYSIRSTLRMELMGCDLNSCSMPLGMESKAISDAQITASSYFTNMFATWSPSKARLHLQGRSNAWRPQVNNPKEWLQVDFQKTMKVTGVTTQGVKSLDDSMYVKEFLISSSQDGHQWTLFFQNGKVKVFQGNQDSFTPVVNSLDPPLLTRYLRIHPQSWEHQIALRMEVLGCEAQDLY

SEQ ID NO: 705 - DNA, 4371 bp, synthetic construct
  misc_feature 1..4371: note = Variant of human B-domain deleted Factor VIII
  source 1..4371: mol_type = other DNA
atgcagattgaactgtctacctgcttcttcctctgtttgctgaggttctgctttagcgccactagacggtactaccttggcgctgtggagctgtcctgggactatatgcagagtgatttgggagagcttcccgtcgacgcacgatttcctcctcgcgttccaaagtcatttccctttaacacaagcgtggtgtacaagaagacgctcttcgtcgaattcaccgatcacctgttcaatatcgccaaacccagaccaccatggatgggtcttttggggcctaccatacaagcggaggtgtatgacacagttgttatcactctcaagaacatggcttctcatccggtaagtcttcacgcagtgggcgtgtcctactggaaagcttcagaaggagccgagtatgatgatcagacatcccagagggagaaagaagacgacaaggtatttccaggtgggtctcatacctatgtgtggcaagtgctcaaagagaatggccctatggcaagcgatccgccgtgtttgacttacagctacctttcacacgttgacctcgtcaaggacctcaactccgggttgattggagccttgttggtatgcagggaaggatctcttgccaaagagaagacacagaccctccacaagtttatccttctctttgctgtgttcgatgagggcaaaagttggcatagcgaaacgaagaattccctcatgcaggatcgcgacgcagccagcgccagagcttggcccaagatgcacactgtgaacggatatgtcaataggacgcttcctggcttgattgggtgtcatcggaaaagtgtctactggcacgtgatcggaatggggacaacaccagaggtccactccatatttctcgaaggccataccttccttgttcgaaaccacagacaggcatccttggagatctctcccattacctttctcactgcccaaacgctccttatggacttgggtcagttccttctcttctgccatatcagctcacaccagcatgatggtatggaagcttatgtgaaagtcgacagttgtcctgaggagccacagttgcgcatgaagaataatgaagaagccgaggattacgacgacgatctcaccgattctgagatggacgtggtgaggtttgatgacgacaactctccctccatcattcaaatccggagcgtggcgaagaaacaccccaagacttgggtccactatatagcggcggaagaggaggattgggattacgctcctcttgtattggcaccagatgaccgctcatacaaaagccagtacctcaacaacggaccgcagagaattggccggaagtataagaaagtgcgatttatggcctatacagacgaaacctttaagacaagggaggccatccagcatgagagtgggattttgggacctcttctttacggcgaagttggtgataccctcctcatcatcttcaagaatcaagcttctcgcccctataacatttacccacacgggatcactgacgttaggcctttgtatagcagaagacttcccaaaggcgtgaagcatctcaaagacttccccattttgccaggcgagatctttaagtacaaatggaccgtcacagtggaagatggaccgactaaatcagaccctcgatgccttacgcggtactattcctccttcgtgaatatggagagagatttggcaagcggactcataggaccactcctcatctgttacaaggaatctgtagaccagaggggtaaccagattatgagtgataaacgcaatgtgatcctttttagcgtcttcgacgagaaccggtcctggtacttgaccgagaatatacaaaggttccttcccaaccccgcaggcgttcagttggaagaccctgagtttcaggccagcaatattatgcactcaatcaacggctatgtgtttgatagtctccagctttctgtttgcctccatgaagtagcctattggtacatcttgtcaattggtgctcaaacagacttcctctccgtcttcttctccggctacacctttaagcacaagatggtgtatgaggacactctcacactctttccattttctggagaaaccgtgttcatgagcatggagaatccaggcctttggatcttgggttgccacaacagtgattttcgcaatcggggaatgactgctctcctcaaagtcagcagctgtgataagaacacaggcgactattacgaagattcttacgaggacataagtgcctacttggactccaagaataacgccattgagcccagatcattctcccagaatcctcccgtgcttaaaaggcatcagcgcgaaatcaccagaactactcttcagtctgatcaagaggagattgactatgacgacaccataagcgtggaaatgaagaaggaggatttcgatatctatgacgaagatgagaaccagtctccgcggagctttcagaagaagacgcgacactacttcattgcagcagtcgaaaggctttgggactacggtatgtcatcatcccctcatgtgttgcgcaatagagctcagagtggaagtgttccacagttcaagaaagtcgtctttcaagagtttacagatggcagcttcacacagcctctctatcggggcgagcttaacgaacatttgggactccttggtccctatatccgagccgaagtggaggacaacattatggttacctttaggaatcaagcctctcgcccctacagcttctactcctccctcatcagttatgaggaggatcagagacaaggcgctgaaccacggaagaactttgtgaaaccgaatgagacgaagacctacttctggaaagtacagcaccacatggcccccacaaaagacgaattcgattgcaaagcatgggcgtatttttcagacgttgacttggagaaagatgtacattcaggacttattggtcctttgttggtgtgtcacactaacactctcaatccagcccatggcaggcaggtgacagtccaggaattcgctcttttctttaccatctttgatgagaccaagtcctggtacttcacggaaaacatggagcgcaattgcagagccccctgtaacatacagatggaggaccctacctttaaggaaaattatcggttccacgcaatcaacggatacattatggatacactccctggccttgtgatggctcaggaccaacgaatcaggtggtacctcctcagcatgggttctaatgagaacatacactccattcacttttcaggacatgtgttcactgtccggaagaaagaagagtataagatggccctctacaatttgtatccaggcgtgtttgagaccgttgaaatgcttccctctaaagctggcatctggagagtagagtgcttgatcggagaacatcttcacgcaggtatgagcaccttgttcctcgtgtacagcaacaaatgtcagaccccacttggcatggccagtggacacattcgcgactttcagatcacagcatctggccagtatggacaatgggccccaaagttggctcgcctccattactccggtagcataaatgcgtggtccactaaagaacctttcagctggattaaggtcgatcttcttgcccccatgatcatccacggcattaagacacagggagcgaggcagaaattctcctccctctacatctcacagttcattattatgtatagtttggacggcaagaagtggcaaacttatagaggtaacagtactggaacagacatggtgttcttcggcaacgttgatagctctggcatcaaacacaacatctttaatcctcccataatagctcggtacatcagattgcatccgacccactacagcattaggagtacactccgaatggagcttatgggttgcgacttgaattcctgttcaatgccactcggaatggagtctaaagccatctctgatgcacagataaccgccagtagctactttacgaacatgtttgctacgtggtcaccctctaaggcaaggcttcatttgcaaggccggtctaatgcctggagacctcaggtgaacaacccgaaagaatggctccaggtggactttcagaagaccatgaaagtaacaggtgtcactactcagggagttaagtccttggatactagcatgtatgtgaaggagttccttatttcctcatcacaagatggccaccagtggaccctcttctttcagaatggtaaggtcaaagtgtttcagggcaatcaagacagcttcacacccgtggtgaacagtcttgatcctccactcttgacacgataccttcgaatccatccacagtcttgggagcaccagattgcattgcgcatggaagtacttggatgcgaggctcaggacctctac

SEQ ID NO: 706 - protein, 1457 aa, synthetic construct
  REGION 1..1457: note = Variant of human B-domain deleted Factor VIII
MQIELSTCFFLCLLRFCFSATRRYYLGAVELSWDYMQSDLGELPVDARFPPRVPKSFPFNTSVVYKKTLFVEFTDHLFNIAKPRPPWMGLLGPTIQAEVYDTVVITLKNMASHPVSLHAVGVSYWKASEGAEYDDQTSQREKEDDKVFPGGSHTYVWQVLKENGPMASDPPCLTYSYLSHVDLVKDLNSGLIGALLVCREGSLAKEKTQTLHKFILLFAVFDEGKSWHSETKNSLMQDRDAASARAWPKMHTVNGYVNRTLPGLIGCHRKSVYWHVIGMGTTPEVHSIFLEGHTFLVRNHRQASLEISPITFLTAQTLLMDLGQFLLFCHISSHQHDGMEAYVKVDSCPEEPQLRMKNNEEAEDYDDDLTDSEMDVVRFDDDNSPSIIQIRSVAKKHPKTWVHYIAAEEEDWDYAPLVLAPDDRSYKSQYLNNGPQRIGRKYKKVRFMAYTDETFKTREAIQHESGILGPLLYGEVGDTLLIIFKNQASRPYNIYPHGITDVRPLYSRRLPKGVKHLKDFPILPGEIFKYKWTVTVEDGPTKSDPRCLTRYYSSFVNMERDLASGLIGPLLICYKESVDQRGNQIMSDKRNVILFSVFDENRSWYLTENIQRFLPNPAGVQLEDPEFQASNIMHSINGYVFDSLQLSVCLHEVAYWYILSIGAQTDFLSVFFSGYTFKHKMVYEDTLTLFPFSGETVFMSMENPGLWILGCHNSDFRNRGMTALLKVSSCDKNTGDYYEDSYEDISAYLDSKNNAIEPRSFSQNPPVLKRHQREITRTTLQSDQEEIDYDDTISVEMKKEDFDIYDEDENQSPRSFQKKTRHYFIAAVERLWDYGMSSSPHVLRNRAQSGSVPQFKKVVFQEFTDGSFTQPLYRGELNEHLGLLGPYIRAEVEDNIMVTFRNQASRPYSFYSSLISYEEDQRQGAEPRKNFVKPNETKTYFWKVQHHMAPTKDEFDCKAWAYFSDVDLEKDVHSGLIGPLLVCHTNTLNPAHGRQVTVQEFALFFTIFDETKSWYFTENMERNCRAPCNIQMEDPTFKENYRFHAINGYIMDTLPGLVMAQDQRIRWYLLSMGSNENIHSIHFSGHVFTVRKKEEYKMALYNLYPGVFETVEMLPSKAGIWRVECLIGEHLHAGMSTLFLVYSNKCQTPLGMASGHIRDFQITASGQYGQWAPKLARLHYSGSINAWSTKEPFSWIKVDLLAPMIIHGIKTQGARQKFSSLYISQFIIMYSLDGKKWQTYRGNSTGTDMVFFGNVDSSGIKHNIFNPPIIARYIRLHPTHYSIRSTLRMELMGCDLNSCSMPLGMESKAISDAQITASSYFTNMFATWSPSKARLHLQGRSNAWRPQVNNPKEWLQVDFQKTMKVTGVTTQGVKSLDTSMYVKEFLISSSQDGHQWTLFFQNGKVKVFQGNQDSFTPVVNSLDPPLLTRYLRIHPQSWEHQIALRMEVLGCEAQDLY

SEQ ID NO: 707 - DNA, 4371 bp, synthetic construct
  misc_feature 1..4371: note = Variant of human B-domain deleted Factor VIII
  source 1..4371: mol_type = other DNA
atgcagattgaactgtctacctgcttcttcctctgtttgctgaggttctgctttagcgccactagacggtactaccttggcgctgtggagctgtcctgggactatatgcagagtgatttgggagagcttcccgtcgacgcacgatttcctcctcgcgttccaaagtcatttccctttaacacaagcgtggtgtacaagaagacgctcttcgtcgaattcaccgatcacctgttcaatatcgccaaacccagaccaccatggatgggtcttttggggcctaccatacaagcggaggtgtatgacacagttgttatcactctcaagaacatggcttctcatccggtaagtcttcacgcagtgggcgtgtcctactggaaagcttcagaaggagccgagtatgatgatcagacatcccagagggagaaagaagacgacaaggtatttccaggtgggtctcatacctatgtgtggcaagtgctcaaagagaatggccctatggcaagcgatccgccgtgtttgacttacagctacctttcacacgttgacctcgtcaaggacctcaactccgggttgattggagccttgttggtatgcagggaaggatctcttgccaaagagaagacacagaccctccacaagtttatccttctctttgctgtgttcgatgagggcaaaagttggcatagcgaaacgaagaattccctcatgcaggatcgcgacgcagccagcgccagagcttggcccaagatgcacactgtgaacggatatgtcaataggacgcttcctggcttgattgggtgtcatcggaaaagtgtctactggcacgtgatcggaatggggacaacaccagaggtccactccatatttctcgaaggccataccttccttgttcgaaaccacagacaggcatccttggagatctctcccattacctttctcactgcccaaacgctccttatggacttgggtcagttccttctcttctgccatatcagctcacaccagcatgatggtatggaagcttatgtgaaagtcgacagttgtcctgaggagccacagttgcgcatgaagaataatgaagaagccgaggattacgacgacgatctcaccgattctgagatggacgtggtgaggtttgatgacgacaactctccctccttcattcaaatccggagcgtggcgaagaaacaccccaagacttgggtccactatatagcggcggaagaggaggattgggattacgctcctcttgtattggcaccagatgaccgctcatacaaaagccagtacctcaacaacggaccgcagagaattggccggaagtataagaaagtgcgatttatggcctatacagacgaaacctttaagacaagggaggccatccagcatgagagtgggattttgggacctcttctttacggcgaagttggtgataccctcctcatcatcttcaagaatcaagcttctcgcccctataacatttacccacacgggatcactgacgttaggcctttgtatagcagaagacttcccaaaggcgtgaagcatctcaaagacttccccattttgccaggcgagatctttaagtacaaatggaccgtcacagtggaagatggaccgactaaatcagaccctcgatgccttacgcggtactattcctccttcgtgaatatggagagagatttggcaagcggactcataggaccactcctcatctgttacaaggaatctgtagaccagaggggtaaccagattatgagtgataaacgcaatgtgatcctttttagcgtcttcgacgagaaccggtcctggtacttgaccgagaatatacaaaggttccttcccaaccccgcaggcgttcagttggaagaccctgagtttcaggccagcaatattatgcactcaatcaacggctatgtgtttgatagtctccagctttctgtttgcctccatgaagtagcctattggtacatcttgtcaattggtgctcaaacagacttcctctccgtcttcttctccggctacacctttaagcacaagatggtgtatgaggacactctcacactctttccattttctggagaaaccgtgttcatgagcatggagaatccaggcctttggatcttgggttgccacaacagtgattttcgcaatcggggaatgactgctctcctcaaagtcagcagctgtgataagaacacaggcgactattacgaagattcttacgaggacataagtgcctacttgttgtccaagaataacgccattgagcccagatcattctcccagaatcctcccgtgcttaaaaggcatcagcgcgaaatcaccagaactactcttcagtctgatcaagaggagattgactatgacgacaccataagcgtggaaatgaagaaggaggatttcgatatctatgacgaagatgagaaccagtctccgcggagctttcagaagaagacgcgacactacttcattgcagcagtcgaaaggctttgggactacggtatgtcatcatcccctcatgtgttgcgcaatagagctcagagtggaagtgttccacagttcaagaaagtcgtctttcaagagtttacagatggcagcttcacacagcctctctatcggggcgagcttaacgaacatttgggactccttggtccctatatccgagccgaagtggaggacaacattatggttacctttaggaatcaagcctctcgcccctacagcttctactcctccctcatcagttatgaggaggatcagagacaaggcgctgaaccacggaagaactttgtgaaaccgaatgagacgaagacctacttctggaaagtacagcaccacatggcccccacaaaagacgaattcgattgcaaagcatgggcgtatttttcagacgttgacttggagaaagatgtacattcaggacttattggtcctttgttggtgtgtcacactaacactctcaatccagcccatggcaggcaggtgacagtccaggaattcgctcttttctttaccatctttgatgagaccaagtcctggtacttcacggaaaacatggagcgcaattgcagagccccctgtaacatacagatggaggaccctacctttaaggaaaattatcggttccacgcaatcaacggatacattatggatacactccctggccttgtgatggctcaggaccaacgaatcaggtggtacctcctcagcatgggttctaatgagaacatacactccattcacttttcaggacatgtgttcactgtccggaagaaagaagagtataagatggccctctacaatttgtatccaggcgtgtttgagaccgttgaaatgcttccctctaaagctggcatctggagagtagagtgcttgatcggagaacatcttcacgcaggtatgagcaccttgttcctcgtgtacagcaacaaatgtcagaccccacttggcatggccagtggacacattcgcgactttcagatcacagcatctggccagtatggacaatgggccccaaagttggctcgcctccattactccggtagcataaatgcgtggtccactaaagaacctttcagctggattaaggtcgatcttcttgcccccatgatcatccacggcattaagacacagggagcgaggcagaaattctcctccctctacatctcacagttcattattatgtatagtttggacggcaagaagtggcaaacttatagaggtaacagtactggaacactcatggtgttcttcggcaacgttgatagctctggcatcaaacacaacatctttaatcctcccataatagctcggtacatcagattgcatccgacccactacagcattaggagtacactccgaatggagcttatgggttgcgacttgaattcctgttcaatgccactcggaatggagtctaaagccatctctgatgcacagataaccgccagtagctactttacgaacatgtttgctacgtggtcaccctctaaggcaaggcttcatttgcaaggccggtctaatgcctggagacctcaggtgaacaacccgaaagaatggctccaggtggactttcagaagaccatgaaagtaacaggtgtcactactcagggagttaagtccttggataccagcatgtatgtgaaggagttccttatttcctcatcacaagatggccaccagtggaccctcttctttcagaatggtaaggtcaaagtgtttcagggcaatcaagacagcttcacacccgtggtgaacagtcttgatcctccactcttgacacgataccttcgaatccatccacagtcttgggagcaccagattgcattgcgcatggaagtacttggatgcgaggctcaggacctctac

SEQ ID NO: 708 - protein, 1457 aa, synthetic construct
  REGION 1..1457: note = Variant of human B-domain deleted Factor VIII
MQIELSTCFFLCLLRFCFSATRRYYLGAVELSWDYMQSDLGELPVDARFPPRVPKSFPFNTSVVYKKTLFVEFTDHLFNIAKPRPPWMGLLGPTIQAEVYDTVVITLKNMASHPVSLHAVGVSYWKASEGAEYDDQTSQREKEDDKVFPGGSHTYVWQVLKENGPMASDPPCLTYSYLSHVDLVKDLNSGLIGALLVCREGSLAKEKTQTLHKFILLFAVFDEGKSWHSETKNSLMQDRDAASARAWPKMHTVNGYVNRTLPGLIGCHRKSVYWHVIGMGTTPEVHSIFLEGHTFLVRNHRQASLEISPITFLTAQTLLMDLGQFLLFCHISSHQHDGMEAYVKVDSCPEEPQLRMKNNEEAEDYDDDLTDSEMDVVRFDDDNSPSFIQIRSVAKKHPKTWVHYIAAEEEDWDYAPLVLAPDDRSYKSQYLNNGPQRIGRKYKKVRFMAYTDETFKTREAIQHESGILGPLLYGEVGDTLLIIFKNQASRPYNIYPHGITDVRPLYSRRLPKGVKHLKDFPILPGEIFKYKWTVTVEDGPTKSDPRCLTRYYSSFVNMERDLASGLIGPLLICYKESVDQRGNQIMSDKRNVILFSVFDENRSWYLTENIQRFLPNPAGVQLEDPEFQASNIMHSINGYVFDSLQLSVCLHEVAYWYILSIGAQTDFLSVFFSGYTFKHKMVYEDTLTLFPFSGETVFMSMENPGLWILGCHNSDFRNRGMTALLKVSSCDKNTGDYYEDSYEDISAYLLSKNNAIEPRSFSQNPPVLKRHQREITRTTLQSDQEEIDYDDTISVEMKKEDFDIYDEDENQSPRSFQKKTRHYFIAAVERLWDYGMSSSPHVLRNRAQSGSVPQFKKVVFQEFTDGSFTQPLYRGELNEHLGLLGPYIRAEVEDNIMVTFRNQASRPYSFYSSLISYEEDQRQGAEPRKNFVKPNETKTYFWKVQHHMAPTKDEFDCKAWAYFSDVDLEKDVHSGLIGPLLVCHTNTLNPAHGRQVTVQEFALFFTIFDETKSWYFTENMERNCRAPCNIQMEDPTFKENYRFHAINGYIMDTLPGLVMAQDQRIRWYLLSMGSNENIHSIHFSGHVFTVRKKEEYKMALYNLYPGVFETVEMLPSKAGIWRVECLIGEHLHAGMSTLFLVYSNKCQTPLGMASGHIRDFQITASGQYGQWAPKLARLHYSGSINAWSTKEPFSWIKVDLLAPMIIHGIKTQGARQKFSSLYISQFIIMYSLDGKKWQTYRGNSTGTLMVFFGNVDSSGIKHNIFNPPIIARYIRLHPTHYSIRSTLRMELMGCDLNSCSMPLGMESKAISDAQITASSYFTNMFATWSPSKARLHLQGRSNAWRPQVNNPKEWLQVDFQKTMKVTGVTTQGVKSLDTSMYVKEFLISSSQDGHQWTLFFQNGKVKVFQGNQDSFTPVVNSLDPPLLTRYLRIHPQSWEHQIALRMEVLGCEAQDLY

SEQ ID NO: 709 - DNA, 4371 bp, synthetic construct
  misc_feature 1..4371: note = Variant of human B-domain deleted Factor VIII
  source 1..4371: mol_type = other DNA
atgcagattgaactgtctacctgcttcttcctctgtttgctgaggttctgctttagcgccactagacggtactaccttggcgctgtggagctgtcctgggactatatgcagagtgatttgggagagcttcccgtcgacgcacgatttcctcctcgcgttccaaagtcatttccctttaacacaagcgtggtgtacaagaagacgctcttcgtcgaattcaccgatcacctgttcaatatcgccaaacccagaccaccatggatgggtcttttggggcctaccatacaagcggaggtgtatgacacagttgttatcactctcaagaacatggcttctcatccggtaagtcttcacgcagtgggcgtgtcctactggaaagcttcagaaggagccgagtatgatgatcagacatcccagagggagaaagaagacgacaaggtatttccaggtgggtctcatacctatgtgtggcaagtgctcaaagagaatggccctatggcaagcgatccgccgtgtttgacttacagctacctttcacacgttgacctcgtcaaggacctcaactccgggttgattggagccttgttggtatgcagggaaggatctcttgccaaagagaagacacagaccctccacaagtttatccttctctttgctgtgttcgatgagggcaaaagttggcatagcgaaacgaagaattccctcatgcaggatcgcgacgcagccagcgccagagcttggcccaagatgcacactgtgaacggatatgtcaataggacgcttcctggcttgattgggtgtcatcggaaaagtgtctactggcacgtgatcggaatggggacaacaccagaggtccactccatatttctcgaaggccataccttccttgttcgaaaccacagacaggcatccttggagatctctcccattacctttctcactgcccaaacgctccttatggacttgggtcagttccttctcttctgccatatcagctcacaccagcatgatggtatggaagcttatgtgaaagtcgacagttgtcctgaggagccacagttgcgcatgaagaataatgaagaagccgaggattacgacgacgatctcaccgattctgagatggacgtggtgaggtttgatgacgacaactctccctccatcattcaaatccggagcgtggcgaagaaacaccccaagacttgggtccactatatagcggcggaagaggaggattgggattacgctcctcttgtattggcaccagatgaccgctcatacaaaagccagtacctcaacaacggaccgcagagaattggccggaagtataagaaagtgcgatttatggcctatacagacgaaacctttaagacaagggaggccatccagcatgagagtgggattttgggacctcttctttacggcgaagttggtgataccctcctcatcatcttcaagaatcaagcttctcgcccctataacatttacccacacgggatcactgacgttaggcctttgtatagcagaagacttcccaaaggcgtgaagcatctcaaagacttccccattttgccaggcgagatctttaagtacaaatggaccgtcacagtggaagatggaccgactaaatcagaccctcgatgccttacgcggtactattcctccttcgtgaatatggagagagatttggcaagcggactcataggaccactcctcatctgttacaaggaatctgtagaccagaggggtaaccagattatgagtgataaacgcaatgtgatcctttttagcgtcttcgacgagaaccggtcctggtacttgaccgagaatatacaaaggttccttcccaaccccgcaggcgttcagttggaagaccctgagtttcaggccagcaatattatgcactcaatcaacggctatgtgtttgatagtctccagctttctgtttgcctccatgaagtagcctattggtacatcttgtcaattggtgctcaaacagacttcctctccgtcttcttctccggctacacctttaagcacaagatggtgtatgaggacactctcacactctttccattttctggagaaaccgtgttcatgagcatggagaatccaggcctttggatcttgggttgccacaacagtgattttcgcaatcggggaatgactgctctcctcaaagtcagcagctgtgataagaacacaggcgactattacgaagattcttacgaggacataagtgcctacttggactccaagaataacgccattgagcccagatcattctcccagaatcctcccgtgcttaaaaggcatcagcgcgaaatcaccagaactactcttcagtctgatcaagaggagattgactatgacgacaccataagcgtggaaatgaagaaggaggatttcgatatctatgacgaagatgagaaccagtctccgcggagctttcagaagaagacgcgacactacttcattgcagcagtcgaaaggctttgggactacggtatgtcatcatcccctcatgtgttgcgcaatagagctcagagtggaagtgttccacagttcaagaaagtcgtctttcaagagtttacagatggcagcttcacacagcctctctatcggggcgagcttaacgaacatttgggactccttggtccctatatccgagccgaagtggaggacaacattatggttacctttaggaatcaagcctctcgcccctacagcttctactcctccctcatcagttatgaggaggatcagagacaaggcgctgaaccacggaagaactttgtgaaaccgaatgagacgaagacctacttctggaaagtacagcaccacatggcccccacaaaagacgaattcgattgcaaagcatgggcgtatttttcagacgttgacttggagaaagatgtacattcaggacttattggtcctttgttggtgtgtcacactaacactctcaatccagcccatggcaggcaggtgacagtccaggaattcgctcttttctttaccatctttgatgagaccaagtcctggtacttcacggaaaacatggagcgcaattgcagagccccctgtaacatacagatggaggaccctacctttaaggaaaattatcggttccacgcaatcaacggatacattagcgatacactccctggccttgtgatggctcaggaccaacgaatcaggtggtacctcctcagcatgggttctaatgagaacatacactccattcacttttcaggacatgtgttcactgtccggaagaaagaagagtataagatggccctctacaatttgtatccaggcgtgtttgagaccgttgaaatgcttccctctaaagctggcatctggagagtagagtgcttgatcggagaacatcttcacgcaggtatgagcaccttgttcctcgtgtacagcaacaaatgtcagaacccacttggcatggccagtggacacattcgcgactttcagatcacagcatctggccagtatggacaatgggccccaaagttggctcgcctccattactccggtagcataaatgcgtggtccactaaagaacctttcagctggattaaggtcgatcttcttgcccccatgatcatccacggcattaagacacagggagcgaggcagaaattctcctccctgtacatctcacagttcattattatgtatagtttggacggcaagaagtggcaaacttatagaggtaacagtactggaacactcatggtgttcttcggcaacgttgatagctctggcatcaaacacaacatctttaatcctcccataatagctcggtacatcagattgcatccgacccactacagcattaggagtacactccgaatggagcttatgggttgcgacttgaattcctgttcaatgccactcggaatggagtctaaagccatctctgatgcacagataaccgccagtagctactttacgaacatgtttgctacgtggtcaccctctaaggcaaggcttcatttgcaaggccggtctaatgcctggagacctcaggtgaacaacccgaaagaatggctccaggtggactttcagaagaccatgaaagtaacaggtgtcactactcagggagttaagtccttggataccagcatgtatgtgaaggagttccttatttcctcatcacaagatggccaccagtggaccctcttctttcagaatggtaaggtcaaagtgtttcagggcaatcaagacagcttcacacccgtggtgaacagtcttgatcctccactcttgacacgataccttcgaatccatccacagtcttgggagcaccagattgcattgcgcatggaagtacttggatgcgaggctcaggacctctac

SEQ ID NO: 710 - protein, 1457 aa, synthetic construct
  REGION 1..1457: note = Variant of human B-domain deleted Factor VIII
MQIELSTCFFLCLLRFCFSATRRYYLGAVELSWDYMQSDLGELPVDARFPPRVPKSFPFNTSVVYKKTLFVEFTDHLFNIAKPRPPWMGLLGPTIQAEVYDTVVITLKNMASHPVSLHAVGVSYWKASEGAEYDDQTSQREKEDDKVFPGGSHTYVWQVLKENGPMASDPPCLTYSYLSHVDLVKDLNSGLIGALLVCREGSLAKEKTQTLHKFILLFAVFDEGKSWHSETKNSLMQDRDAASARAWPKMHTVNGYVNRTLPGLIGCHRKSVYWHVIGMGTTPEVHSIFLEGHTFLVRNHRQASLEISPITFLTAQTLLMDLGQFLLFCHISSHQHDGMEAYVKVDSCPEEPQLRMKNNEEAEDYDDDLTDSEMDVVRFDDDNSPSIIQIRSVAKKHPKTWVHYIAAEEEDWDYAPLVLAPDDRSYKSQYLNNGPQRIGRKYKKVRFMAYTDETFKTREAIQHESGILGPLLYGEVGDTLLIIFKNQASRPYNIYPHGITDVRPLYSRRLPKGVKHLKDFPILPGEIFKYKWTVTVEDGPTKSDPRCLTRYYSSFVNMERDLASGLIGPLLICYKESVDQRGNQIMSDKRNVILFSVFDENRSWYLTENIQRFLPNPAGVQLEDPEFQASNIMHSINGYVFDSLQLSVCLHEVAYWYILSIGAQTDFLSVFFSGYTFKHKMVYEDTLTLFPFSGETVFMSMENPGLWILGCHNSDFRNRGMTALLKVSSCDKNTGDYYEDSYEDISAYLDSKNNAIEPRSFSQNPPVLKRHQREITRTTLQSDQEEIDYDDTISVEMKKEDFDIYDEDENQSPRSFQKKTRHYFIAAVERLWDYGMSSSPHVLRNRAQSGSVPQFKKVVFQEFTDGSFTQPLYRGELNEHLGLLGPYIRAEVEDNIMVTFRNQASRPYSFYSSLISYEEDQRQGAEPRKNFVKPNETKTYFWKVQHHMAPTKDEFDCKAWAYFSDVDLEKDVHSGLIGPLLVCHTNTLNPAHGRQVTVQEFALFFTIFDETKSWYFTENMERNCRAPCNIQMEDPTFKENYRFHAINGYISDTLPGLVMAQDQRIRWYLLSMGSNENIHSIHFSGHVFTVRKKEEYKMALYNLYPGVFETVEMLPSKAGIWRVECLIGEHLHAGMSTLFLVYSNKCQNPLGMASGHIRDFQITASGQYGQWAPKLARLHYSGSINAWSTKEPFSWIKVDLLAPMIIHGIKTQGARQKFSSLYISQFIIMYSLDGKKWQTYRGNSTGTLMVFFGNVDSSGIKHNIFNPPIIARYIRLHPTHYSIRSTLRMELMGCDLNSCSMPLGMESKAISDAQITASSYFTNMFATWSPSKARLHLQGRSNAWRPQVNNPKEWLQVDFQKTMKVTGVTTQGVKSLDTSMYVKEFLISSSQDGHQWTLFFQNGKVKVFQGNQDSFTPVVNSLDPPLLTRYLRIHPQSWEHQIALRMEVLGCEAQDLY

SEQ ID NO: 711 - DNA, 4371 bp, synthetic construct
  misc_feature 1..4371: note = Variant of human B-domain deleted Factor VIII
  source 1..4371: mol_type = other DNA
atgcagattgaactgtctacctgcttcttcctctgtttgctgaggttctgctttagcgccactagacggtactaccttggcgctgtggagctgtcctgggactatatgcagagtgatttgggagagcttcccgtcgacgcacgatttcctcctcgcgttccaaagtcatttcccttcaacacaagcgtggtgtacaagaagacgctcttcgtcgaattcaccgatcacctgttcaatatcgccaaacccagaccaccatggatgggtcttttggggcctaccatacaagcggaggtgtatgacacagttgttatcactctcaagaacatggcttctcatccggtaagtcttcacgcagtgggcgtgtcctactggaaagcttcagaaggagccgagtatgatgatcagacatcccagagggagaaagaagacgacaaggtatttccaggtgggtctcatacctatgtgtggcaagtgctcaaagagaatggccctatggcaagcgatccgccgtgtttgacttacagctacctttcacacgttgacctcgtcaaggacctcaactccgggttgattggagccttgttggtatgcagggaaggatctcttgccaaagagaagacacagaccctccacaagtttatccttctctttgctgtgttcgatgagggcaaaagttggcatagcgaaacgaagaattccctcatgcaggatcgcgacgcagccagcgccagagcttggcccaagatgcacactgtgaacggatatgtcaataggtcacttcctggcttgattgggtgtcatcggaaaagtgtctactggcacgtgatcggaatggggacaacaccagaggtccactccatatttctcgaaggccataccttccttgttcgaaaccacagacaggcatccttggagatctctcccattacctttctcactgcccaaacgctccttatggacttgggtcagttccttctcttctgccatatcagctcacaccagcatgatggtatggaagcttatgtgaaagtcgacagttgtcctgaggagccacagttgcgcatgaagaataatgaagaagccgaggattacgacgacgatctcaccgattctgagatggacgtggtgaggtttgatgacgacaactctccctccttcattcaaatccggagcgtggcgaagaaacaccccaagacttgggtccactatatagcggcggaagaggaggattgggattacgctcctcttgtattggcaccagatgaccgctcatacaaaagccagtacctcaacaacggaccgcagagaattggccggaagtataagaaagtgcgatttatggcctatacagacgaaacctttaagacaagggaggccatccagcatgagagtgggattttgggacctcttctttacggcgaagttggtgataccctcctcatcatcttcaagaatcaagcttctcgcccctataacatttacccacacgggatcactgacgttaggcctttgtatagcagaagacttcccaaaggcgtgaagcatctcaaagacttccccattttgccaggcgagatctttaagtacaaatggaccgtcacagtggaagatggaccgactaaatcagaccctcgatgccttacgcggtactattcctccttcgtgaatatggagagagatttggcaagcggactcataggaccactcctcatctgttacaaggaatctgtagaccagaggggtaaccagattatgagtgataaacgcaatgtgatcctttttagcgtcttcgacgagaaccggtcctggtacttgaccgagaatatacaaaggttccttcccaaccccgcaggcgttcagttggaagaccctgagtttcaggccagcaatattatgcactcaatcaacggctatgtgtttgatagtctccagctttctgtttgcctccatgaagtagcctattggtacatcttgtcaattggtgctcaaacagacttcctctccgtcttcttctccggctacacctttaagcacaagatggtgtatgaggacactctcacactctttccattttctggagaaaccgtgttcatgagcatggagaatccaggcctttggatcttgggttgccacaacagtgattttcgcaatcggggaatgactgctctcctcaaagtcagcagctgtgataagaacacaggcgactattacgaagattcttacgaggacataagtgcctacttgttgtccaagaataacgccattgagcccagatcattctcccagaatcctcccgtgcttaaaaggcatcagcgcgaaatcaccagaactactcttcagtctgatcaagaggagattgactatgacgacaccataagcgtggaaatgaagaaggaggatttcgatatctatgacgaagatgagaaccagtctccgcggagctttcagaagaagacgcgacactacttcattgcagcagtcgaaaggctttgggactacggtatgtcatcatcccctcatgtgttgcgcaatagagctcagagtggaagtgttccacagttcaagaaagtcgtctttcaagagtttacagatggcagcttcacacagcctctctatcggggcgagcttaacgaacatttgggactccttggtccctatatccgagccgaagtggaggacaacattatggttacctttaggaatcaagcctctcgcccctacagcttctactcctccctcatcagttatgaggaggatcagagacaaggcgctgaaccacggaagaactttgtgaaaccgaatgagacgaagacctacttctggaaagtacagcaccacatggcccccacaaaagacgaattcgattgcaaagcatgggcgtatttttcagacgttgacttggagaaagatgtacattcaggacttattggtcctttgttggtgtgtcacactaacactctcaatccagcccatggcaggcaggtgacagtccaggaattcgctcttttctttaccatctttgatgagaccaagtcctggtacttcacggaaaacatggagcgcaattgcagagccccctgtaacatacagatggaggaccctacctttaaggaaaattatcggttccacgcaatcaacggatacattatggatacactccctggccttgtgatggctcaggaccaacgaatcaggtggtacctcctcagcatgggttctaatgagaacatacactccattcacttttcaggacatgtgttcactgtccggaagaaagaagagtataagatggccctctacaatttgtatccaggcgtgtttgagaccgttgaaatgcttccctctaaagctggcatctggagagtagagtgcttgatcggagaacatcttcacgcaggtatgagcaccttgttcctcgtgtacagcaacaaatgtcagaccccacttggcatggccagtggacacattcgcgactttcagatcacagcatctggccagtatggacaatgggccccaaagttggctcgcctccattactccggtagcataaatgcgtggtccactaaagaacctttcagctggattaaggtcgatcttcttgcccccatgatcatccacggcattaagacacagggagcgaggcagaaattctcctccctctacatctcacagttcattattatgtatagtttggacggcaagaagtggcaaacttatagaggtaacagtactggaacactcatggtgttcttcggcaacgttgatagctctggcatcaaacacaacatctttaatcctcccataatagctcggtacatcagattgcatccgacccactacagcattaggagtacactccgaatggagcttatgggttgcgacttgaattcctgttcaatgccactcggaatggagtctaaagccatctctgatgcacagataaccgccagtagctactttacgaacatgtttgctacgtggtcaccctctaaggcaaggcttcatttgcaaggccggtctaatgcctggagacctcaggtgaacaacccgaaagaatggctccaggtggactttcagaagaccatgaaagtaacaggtgtcactactcagggagttaagtccttggataccagcatgtatgtgaaggagttccttatttcctcatcacaagatggccaccagtggaccctcttctttcagaatggtaaggtcaaagtgtttcagggcaatcaagacagcttcacacccgtggtgaacagtcttgatcctccactcttgacacgataccttcgaatccatccacagtcttgggagcaccagattgcattgcgcatggaagtacttggatgcgaggctcaggacctctac

SEQ ID NO: 712 - protein, 1457 aa, synthetic construct
  REGION 1..1457: note = Variant of human B-domain deleted Factor VIII
MQIELSTCFFLCLLRFCFSATRRYYLGAVELSWDYMQSDLGELPVDARFPPRVPKSFPFNTSVVYKKTLFVEFTDHLFNIAKPRPPWMGLLGPTIQAEVYDTVVITLKNMASHPVSLHAVGVSYWKASEGAEYDDQTSQREKEDDKVFPGGSHTYVWQVLKENGPMASDPPCLTYSYLSHVDLVKDLNSGLIGALLVCREGSLAKEKTQTLHKFILLFAVFDEGKSWHSETKNSLMQDRDAASARAWPKMHTVNGYVNRSLPGLIGCHRKSVYWHVIGMGTTPEVHSIFLEGHTFLVRNHRQASLEISPITFLTAQTLLMDLGQFLLFCHISSHQHDGMEAYVKVDSCPEEPQLRMKNNEEAEDYDDDLTDSEMDVVRFDDDNSPSFIQIRSVAKKHPKTWVHYIAAEEEDWDYAPLVLAPDDRSYKSQYLNNGPQRIGRKYKKVRFMAYTDETFKTREAIQHESGILGPLLYGEVGDTLLIIFKNQASRPYNIYPHGITDVRPLYSRRLPKGVKHLKDFPILPGEIFKYKWTVTVEDGPTKSDPRCLTRYYSSFVNMERDLASGLIGPLLICYKESVDQRGNQIMSDKRNVILFSVFDENRSWYLTENIQRFLPNPAGVQLEDPEFQASNIMHSINGYVFDSLQLSVCLHEVAYWYILSIGAQTDFLSVFFSGYTFKHKMVYEDTLTLFPFSGETVFMSMENPGLWILGCHNSDFRNRGMTALLKVSSCDKNTGDYYEDSYEDISAYLLSKNNAIEPRSFSQNPPVLKRHQREITRTTLQSDQEEIDYDDTISVEMKKEDFDIYDEDENQSPRSFQKKTRHYFIAAVERLWDYGMSSSPHVLRNRAQSGSVPQFKKVVFQEFTDGSFTQPLYRGELNEHLGLLGPYIRAEVEDNIMVTFRNQASRPYSFYSSLISYEEDQRQGAEPRKNFVKPNETKTYFWKVQHHMAPTKDEFDCKAWAYFSDVDLEKDVHSGLIGPLLVCHTNTLNPAHGRQVTVQEFALFFTIFDETKSWYFTENMERNCRAPCNIQMEDPTFKENYRFHAINGYIMDTLPGLVMAQDQRIRWYLLSMGSNENIHSIHFSGHVFTVRKKEEYKMALYNLYPGVFETVEMLPSKAGIWRVECLIGEHLHAGMSTLFLVYSNKCQTPLGMASGHIRDFQITASGQYGQWAPKLARLHYSGSINAWSTKEPFSWIKVDLLAPMIIHGIKTQGARQKFSSLYISQFIIMYSLDGKKWQTYRGNSTGTLMVFFGNVDSSGIKHNIFNPPIIARYIRLHPTHYSIRSTLRMELMGCDLNSCSMPLGMESKAISDAQITASSYFTNMFATWSPSKARLHLQGRSNAWRPQVNNPKEWLQVDFQKTMKVTGVTTQGVKSLDTSMYVKEFLISSSQDGHQWTLFFQNGKVKVFQGNQDSFTPVVNSLDPPLLTRYLRIHPQSWEHQIALRMEVLGCEAQDLY

SEQ ID NO: 713 - DNA, 4371 bp, synthetic construct
  misc_feature 1..4371: note = Variant of human B-domain deleted Factor VIII
  source 1..4371: mol_type = other DNA
atgcagattgaactgtctacctgcttcttcctctgtttgctgaggttctgctttagcgccactagacggtactaccttggcgctgtggagctgtcctgggactatatgcagagtgatttgggagagcttcccgtcgacgcacgatttcctcctcgcgttccaaagtcatttccctttaacacaagcgtggtgtacaagaagacgctcttcgtcgaattcaccgatcacctgttcaatatcgccaaacccagaccaccatggatgggtcttttggggcctaccatacaagcggaggtgtatgacacagttgttatcactctcaagaacatggcttctcatccggtaagtcttcacgcagtgggcgtgtcctactggaaagcttcagaaggagccgagtatgatgatcagacatcccagagggagaaagaagacgacaaggtatttccaggtgggtctcatacctatgtgtggcaagtgctcaaagagaatggccctatggcaagcgatccgctctgtttgacttacagctacctttcacacgttgacctcgtcaaggacctcaactccgggttgattggagccttgttggtatgcagggaaggatctcttgccaaagagaagacacagaccctccacaagtttatccttctctttgctgtgttcgatgagggcaaaagttggcatagcgaaacgaagaattccctcatgcaggatcgcgacgcagccagcgccagagcttggcccaagatgcacactgtgaacggatatgtcaataggtcgcttcctggcttgattgggtgtcatcggaaaagtgtctactggcacgtgatcggaatggggacaacaccagaggtccactccatatttctcgaaggccataccttccttgttcgaaaccacagacaggcatccttggagatctctcccattacctttctcactgcccaaacgctccttatggacttgggtcagttccttctcttctgccatatcagctcacaccagcatgatggtatggaagcttatgtgaaagtcgacagttgtcctgaggagccacagttgcgcatgaagaataatgaagaagccgaggattacgacgacgatctcaccgattctgagatggacgtggtgaggtttgatgacgacaactctccctccttcattcaaatccggagcgtggcgaagaaacaccccaagacttgggtccactatatagcggcggaagaggaggattgggattacgctcctcttgtattggcaccagatgaccgctcatacaaaagccagtacctcaacaacggaccgcagagaattggccggaagtataagaaagtgcgatttatggcctatacagacgaaacctttaagacaagggaggccatccagcatgagagtgggattttgggacctcttctttacggcgaagttggtgataccctcctcatcatcttcaagaatcaagcttctcgcccctataacatttacccacacgggatcactgacgttaggcctttgtatagcagaagacttcccaaaggcgtgaagcatctcaaagacttccccattttgccaggcgagatctttaagtacaaatggaccgtcacagtggaagatggaccgactaaatcagaccctcgatgccttacgcggtactattcctccttcgtgaatatggagagagatttggcaagcggactcataggaccactcctcatctgttacaaggaatctgtagaccagaggggtaaccagattatgagtgataaacgcaatgtgatcctttttagcgtcttcgacgagaaccggtcctggtacttgaccgagaatatacaaaggttccttcccaaccccgcaggcgttcagttggaagaccctgagtttcaggccagcaatattatgcactcaatcaacggctatgtgtttgatagtctccagctttctgtttgcctccatgaagtagcctattggtacatcttgtcaattggtgctcaaacagacttcctctccgtcttcttctccggctacacctttaagcacaagatggtgtatgaggacactctcacactctttccattttctggagaaaccgtgttcatgagcatggagaatccaggcctttggatcttgggttgccacaacagtgattttcgcaatcggggaatgactgctctcctcaaagtcagcagctgtgataagaacacaggcgactattacgaagattcttacgaggacataagtgcctacttggactccaagaataacgccattgagcccagatcattctcccagaatcctcccgtgcttaaaaggcatcagcgcgaaatcaccagaactactcttcagtctgatcaagaggagattgactatgacgacaccataagcgtggaaatgaagaaggaggatttcgatatctatgacgaagatgagaaccagtctccgcggagctttcagaagaagacgcgacactacttcattgcagcagtcgaaaggctttgggactacggtatgtcatcatcccctcatgtgttgcgcaatagagctcagagtggaagtgttccacagttcaagaaagtcgtctttcaagagtttacagatggcagcttcacacagcctctctatcggggcgagcttaacgaacatttgggactccttggtccctatatccgagccgaagtggaggacaacattatggttacctttaggaatcaagcctctcgcccctacagcttctactcctccctcatcagttatgaggaggatcagagacaaggcgctgaaccacggaagaactttgtgaaaccgaatgagacgaagacctacttctggaaagtacagcaccacatggcccccacaaaagacgaattcgattgcaaagcatgggcgtatttttcagacgttgacttggagaaagatgtacattcaggacttattggtcctttgttggtgtgtcacactaacactctcaatccagcccatggcaggcaggtgacagtccaggaattcgctcttttctttaccatctttgatgagaccaagtcctggtacttcacggaaaacatggagcgcaattgcagagccccctgtaacatacagatggaggaccctacctttaaggaaaattatcggttccacgcaatcaacggatacattagcgatacactccctggccttgtgatggctcaggaccaacgaatcaggtggtacctcctcagcatgggttctaatgagaacatacactccattcacttttcaggacatgtgttcactgtccggaagaaagaagagtataagatggccctctacaatttgtatccaggcgtgtttgagaccgttgaaatgcttccctctaaagctggcatctggagagtagagtgcttgatcggagaacatcttcacgcaggtatgagcaccttgttcctcgtgtacagcaacaaatgtcagaacccacttggcatggccagtggacacattcgcgactttcagatcacagcatctggccagtatggacaatgggccccaaagttggctcgcctccattactccggtagcataaatgcgtggtccactaaagaacctttcagctggattaaggtcgatcttcttgcccccatgatcatccacggcattaagacacagggagcgaggcagaaattctcctccctctacatctcacagttcattattatgtatagtttggacggcaagaagtggcaaacttatagaggtaacagtactggaacactcatggtgttcttcggcaacgttgatagctctggcatcaaacacaacatctttaatcctcccataatagctcggtacatcagattgcatccgacccactacagcattaggagtacactccgaatggagcttatgggttgcgacttgaattcctgttcaatgccactcggaatggagtctaaagccatctctgatgcacagataaccgccagtagctactttacgaacatgtttgctacgtggtcaccctctaaggcaaggcttcatttgcaaggccggtctaatgcctggagacctcaggtgaacaacccgaaagaatggctccaggtggactttcagaagaccatgaaagtaacaggtgtcactactcagggagttaagtccttggataccagcatgtatgtgaaggagttccttatttcctcatcacaagatggccaccagtggaccctcttctttcagaatggtaaggtcaaagtgtttcagggcaatcaagacagcttcacacccgtggtgaacagtcttgatcctccactcttgacacgataccttcgaatccatccacagtcttgggagcaccagattgcattgcgcatggaagtacttggatgcgaggctcaggacctctac

SEQ ID NO: 714 - protein, 1457 aa, synthetic construct
  REGION 1..1457: note = Variant of human B-domain deleted Factor VIII
MQIELSTCFFLCLLRFCFSATRRYYLGAVELSWDYMQSDLGELPVDARFPPRVPKSFPFNTSVVYKKTLFVEFTDHLFNIAKPRPPWMGLLGPTIQAEVYDTVVITLKNMASHPVSLHAVGVSYWKASEGAEYDDQTSQREKEDDKVFPGGSHTYVWQVLKENGPMASDPLCLTYSYLSHVDLVKDLNSGLIGALLVCREGSLAKEKTQTLHKFILLFAVFDEGKSWHSETKNSLMQDRDAASARAWPKMHTVNGYVNRSLPGLIGCHRKSVYWHVIGMGTTPEVHSIFLEGHTFLVRNHRQASLEISPITFLTAQTLLMDLGQFLLFCHISSHQHDGMEAYVKVDSCPEEPQLRMKNNEEAEDYDDDLTDSEMDVVRFDDDNSPSFIQIRSVAKKHPKTWVHYIAAEEEDWDYAPLVLAPDDRSYKSQYLNNGPQRIGRKYKKVRFMAYTDETFKTREAIQHESGILGPLLYGEVGDTLLIIFKNQASRPYNIYPHGITDVRPLYSRRLPKGVKHLKDFPILPGEIFKYKWTVTVEDGPTKSDPRCLTRYYSSFVNMERDLASGLIGPLLICYKESVDQRGNQIMSDKRNVILFSVFDENRSWYLTENIQRFLPNPAGVQLEDPEFQASNIMHSINGYVFDSLQLSVCLHEVAYWYILSIGAQTDFLSVFFSGYTFKHKMVYEDTLTLFPFSGETVFMSMENPGLWILGCHNSDFRNRGMTALLKVSSCDKNTGDYYEDSYEDISAYLDSKNNAIEPRSFSQNPPVLKRHQREITRTTLQSDQEEIDYDDTISVEMKKEDFDIYDEDENQSPRSFQKKTRHYFIAAVERLWDYGMSSSPHVLRNRAQSGSVPQFKKVVFQEFTDGSFTQPLYRGELNEHLGLLGPYIRAEVEDNIMVTFRNQASRPYSFYSSLISYEEDQRQGAEPRKNFVKPNETKTYFWKVQHHMAPTKDEFDCKAWAYFSDVDLEKDVHSGLIGPLLVCHTNTLNPAHGRQVTVQEFALFFTIFDETKSWYFTENMERNCRAPCNIQMEDPTFKENYRFHAINGYISDTLPGLVMAQDQRIRWYLLSMGSNENIHSIHFSGHVFTVRKKEEYKMALYNLYPGVFETVEMLPSKAGIWRVECLIGEHLHAGMSTLFLVYSNKCQNPLGMASGHIRDFQITASGQYGQWAPKLARLHYSGSINAWSTKEPFSWIKVDLLAPMIIHGIKTQGARQKFSSLYISQFIIMYSLDGKKWQTYRGNSTGTLMVFFGNVDSSGIKHNIFNPPIIARYIRLHPTHYSIRSTLRMELMGCDLNSCSMPLGMESKAISDAQITASSYFTNMFATWSPSKARLHLQGRSNAWRPQVNNPKEWLQVDFQKTMKVTGVTTQGVKSLDTSMYVKEFLISSSQDGHQWTLFFQNGKVKVFQGNQDSFTPVVNSLDPPLLTRYLRIHPQSWEHQIALRMEVLGCEAQDLY

SEQ ID NO: 715 - DNA, 4371 bp, synthetic construct
  misc_feature 1..4371: note = Variant of human B-domain deleted Factor VIII
  source 1..4371: mol_type = other DNA
atgcagattgaactgtctacctgcttcttcctctgtttgctgaggttctgctttagcgccactagacggtactaccttggcgctgtggagctgtcctgggactatatgcagagtgatttgggagagcttcccgtcgacgcacgatttcctcctcgcgttccaaagtcatttccctttaacacaagcgtggtgtacaagaagacgctcttcgtcgaattcaccgatcacctgttcaatatcgccaaacccagaccaccatggatgggtcttttggggcctaccatacaagcggaggtgtatgacacagttgttatcactctcaagaacatggcttctcatccggtaagtcttcacgcagtgggcgtgtcctactggaaagcttcagaaggagccgagtatgatgatcagacatcccagagggagaaagaagacgacaaggtatttccaggtgggtctcatacctatgtgtggcaagtgctcaaagagaatggccctatggcaagcgatccgccgtgtttgacttacagctacctttcacacgttgacctcgtcaaggacctcaactccgggttgattggagccttgttggtatgcagggaaggatctcttgccaaagagaagacacagaccctccacaagtttatccttctctttgctgtgttcgatgagggcaaaagttggcatagcgaaacgaagaattccctcatgcaggatcgcgacgcagccagcgccagagcttggcccaagatgcacactgtgaacggatatgtcaataggacgcttcctggcttgattgggtgtcatcggaaaagtgtctactggcacgtgatcggaatggggacaacaccagaggtccactccatatttctcgaaggccataccttccttgttcgaaaccacagacaggcatccttggagatctctcccattacctttctcactgcccaaacgctccttatggacttgggtcagttccttctcttctgccatatcagctcacaccagcatgatggtatggaagcttatgtgaaagtcgacagttgtcctgaggagccacagttgcgcatgaagaataatgaagaagccgaggattacgacgacgatctcaccgattctgagatggacgtggtgaggtttgatgacgacaactctccctccttcattcaaatccggagcgtggcgaagaaacaccccaagacttgggtccactatatagcggcggaagaggaggattgggattacgctcctcttgtattggcaccagatgaccgctcatacaaaagccagtacctcaacaacggaccgcagagaattggccggaagtataagaaagtgcgatttatggcctatacagacgaaacctttaagacaagggaggccatccagcatgagagtgggattttgggacctcttctttacggcgaagttggtgataccctcctcatcatcttcaagaatcaagcttctcgcccctataacatttacccacacgggatcactgacgttaggcctttgtatagcagaagacttcccaaaggcgtgaagcatctcaaagacttccccattttgccaggcgagatctttaagtacaaatggaccgtcacagtggaagatggaccgactaaatcagaccctcgatgccttacgcggtactattcctccttcgtgaatatggagagagatttggcaagcggactcataggaccactcctcatctgttacaaggaatctgtagaccagaggggtaaccagattatgagtgataaacgcaatgtgatcctttttagcgtcttcgacgagaaccggtcctggtacttgaccgagaatatacaaaggttccttcccaaccccgcaggcgttcagttggaagaccctgagtttcaggccagcaatattatgcactcaatcaacggctatgtgtttgatagtctccagctttctgtttgcctccatgaagtagcctattggtacatcttgtcaattggtgctcaaacagacttcctctccgtcttcttctccggctacacctttaagcacaagatggtgtatgaggacactctcacactctttccattttctggagaaaccgtgttcatgagcatggagaatccaggcctttggatcttgggttgccacaacagtgattttcgcaatcggggaatgactgctctcctcaaagtcagcagctgtgataagaacacaggcgactattacgaagattcttacgaggacataagtgcctacttgttgtccaagaataacgccccggagcccagatcattctcccagaatcctcccgtgcttaaaaggcatcagcgcgaaatcaccagaactactcttcagtctgatcaagaggagattgactatgacgacaccataagcgtggaaatgaagaaggaggatttcgatatctatgacgaagatgagaaccagtctccgcggagctttcagaagaagacgcgacactacttcattgcagcagtcgaaaggctttgggactacggtatgtcatcatcccctcatgtgttgcgcaatagagctcagagtggaagtgttccacagttcaagaaagtcgtctttcaagagtttacagatggcagcttcacacagcctctctatcggggcgagcttaacgaacatttgggactccttggtccctatatccgagccgaagtggaggacaacattatggttacctttaggaatcaagcctctcgcccctacagcttctactcctccctcatcagttatgaggaggatcagagacaaggcgctgaaccacggaagaactttgtgaaaccgaatgagacgaagacctacttctggaaagtacagcaccacatggcccccacaaaagacgaattcgattgcaaagcatgggcgtatttttcagacgttgacttggagaaagatgtacattcaggacttattggtcctttgttggtgtgtcacactaacactctcaatccagcccatggcaggcaggtgacagtccaggaattcgctcttttctttaccatctttgatgagaccaagtcctggtacttcacggaaaacatggagcgcaattgcagagccccctgtaacatacagatggaggaccctacctttaaggaaaattatcggttccacgcaatcaacggatacattatggatacactccctggccttgtgatggctcaggaccaacgaatcaggtggtacctcctcagcatgggttctaatgagaacatacactccattcacttttcaggacatgtgttcactgtccggaagaaagaagagtataagatggccctctacaatttgtatccaggcgtgtttgagaccgttgaaatgcttccctctaaagctggcatctggagagtagagtgcttgatcggagaacatcttcacgcaggtatgagcaccttgttcctcgtgtacagcaacaaatgtcagaccccacttggcatggccagtggacacattcgcgactttcagatcacagcatctggccagtatggacaatgggccccaaagttggctcgcctccattactccggtagcataaatgcgtggtccactaaagaacctttcagctggattaaggtcgatcttcttgcccccatgatcatccacggcattaagacacagggagcgaggcagaaattctcctccctctacatctcacagttcattattatgtatagtttggacggcaagaagtggcaaacttatagaggtaacagtactggaacactgatggtgttcttcggcaacgttgatagctctggcatcaaacacaacatctttaatcctcccataatagctcggtacatcagattgcatccgacccactacagcattaggagtacactccgaatggagcttatgggttgcgacttgaattcctgttcaatgccactcggaatggagtctaaagccatctctgatgcacagataaccgccagtagctactttacgaacatgtttgctacgtggtcaccctctaaggcaaggcttcatttgcaaggccggtctaatgcctggagacctcaggtgaacaacccgaaagaatggctccaggtggactttcagaagaccatgaaagtaacaggtgtcactactcagggagttaagtccttggataccagcatgtatgtgaaggagttccttatttcctcatcacaagatggccaccagtggaccctcttctttcagaatggtaaggtcaaagtgtttcagggcaatcaagacagcttcacacccgtggtgaacagtcttgatcctccactcttgacacgataccttcgaatccatccacagtcttgggagcaccagattgcattgcgcatggaagtacttggatgcgaggctcaggacctctac

(The sequence listing continues in the following parts.)

1. A recombinant factor VIII polypeptide, or a biologically active fragment thereof, comprising an amino acid sequence having at least 70%, 75%, 80%, 81%, 82%, 83%, 84%, 85%, 86%, 87%, 88%, 89%, 90%, 91%, 92%, 93%, 94%, 95%, 96%, 97%, 98%, or 99% or more sequence identity to a reference sequence corresponding to residues 20-1457 of SEQ ID NO: 2, 252, 504, 706, 840, 1200, 1514, or 2072, or to a reference sequence corresponding to SEQ ID NO: 2, 252, 504, 706, 840, 1200, 1514, or 2072, wherein the amino acid sequence comprises one or more substitutions relative to the reference sequence corresponding to residues 20-1457 of SEQ ID NO: 2, 252, 504, 706, 840, 1200, 1514, or 2072, or relative to the reference sequence corresponding to SEQ ID NO: 2, 252, 504, 706, 840, 1200, 1514, or 2072.

2. The recombinant factor VIII polypeptide of claim 1, comprising an amino acid sequence having at least 70%, 75%, 80%, 81%, 82%, 83%, 84%, 85%, 86%, 87%, 88%, 89%, 90%, 91%, 92%, 93%, 94%, 95%, 96%, 97%, 98%, or 99% or more sequence identity to the reference sequence corresponding to residues 20-1457 of SEQ ID NO: 2 or to the reference sequence corresponding to SEQ ID NO: 2, wherein the amino acid sequence comprises one or more substitutions relative to the reference sequence corresponding to residues 20-1457 of SEQ ID NO: 2, or relative to the reference sequence corresponding to SEQ ID NO: 2.

3. The recombinant factor VIII polypeptide of claim 1, comprising an amino acid sequence having at least 70%, 75%, 80%, 81%, 82%, 83%, 84%, 85%, 86%, 87%, 88%, 89%, 90%, 91%, 92%, 93%, 94%, 95%, 96%, 97%, 98%, or 99% or more sequence identity to the reference sequence corresponding to residues 20-1457 of SEQ ID NO: 252, 504, 706, 840, 1200, 1514, or 2072, or to the reference sequence corresponding to SEQ ID NO: 2, 252, 504, 706, 840, 1200, 1514, or 2072, wherein the amino acid sequence comprises one or more substitutions relative to the reference sequence corresponding to residues 20-1457 of SEQ ID NO: 2, or relative to the reference sequence corresponding to SEQ ID NO: 2.

4. The recombinant factor VIII polypeptide of claim 1, comprising an amino acid sequence having at least 70%, 75%, 80%, 81%, 82%, 83%, 84%, 85%, 86%, 87%, 88%, 89%, 90%, 91%, 92%, 93%, 94%, 95%, 96%, 97%, 98%, or 99% or more sequence identity to a reference sequence corresponding to residues 20-1457 of an even-numbered SEQ ID NO. of SEQ ID NOs. 4-2346 and 2360-2870, or to a reference sequence corresponding to an even-numbered SEQ ID NO. of SEQ ID NOs. 4-2346 and 2350-2870, wherein the amino acid sequence comprises one or more substitutions relative to the reference sequence corresponding to residues 20-1457 of SEQ ID NO: 2 or relative to the reference sequence corresponding to SEQ ID NO: 2.

5. The recombinant factor VIII polypeptide of claim 1, wherein the amino acid sequence of the recombinant factor VIII polypeptide comprises at least a substitution at amino acid position 13, 14, 15, 16, 17, 18, 19, 20, 21, 24, 37, 56, 57, 58, 59, 61, 63, 64, 65, 85, 96, 104, 110, 119, 127, 132, 158, 160, 164, 167, 168, 171, 175, 178, 186, 187, 205, 210, 211, 212, 215, 225, 246, 257, 260, 265, 281, 292, 294, 301, 303, 304, 306, 308, 310, 311, 312, 318, 320, 321, 325, 328, 332, 334, 335, 344, 346, 347, 349, 351, 353, 354, 355, 356, 358, 359, 362, 370, 387, 388, 390, 392, 393, 397, 407, 428, 429, 433, 435, 436, 481, 487, 488, 489, 491, 498, 499, 503, 514, 527, 533, 534, 535, 536, 538, 543, 550, 551, 555, 558, 569, 580, 581, 584, 610, 611, 612, 613, 614, 615, 616, 617, 618, 619, 620, 621, 622, 643, 646, 650, 665, 667, 676, 680, 681, 682, 683, 684, 686, 693, 696, 698, 700, 706, 707, 708, 712, 716, 724, 726, 729, 731, 732, 734, 735, 736, 737, 738, 739, 740, 744, 746, 747, 748, 749, 750, 751, 752, 753, 754, 755, 756, 757, 759, 770, 773, 775, 785, 786, 787, 790, 791, 792, 793, 794, 795, 797, 798, 799, 800, 801, 802, 805, 806, 807, 808, 809, 810, 811, 812, 815, 816, 817, 818, 819, 821, 822, 824, 825, 826, 828, 830, 831, 836, 837, 838, 839, 840, 841, 844, 866, 873, 879, 892, 896, 897, 903, 907, 914, 916, 917, 918, 919, 921, 922, 923, 924, 926, 929, 938, 939, 945, 948, 951, 968, 999, 1037, 1040, 1041, 1042, 1043, 1049, 1050, 1051, 1053, 1054, 1076, 1078, 1080, 1084, 1088, 1089, 1092, 1093, 1094, 1095, 1098, 1099, 1100, 1101, 1104, 1108, 1109, 1113, 1114, 1116, 1127, 1129, 1138, 1145, 1148, 1151, 1156, 1158, 1160, 1186, 1192, 1193, 1194, 1205, 1210, 1218, 1220, 1221, 1222, 1224, 1229, 1245, 1248, 1250, 1259, 1264, 1269, 1270, 1274, 1281, 1283, 1292, 1297, 1339, 1352, 1373, 1377, 1378, 1380, 1389, 1414, 1422, 1427, 1428, 1439, 1440, 1442, or 1452, or combinations thereof, wherein the amino acid positions are relative to the reference sequence corresponding to SEQ ID NO: 2.

6. The recombinant factor VIII polypeptide of claim 1, wherein the amino acid sequence of the recombinant factor VIII polypeptide comprises at least a substitution or amino acid residue 13G/Y, 14G/M/V, 15G/S, 16A/D/G/P/V, 17S/V, 18L/R, 19G, 20L, 21M, 24V, 37H, 56E/P, 57A/L/S/T/V, 58K, 59D/G/L/M/Q/R/S/V/W, 61Q/S, 63C/E/F/G/H/I/K/L/M/N/Q/R/S/T/W/Y, 64D/G, 65A, 85Q, 96I/L/R/V/W, 104S, 110H, 119G/V, 127V, 132P/R, 158G, 160E/T, 164E, 167G/H/R, 168G/R, 171A/D/E/F/H/K/N/M/P/Q/R/S/T/V/W/Y, 175A/G/H, 178C/M/Q/V/W, 186A, 187C/G, 205R, 210P, 211G/K/P/Q/R, 212A/F/G/K/L/M/N/P/R/S/V/Y, 215E/P/S, 225R, 246D, 257I, 260E/K/T, 265R/S/W, 281A/S, 292D, 294G, 301K/M, 303G/T, 304A/E/G, 306A/D/G/P/S/T, 308P, 310G/V, 311E/G, 312L, 318C/G/K/M/Q/R/T/V, 320G/I/L/P/Q/R/S/T/V, 321Y, 325Y, 328G/Q/S, 332A/F/G/H/N/P/Q/R/T/V/W/Y, 334G, 335E/P, 344A/E/L, 346R/V, 347N, 349G, 351S, 353S, 354R, 355C, 356L/N, 358K/S, 359E/G, 362E/G/N/P/T/V/W, 370A, 387A/G/I/L/Q/R/S/T/V/W, 388A/P, 390A/E/G/L/M/P/S/T/V, 392A, 393A/F/G/H/M/Q/R/W/Y, 397G/N, 407V, 428F, 429L/S, 433A/G, 435Q, 436D/G, 481V, 487N, 488G, 489E/F/Q/R, 491E, 498A, 499C/L, 503S, 514L, 527A, 533R/V/Y, 534F/I/L/M, 535C/G/N, 536A/G/K/L/M/P/R/W, 538V, 543G/L/P/W, 550G, 551W, 555E/G/R/T, 558A/E/G/L/P/Q/R/S/T/V/W, 569T, 580S/Y, 581K/V, 584A, 610H/K/L/R/S/T, 611D/E, 612G/S/T, 613S, 614A/F/H/I/N/T, 615D/N, 616D/E/G/Q/W, 617D/E/G/N, 618C/E/G/P/Y, 619E, 620N/P, 621K/M/R/T/W, 622D, 643N, 646I, 650M, 665G, 667I, 676Q, 680L/R, 681A/C/E/F/G/L/N/R/Q/S/T/W, 682R, 683W, 684G/K, 686W, 693T, 696E, 698D/S/W/Y, 700A/E/Q/T/V, 706A/G/M/Y, 707H, 708A/K/T/V, 712G/L/M/Q/S/T/Y, 716K/L/W, 724I, 726A/L, 729T, 731I/L/R, 732C/D/E/G/L/R/W/K/M/Q/S/T/V/Y, 734I/R/S, 735D/S/V, 736F/G, 737F/G/K/L/M/N/S/V, 738A/D/E/F/H/K/N/P/R/S/T, 739G/P/R, 740G, 744A/R, 746P, 747D, 748F/G/K/N/S/V, 749A/C/D/F/G/I/K/L/M/P/Q/R/S/T/V/Y, 750A/D/G/K/M/N/P/Q/R/S/T/V/W, 751A/D/E/Y, 752D/E/F/G/L/M/Q/R/S/V, 753D, 754W, 755G/L/P/Q/S/Y, 756G/P/R/T, 757A/G/K/T, 759S, 770W, 773H, 775E/G/K/N/P/S/V, 785V, 786C/D/L, 787W, 790A/G/I/M/P/W, 791M/T, 792H/W/Y, 793G, 794R, 795C/N/S/T, 797C/G/P/Q/T/W/Y, 798C/R/T, 799A/E/G/M/P/Q/R/S/V, 800C/G/I/L/M/N/P/Q/R/T/V/W/Y, 801A/G/I/R, 802S/V, 805C/G/H/K/L/M/P/Q/R/S/V/W, 806E/G/R/S, 807C/L/P/R, 808K/S, 809A/C/G/I/K/L/N/Q/R/S/T/V/W, 810V, 811F, 812G/I/V, 815I, 816V/W, 817A/D, 818A/E/G/P/S/V/W, 819V, 821Q, 822S/T, 824W, 825L, 826G, 828K, 830M/V, 831W, 836G/R/V/W, 837G, 838G/T, 839A/G/K/P, 840G, 841W, 844H, 866A, 873L/Q/T, 879Q, 892T, 896L/V, 897G/K/R, 903E, 907D, 914V, 916C/E/I/K/L/M/Q/T, 917G, 918M/S, 919G, 921R/W, 922W, 923M, 924I/M/P/Q/W, 926T/V, 929A/Q/V, 938R/V, 939E/S, 945K, 948S, 951V, 968A/P, 999R, 1037H/M/N/P, 1040E, 1041G/H/N, 1042A/E/T, 1043E/R, 1049G/W, 1050E/P/Q/S/T, 1051E/H/K/R/S/W, 1053A/R, 1054C, 1076G/S, 1078S, 1080G/V, 1084L/N, 1088G/S, 1089F/S, 1092G, 1093A/E/G/M/N/P/Q/R/S/T/V/W/Y, 1094S, 1095G, 1098G, 1099G, 1100I/S, 1101G, 1104C/E, 1108M/S/V/W, 1109G, 1113F, 1114A/M, 1116A/G/I/L/R, 1127L/V, 1129P, 1138Q, 1145R, 1148A/C/E/L/M/N/Q/R/S, 1151S, 1156D/G/N/R, 1158N, 1160R, 1186E, 1192D, 1193A/E/G/I/L, 1194P, 1205L, 1210M/TN/VW, 1218A/G/L/M/P, 1220D/E/L/T, 1221G/S/T/V, 1222F, 1224P, 1229D, 1245R, 1248A/C/D/E/F/G/H/I/K/M/P/Q/R/S/T/W/Y, 1250A/P/S/T, 1259T, 1264L/R/W, 1269F, 1270V, 1274N/V, 1281H/K/P/Q/R/S, 1283E/H/L/S/T, 1292Y, 1297A, 1339C, 1352E, 1373S, 1377A/C/D/E/G/H/I/M/P/R/S/V/T/Y, 1378A/C/D/E, 1380A/G/W, 1389W, 1414A/C/D/E/G/H/N/P/T/W, 1422I, 1427Y, 1428G, 1439A/E/H/L/S/T, 1440A/C/E/G/S/T, 1442T, or 1452L, or combinations thereof, wherein the amino acid positions are relative to the reference sequence corresponding to SEQ ID NO: 2.

7-9. (canceled)

10. The recombinant factor VIII polypeptide of claim 1, wherein the amino acid sequence of the recombinant factor VIII polypeptide comprises at least a substitution or substitution set at amino acid position(s) 1148, 85/708/1148, 798, 706, 171, 335, 63, 344, 428, 879, 59, 429, 205, 1264, 797, 1248, 873, 792, 708, 57, 96, 362, 1292, 346, 433, 65, 795, 684/798, 353, 332, 1259, 356, 436, 1245, 1145, 716, 56, 773, 734, 358, 729, 665, 359, 61, 1250, 726, 37/96/171/429/708/799/1148, 171/429/732/1148, 96/171, 171/919/1151, 171/792/797/799/1148, 171/569/1148, 96/171/429/792/797/799, 171/429/708/1422, 171/429, 321/362/732/797/799, 171/1100, 708/1148/1186, 429/724/732/1148, 171/362/795/797/799, 171/429/732, 96/171/643/797/799, 171/792/797/799, 503, 171/732, 1148/1193, 96/171/362/429/732/795/797, 334, 732, 351, 1377, 999, 306, 349, 257, 646, 435, or 58, wherein the positions are relative to the reference sequence corresponding to SEQ ID NO: 2.

11-13. (canceled)

14. The recombinant factor VIII polypeptide of claim 1, comprising an amino acid sequence having at least 70%, 75%, 80%, 81%, 82%, 83%, 84%, 85%, 86%, 87%, 88%, 89%, 90%, 91%, 92%, 93%, 94%, 95%, 96%, 97%, 98%, or 99% or more sequence identity to the reference sequence corresponding to residues 20-1457 of SEQ ID NO: 252, 504, 706, 840, 1200, 1514, or 2072, or to the reference sequence corresponding to SEQ ID NO: 252, 504, 706, 840, 1200, 1514, or 2072, wherein the amino acid sequence comprises one or more substitutions relative to the reference sequence corresponding to residues 20-1457 of SEQ ID NO: 252, 504, 706, 840, 1200, 1514, or 2072, or relative to the reference sequence corresponding to SEQ ID NO: 252, 504, 706, 840, 1200, 1514, or 2072.

15. The recombinant factor VIII polypeptide of claim 14, wherein the amino acid sequence of the recombinant factor VIII polypeptide comprises at least a substitution at amino acid position 13, 14, 15, 16, 17, 18, 19, 20, 21, 24, 37, 56, 57, 58, 59, 61, 63, 64, 65, 85, 96, 104, 110, 119, 127, 132, 158, 160, 164, 167, 168, 171, 175, 178, 186, 187, 205, 210, 211, 212, 215, 225, 246, 257, 260, 265, 281, 292, 294, 301, 303, 304, 306, 308, 310, 311, 312, 318, 320, 321, 325, 328, 332, 334, 335, 344, 346, 347, 349, 351, 353, 354, 355, 356, 358, 359, 362, 370, 387, 388, 390, 392, 393, 397, 407, 428, 429, 433, 435, 436, 481, 487, 488, 489, 491, 498, 499, 503, 514, 527, 533, 534, 535, 536, 538, 543, 550, 551, 555, 558, 569, 580, 581, 584, 610, 611, 612, 613, 614, 615, 616, 617, 618, 619, 620, 621, 622, 643, 646, 650, 665, 667, 676, 680, 681, 682, 683, 684, 686, 693, 696, 698, 700, 706, 707, 708, 712, 716, 724, 726, 729, 731, 732, 734, 735, 736, 737, 738, 739, 740, 744, 746, 747, 748, 749, 750, 751, 752, 753, 754, 755, 756, 757, 759, 770, 773, 775, 785, 786, 787, 790, 791, 792, 793, 794, 795, 797, 798, 799, 800, 801, 802, 805, 806, 807, 808, 809, 810, 811, 812, 815, 816, 817, 818, 819, 821, 822, 824, 825, 826, 828, 830, 831, 836, 837, 838, 839, 840, 841, 844, 866, 873, 879, 892, 896, 897, 903, 907, 914, 916, 917, 918, 919, 921, 922, 923, 924, 926, 929, 938, 939, 945, 948, 951, 968, 999, 1037, 1040, 1041, 1042, 1043, 1049, 1050, 1051, 1053, 1054, 1076, 1078, 1080, 1084, 1088, 1089, 1092, 1093, 1094, 1095, 1098, 1099, 1100, 1101, 1104, 1108, 1109, 1113, 1114, 1116, 1127, 1129, 1138, 1145, 1148, 1151, 1156, 1158, 1160, 1186, 1192, 1193, 1194, 1205, 1210, 1218, 1220, 1221, 1222, 1224, 1229, 1245, 1248, 1250, 1259, 1264, 1269, 1270, 1274, 1281, 1283, 1292, 1297, 1339, 1352, 1373, 1377, 1378, 1380, 1389, 1414, 1422, 1427, 1428, 1439, 1440, 1442, or 1452, or combinations thereof, wherein the amino acid positions are relative to the reference sequence corresponding to SEQ ID NO: 252, 504, 706, 840, 1200, 1514, or 2072.

16. The recombinant factor VIII polypeptide of claim 14, wherein the amino acid sequence of the recombinant factor VIII polypeptide comprises at least a substitution or amino acid residue 13G/Y, 14G/M/V, 15G/S, 16A/D/G/P/V, 17S/V, 18L/R, 19G, 20L, 21M, 24V, 37H, 56E/P, 57A/L/S/T/V, 58K, 59D/G/L/M/Q/R/S/V/W, 61Q/S, 63C/E/F/G/H/I/K/L/M/N/Q/R/S/T/W/Y, 64D/G, 65A, 85Q, 96I/L/R/V/W, 104S, 110H, 119G/V, 127V, 132P/R, 158G, 160E/T, 164E, 167G/H/R, 168G/R, 171A/D/E/F/H/K/N/M/P/Q/R/S/T/V/W/Y, 175A/G/H, 178C/M/Q/V/W, 186A, 187C/G, 205R, 210P, 211G/K/P/Q/R, 212A/F/G/L/K/M/N/P/R/S/V/Y, 215E/P/S, 225R, 246D, 257I, 260E/K/T, 265R/S/W, 281A/S, 292D, 294G, 301K/M, 303G/T, 304A/E/G, 306A/D/G/P/S/T, 308P, 310G/V, 311E/G, 312L, 318C/G/K/L/M/Q/R/T/V, 320G/I/L/P/Q/R/S/T/V, 321Y, 325Y, 328G/Q/S, 332A/F/G/H/N/P/Q/R/T/V/W/Y, 334G, 335E/P, 344A/E/L, 346R/V, 347N, 349G, 351S, 353S, 354R, 355C, 356L/N, 358K/S, 359E/G, 362E/G/N/P/T/V/W, 370A, 387A/G/I/L/Q/R/S/T/V/W, 388A/P, 390A/E/G/L/M/P/S/T/V, 392A, 393A/F/G/H/M/Q/R/W/Y, 397G/N, 407V, 428F, 429L/S, 433A/G, 435Q, 436D/G, 481V, 487N, 488G, 489E/F/Q/R, 491E, 498A, 499C/L, 503S, 514L, 527A, 533R/V/Y, 534I/F/L/M, 535C/G/N, 536A/G/K/L/M/P/R/W, 538V, 543G/L/P/W, 550G, 551W, 555E/G/R/T, 558A/E/G/L/P/Q/R/S/T/V/W, 569T, 580S1Y, 581K/V, 584A, 610H/K/L/R/S/T, 611D/E, 612G/S/T, 613S, 614A/F/H/I/N/T, 615D/N, 616D/E/G/Q/W, 617D/E/G/N, 618C/E/G/P/Y, 619E, 620N/P, 621K/M/R/T/W, 622D, 643N, 646I, 650M, 665G, 667I, 676Q, 680L/R, 681A/C/E/F/G/L/N/R/Q/S/T/W, 682R, 683W, 684G/K, 686W, 693T, 696E, 698D/S/W/Y, 700A/E/Q/T/V, 706A/G/M/Y, 707H, 708A/K/T/V, 712G/L/M/Q/S/T/Y, 716K/L/W, 724I, 726A/L, 729T, 731I/L/R, 732C/D/E/G/L/R/W/K/M/Q/S/T/V/Y, 734I/R/S, 735D/S/V, 736F/G, 737F/G/K/L/M/N/S/V, 738A/D/E/F/H/K/N/P/R/S/T/Y, 739G/P/R, 740G, 744A/R, 746P, 747D, 748F/G/K/N/S/V, 749A/C/D/F/G/I/K/L/M/P/Q/R/S/T/V/Y, 750A/D/G/K/M/N/P/Q/R/S/T/V/W, 751A/D/E/Y, 752D/E/F/G/L/M/Q/R/S/V, 753D, 754W, 755G/L/P/Q/S/Y, 756G/P/R/T, 757A/G/K/T, 759S, 770W, 773H, 775E/G/K/N/P/S/V, 785V, 786C/D/L, 787W, 790A/G/I/M/P/W, 791M/T, 792H/W/Y, 793G, 794R, 795C/N/S/T, 797C/G/P/Q/T/W/Y, 798C/R/T, 799A/E/G/M/P/Q/R/S/V, 800C/G/I/L/M/N/P/Q/R/T/V/W/Y, 801A/G/I/R, 802S/V, 805C/G/H/K/L/M/P/Q/R/S/V/W, 806E/G/R/S, 807C/L/P/R, 808K/S, 809A/C/G/I/K/L/N/Q/R/S/T/V/W, 810V, 811F, 812G/I/V, 815I, 816V/W, 817A/D, 818A/E/G/P/S/V/W, 819V, 821Q, 822S/T, 824W, 825L, 826G, 828K, 830M/V, 831W, 836G/R/V/W, 837G, 838G/T, 839A/G/K/P, 840G, 841W, 844H, 866A, 873L/Q/T, 879Q, 892T, 896L/V, 897G/K/R, 903E, 907D, 914V, 916C/E/I/K/L/M/Q/T, 917G, 918M/S, 919G, 921R/W, 922W, 923M, 924I/M/P/Q/W, 926T/V, 929A/Q/V, 938R/V, 939E/S, 945K, 948S, 951V, 968A/P, 999R, 1037H/M/N/P, 1040E, 1041G/H/N, 1042A/E/T, 1043E/R, 1049G/W, 1050E/P/Q/S/T, 1051E/H/K/R/S/W, 1053A/R, 1054C, 1076G/S, 1078S, 1080G/V, 1084L/N, 1088G/S, 1089F/S, 1092G, 1093A/E/G/M/N/P/Q/R/S/T/V/W/Y, 1094S, 1095G, 1098G, 1099G, 1100I/S, 1101G, 1104C/E, 1108M/S/V/W, 1109G, 1113F, 1114A/M, 1116A/G/I/L/R, 1127L/V, 1129P, 1138Q, 1145R, 1148A/C/E/L/M/N/Q/R/S, 1151S, 1156D/G/N/R, 1158N, 1160R, 1186E, 1192D, 1193A/E/G/I/L, 1194P, 1205L, 1210M/T/V/W, 1218A/G/L/M/P, 1220D/E/L/T, 1221G/S/T/V, 1222F, 1224P, 1229D, 1245R, 1248A/C/D/E/F/G/H/I/K/M/P/Q/R/S/T/W/Y, 1250A/P/S/T, 1259T, 1264L/R/W, 1269F, 1270V, 1274N/V, 1281H/K/P/Q/R/S, 1283E/H/L/S/T, 1292Y, 1297A, 1339C, 1352E, 1373S, 1377A/C/D/E/G/H/I/M/P/R/S/V/T/Y, 1378A/C/D/E, 1380A/G/W, 1389W, 1414A/C/D/E/G/H/N/P/T/W, 1422I, 1427Y, 1428G, 1439A/E/H/L/S/T, 1440A/C/E/G/S/T, or 1442T, 1452L, or combinations thereof, wherein the amino acid positions are relative to the reference sequence corresponding to SEQ ID NO: 252, 504, 706, 840, 1200, 1514, or 2072.

17-19. (canceled)

20. The recombinant factor VIII polypeptide of claim 14, comprising an amino acid sequence having at least 70%, 75%, 80%, 81%, 82%, 83%, 84%, 85%, 86%, 87%, 88%, 89%, 90%, 91%, 92%, 93%, 94%, 95%, 96%, 97%, 98%, or 99% or more sequence identity to the reference sequence corresponding to residues 20-1457 of SEQ ID NO: 252, or to the reference sequence corresponding to SEQ ID NO: 252, wherein the amino acid sequence comprises one or more substitutions relative to the reference sequence corresponding to residues 20-1457 of SEQ ID NO: 252, or relative to the reference sequence corresponding to SEQ ID NO: 252.

21. The recombinant factor VIII polypeptide of claim 20, wherein the amino acid sequence of the recombinant factor VIII polypeptide comprises at least a substitution or substitution set at amino acid position(s) 1380, 388, 1043, 610, 1274, 1220, 1442, 1193, 621, 1054, 755, 1041, 748, 1049, 1221, 1051, 612, 1037, 616, 387, 489, 750, 1224, 618, 1050, 1053, 896, 897, 749, 260, 481, 613, 756, 63, 265, 752, 1218, 1378, 614, 1440, 1439, 1205, 1222, 1389, 1269, 390, 397/1218, 757, 1373, 346, 63/1248, 349, 306/355/1422, 1422, 306/346/708, 1148, 171/346/1248, 63/797/799/1248/1422, 171/799, 362, 1248, 171/306/346/999/1248, 171/1148, 734/799/1248/1422, 63/732, 63/171/306/346/732, 171, 171/1422, 63/362/732/799/1248, 999/1148/1422, 346/349, 306/349, 63/171/1148/1151, 306, 344/349/354/1250, 1250, 63/306/344/349/354/503/1248, 59/63/332/349/503/706/708, 63/306/344/349/354/706/1248, 59/63, 332/706/708/1248/1250, 503, 59/63/349/354, 59/349/708, 59/306/344/1248, 344/1248/1250, 708, 63/344/349, 59, 63/344/349/354, 706, 59/306/770, 63/347/354/1248, or 354/503, wherein the amino acid positions are relative to the reference sequence corresponding to SEQ ID NO: 252.

22. (canceled)

23. The recombinant factor VIII polypeptide of claim 14, comprising an amino acid sequence having at least 70%, 75%, 80%, 81%, 82%, 83%, 84%, 85%, 86%, 87%, 88%, 89%, 90%, 91%, 92%, 93%, 94%, 95%, 96%, 97%, 98%, or 99% or more sequence identity to the reference sequence corresponding to residues 20-1457 of SEQ ID NO: 504, or to the reference sequence corresponding to SEQ ID NO: 504, wherein the amino acid sequence comprises one or more substitutions relative to the reference sequence corresponding to residues 20-1457 of SEQ ID NO: 504, or relative to the reference sequence corresponding to SEQ ID NO: 504.

24. The recombinant factor VIII polypeptide of claim 23, wherein the amino acid sequence of the recombinant factor VIII polypeptide comprises at least a substitution or substitution set at amino acid position(s) 750, 1051, 260, 756, 1193, 332, 897, 387, 1037, 306/749, 1270, 489, 487, 488, 903, 171/1248/1440, 260/1148/1378, 171/260/387/750/1248, 171/260, 171/260/387/750/1051/1148, 171, 750/1051/1148, 171/260/756, 171/1248, 171/1148, 59, 1440, 332/750/1248, 756/1248, 1248, 171/387/1248/1440, 750/1440, 59/171/750, 171/1193/1248, 750/1148/1193/1440, 1148, 171/387/1051, 748, 306, 306/387/390/749/1220, 390, 306/390/1037, 306/612/749, 387/390/749, 63/390/503/749, 1220, 63/306, 749, 306/390/749/1037, 306/749/1220, 306/387/390/612/749/1037, or 328, wherein the amino acid positions are relative to the reference sequence corresponding to SEQ ID NO: 504.

25. (canceled)

26. The recombinant factor VIII polypeptide of claim 14, comprising an amino acid sequence having at least 70%, 75%, 80%, 81%, 82%, 83%, 84%, 85%, 86%, 87%, 88%, 89%, 90%, 91%, 92%, 93%, 94%, 95%, 96%, 97%, 98%, or 99% or more sequence identity to the reference sequence corresponding to residues 20-1457 of SEQ ID NO: 706, or to the reference sequence corresponding to SEQ ID NO: 706, wherein the amino acid sequence comprises one or more substitutions relative to the reference sequence corresponding to residues 20-1457 of SEQ ID NO: 706, or relative to the reference sequence corresponding to SEQ ID NO: 706.

27. The recombinant factor VIII polypeptide of claim 26, wherein the amino acid sequence of the recombinant factor VIII polypeptide comprises at least a substitution or substitution set at amino acid position(s) 1051, 1221, 1218, 387, 749/1218, 332, 897, 696, 816, 824, 826, 393, 825, 698, 332/387/390/1148, 328/387/749, 749, 306/328/332/390/1051/1193/1218, 63/306/332/1051/1148, 63/306/332/387/1051, 387/390/1051, 186/306/328/332/390/749/1051/1148/1193, 387/390/756/1051, 306/390/1051, 306/332/390/749, 306/387/390/1148, 306/328/332/387/390/749/1051/1148/1193, 332/387/390/749/1148, 387/390/749, 306/387/749/1051/1148, 387/749, 306/945/1051/1193/1221, 306/390/749/1051, 63/306/332/390, 306/387/390/749/1148/1193/1221, 306/332/387/390/749/1218, 63/306/332/390/1051/1148/1193/1218, 924, 755, 752, 751, 923, 797, 754, 793, 753, 922, 896, 938, 775, 732, 810, 747, 393/407, 819, 787, 802, 811, 392, or 397, wherein the amino acid positions are relative to the reference sequence corresponding to SEQ ID NO: 706.

28. (canceled)

29. The recombinant factor VIII polypeptide of claim 14, comprising an amino acid sequence having at least 70%, 75%, 80%, 81%, 82%, 83%, 84%, 85%, 86%, 87%, 88%, 89%, 90%, 91%, 92%, 93%, 94%, 95%, 96%, 97%, 98%, or 99% or more sequence identity to the reference sequence corresponding to residues 20-1457 of SEQ ID NO: 840, or to the reference sequence corresponding to SEQ ID NO: 840, wherein the amino acid sequence comprises one or more substitutions relative to the reference sequence corresponding to residues 20-1457 of SEQ ID NOs: 840, or relative to the reference sequence corresponding to SEQ ID NO: 840.

30. The recombinant factor VIII polypeptide of claim 29, wherein the amino acid sequence of the recombinant factor VIII polypeptide comprises at least a substitution or substitution set at amino acid position(s) 620, 491, 1229, 615, 1283, 822, 328, 212, 818, 555/684, 828, 550, 830, 839, 13, 14, 17, 836, 1210, 1281, 64, 682, 318, 20, 21, 325, 533, 19, 817, 831, 225, 1156, 393/747, 753, 393/732/751, 63/797, 622, 617, 907, 1040, 611, 488, 1192, 1194, 619, 16, 802, 211, 555, 536, 527, 841, 320, 837, 558, 914, 312, 681, 838, 15, 1427, 18, 683, 24, 534, 840, 1160, 551, 393, 393/747/752/811/819/923/1148, 393/751/775, 63/393/732/775/1148, 393/732/1148, 775/1148, 393/752/753/775/793/797, 393/923, 393/923/1148, 393/747/751, 393/747/753/775/1148, 752/923/1051, 63/775, 63/393/752/775/793/1051/1053, 752/753/775/793/819, 63/1051, 63/747/752/753/775/811/819/923/1051, 393/752/787, 751, 63/1148, 63/747/752/753/819/923/1148, 1148, 747/752/753/793/811, 63, 797/1148, 751/752/753/1051, 63/732/1051, 752/797/815/923/1051/1148, or 747/753, wherein the amino acid positions are relative to the reference sequence corresponding to SEQ ID NO: 840.

31. (canceled)

32. The recombinant factor VIII polypeptide of claim 14, comprising an amino acid sequence having at least 70%, 75%, 80%, 81%, 82%, 83%, 84%, 85%, 86%, 87%, 88%, 89%, 90%, 91%, 92%, 93%, 94%, 95%, 96%, 97%, 98%, or 99% or more sequence identity to the reference sequence corresponding to residues 20-1457 of SEQ ID NO: 1200, or to the reference sequence corresponding to SEQ ID NO: 1200, wherein the amino acid sequence comprises one or more substitutions relative to the reference sequence corresponding to residues 20-1457 of SEQ ID NOs: 1200, or relative to the reference sequence corresponding to SEQ ID NO: 1200.

33. The recombinant factor VIII polypeptide of claim 32, wherein the amino acid sequence of the recombinant factor VIII polypeptide comprises at least a substitution or substitution set at amino acid position(s) 681, 622, 617, 558, 536, 211, 320, 839, 797, 533, 751, 303, 951, 164, 818, 807, 799, 735, 794, 926, 755, 921, 801, 1094, 968, 929, 924, 698, 168, 581, 916, 1428, 805, 1114, 311, 737, 693, 809, 757, 1099, 676, 740, 791, 211/536/622/681, 536/558, 211/536/555/617/732, 211/681/732, 211/536/555, 555, 211/536, 211/212, 211/536/617/681/732, 211/536/558/617/681, 555/732, 536/555/558/617/732, 536/617/681/732, 536/555, 536/622/681, 732, 212/320/533/617/681, 211/312/533/534/617/619/681/839, 212, 211/212/320/619/681/839, 797/839, 212/312/320/533/534/617/681, 558/619/681, 320/558/681, 212/320/534/619/681/797/839, 320/558/619/732/839, 211/212/312/534/558/619/681/732/839, 320/534/558/619/732/797, 558/617/619/681, 211/534/558/611/681, 211/320/617/619/681, 558/617/681/797, 320/534/619/732, 211/619/681, 211/212/534/558/619/732/839, 212/320/619/681/797/839, 212/320/611/839, 320/558/619/681, 312/533/617/681/797/839, 558/611/681, 312, 211/320/558/619/681/732/797/839, 320/558/732/797, 533/558/611/619/716/732/839, 312/681, 320/534/619/681, 211/320/533/536/619, 558/617/681/839, 212/320/534/558/681, 533/534/681/839, 212/534/619/681, 617/619/681, 211/212/320/558/617/681, 212/534/558/681/797, 212/320/534, 211/312/619, 212/312/619/839, 210/212/320/558/681, 212/312/534/681/797/839, 211/320/558/839, 294, 759, 538, or 1109, wherein the amino acid positions are relative to the reference sequence corresponding to SEQ ID NO: 1200.

34. (canceled)

35. The recombinant factor VIII polypeptide of claim 14, comprising an amino acid sequence having at least 70%, 75%, 80%, 81%, 82%, 83%, 84%, 85%, 86%, 87%, 88%, 89%, 90%, 91%, 92%, 93%, 94%, 95%, 96%, 97%, 98%, or 99% or more sequence identity to the reference sequence corresponding to residues 20-1457 of SEQ ID NO: 1514, or to the reference sequence corresponding to SEQ ID NO: 1514, wherein the amino acid sequence comprises one or more substitutions relative to the reference sequence corresponding to residues 20-1457 of SEQ ID NOs: 1514, or relative to the reference sequence corresponding to SEQ ID NO: 1514.

36. The recombinant factor VIII polypeptide of claim 35, wherein the amino acid sequence of the recombinant factor VIII polypeptide comprises at least a substitution or substitution set at amino acid position(s) 1042, 1041, 1051, 1283, 1281, 916, 187, 215, 178, 1050, 1210, 104, 615, 610, 536, 618, 621, 614, 110, 301, 1078, 812, 786, 127, 175, 1093, 1088, 650, 535, 806, 738, 700, 132, 1076, 1084, 498, 756, 1108, 746, 160, 543, 310, 584, 918, 1452, 790, 292, 800, 167, 892, 304, 1116, 752, 281, 917, 712, 1080, 806/1352, 1095, 744, 1098, 948, 119, 785, 1113, 667, 158, 580, 707, 731, 1100, 1089, 1092, 939, 1104, 736, 1297, 1127, 686, 1129, 1138, 786/821, 680, 1101, 808, 739, 308, 536/555/619/732/799/805, 555/619/801, 555/619/799, 619/799/801/805, 536/555/619/732/799, 799/805, 801, 246/619/799/801, 536/555/619, 619/839, 619/799/805, 536/801/805, 555/619/799/805, 619/801/805, 555/619, 536/619/801, 801/805, 536/619/799/805, 555/619/732/799/801/805, 749, 616, 611, 370/614, 1156, 1158, 555/681/737/799, 536/619/809/1109, 536/555/619/737/799/809/839/916/921, 916/1109, 536/619/681/799/916/1109, 555/619/681/807/1109, 555/619/681/737/799, 619/681/799/916/1109, 619/681, 555/921, 619/681/916, 555/619/681/799, 555, 732, 619/799, 619, 681, 555/916, 839, or 799, wherein the amino acid positions are relative to the reference sequence corresponding to SEQ ID NO: 1514.

37. (canceled)

38. The recombinant factor VIII polypeptide of claim 14, comprising an amino acid sequence having at least 70%, 75%, 80%, 81%, 82%, 83%, 84%, 85%, 86%, 87%, 88%, 89%, 90%, 91%, 92%, 93%, 94%, 95%, 96%, 97%, 98%, or 99% or more sequence identity to the reference sequence corresponding to residues 20-1457 of SEQ ID NO: 2072, or to the reference sequence corresponding to SEQ ID NO: 2072, wherein the amino acid sequence comprises one or more substitutions relative to the reference sequence corresponding to residues 20-1457 of SEQ ID NOs: 2072, or relative to the reference sequence corresponding to SEQ ID NO: 2072.

39. The recombinant factor VIII polypeptide of claim 38, wherein the amino acid sequence of the recombinant factor VIII comprises at least a substitution or substitution set at amino acid position(s) 167, 167/738/1076/1093, 167/738/752/800/805/808/809/1116, 167/800/809/1076, 167/318, 167/318/800/805/808/809, 167/318/681, 167/318/681/700/805/808/809/1076/1116, 167/318/700, 167, 167/738/1076/1093, 167/738/752/800/805/808/809/1116, 167/800/809/1076, 167/318, 167/318/800/805/808/809, 167/318/681, 167/318/681/700/805/808/809/1076/1116, 167/318/700, 167/318/700/1076, 167/318/700/738/739/1076, 167/681/738/800/808/809, 167/178/700/752/1093, 167/700, 167/700/738/739/1093, 167/700/738/752/1093, 167/700/738/752/805/808/809/1093/1116, 808/809, 1076, 738, 738/808/809, 738/1076, 738/739, 738/739/809, 738/739/809/1093/1116, 738/739/1093, 738/739/752/1093, 738/739/799/800/1093, 738/739/1116, 738/800, 738/1093, 738/752, 738/752/1093, 738/752/799, 738/799/809/1093, 738/799/1093, 739, 739/800/809, 800, 800/805/809, 809, 809/1093, 809/1093/1116, 809/1116, 318, 318/1076, 318/1076/1116, 318/739/805/808/809/1076, 318/499/700/738/809, 318/1093, 318/752/1093, 318/1116, 318/543/739, 318/543/681/752/1116, 318/543/1093, 318/700/738/1093/1414, 681, 681/738, 681/738/739/1093, 681/738/739/752/799/800/809/1116/1339, 681/738/739/1116, 681/738/800, 681/800/805/809, 681/809/1093, 681/752/1093, 681/752/1093, 681/700, 681/700/738/739/1093/1116, 681/700/809, 681/700/1093, 681/700/752/808/809/1093/1116, 681/700/752/1093, 681/700/844, 681/700/805/809, 1093, 1093/1116, 752, 752/1076, 752/800/809, 752/800/1093, 752/809, 752/866, 752/1093, 752/1116, 178/318/739/752/809/1076/1116, 178/318/800/809, 178/318/681/800/808/809/1076, 178/681, 178/681/738/1116, 178/752/809, 178/700/800/805/808/809, 178/805/809/866, 1116, 543, 543/738/739/809, 543/738/809/1093, 543/739/1093, 543/800/1093/1116, 543/809/1093, 543/809/1093/1116, 543/681/738/739/752/809/1093, 543/681/738/739/752/1093, 543/681/739/752/800/805/809/1093, 543/681/700/738/739/800/1093/1116, 543/681/700/738/739/805/808/809, 543/681/700/752, 543/681/700/752/809/1093, 543/1093, 543/700, 543/700/738/739/752/800/1093/1116, 543/700/809, 543/700/1093, 543/700/752, 543/700/752/800/1093, 543/700/752/809/1116, 543/700/752/1093, 700, 700/738/739/800/1093, 700/738/739/799/1093, 700/738/800/1093, 700/738/1116, 700/809, 700/809/1093, 700/1093, 700/1093/1116, 700/752, 700/752/808/809/1093/1116, 700/752/809/1093, 700/752/799/1116, 700/752/805/809/1093, 700/799/800, 700/1116, 700/805/808/809/1076, 514/543/681/805/808/809, 805/808/809, or 805/809/1116, wherein the amino acid positions are relative to the reference sequence corresponding to SEQ ID NO: 2072.

40-42. (canceled)

43. The recombinant factor VIII polypeptide of claim 1, wherein the amino acid sequence of the recombinant factor VIII polypeptide comprises residues 20-1457 of an even-numbered SEQ ID NO. of SEQ ID NOs: 4-2346 and 2360-2870, or comprises an even-numbered SEQ ID NO. of SEQ ID NOs: 4-2346 and 2350-2870, wherein the amino acid sequence optionally includes 1, 2, 3, 4, 5, 6, 7, 8, 9, or up to 10 amino acid substitutions.

44-49. (canceled)

50. The recombinant factor VIII polypeptide of claim 1, wherein the recombinant factor VIII polypeptide exhibits at least one improved property selected from: i) increased activity/potency; ii) increased clotting activity/potency; iii) increased stability to plasma or serum; iv) increased thermostability; v) reduced immunogenicity; vi) increased expression and/or secretion from cells that are transfected with an expression vector; vii) increased transduction and/or secretion from cells that are transduced with a gene therapy vector, or a combination of any of i), ii), iii), iv), v), vi, and/or vii), as compared to a reference factor VIII polypeptide having a sequence corresponding to SEQ ID NO: 2, 252, 504, 706, 840, 1200, 1514, or 2072.

51. (canceled)

52. The recombinant factor VIII polypeptide of claim 1, comprising a deimmunized recombinant factor VIII polypeptide.

53. (canceled)

54. The recombinant factor VIII polypeptide of claim 1, wherein the recombinant factor VIII polypeptide is purified.

55-58. (canceled)

59. A recombinant polynucleotide encoding at least one recombinant factor VIII polypeptide set forth in claim 1.

60-64. (canceled)

65. An expression vector comprising the recombinant polynucleotide of claim 1.

66. (canceled)

67. (canceled)

68. A host cell comprising the expression vector of claim 1.

69. (canceled)

70. (canceled)

71. A method of producing a factor VIII polypeptide, comprising culturing the host cell of claim 68, under conditions such that the factor VIII polypeptide encoded by the recombinant polynucleotide is produced.

72. (canceled)

73. (canceled)

74. A pharmaceutical composition comprising the recombinant factor VIII polypeptide of claim 1.

75. The pharmaceutical composition of claim 74, further comprising a pharmaceutically acceptable carrier and/or excipient.

76. (canceled)

77. A method for treating and/or preventing the symptoms of deficiency in factor VIII in a subject, comprising administering to a subject having a deficiency in factor VIII an effective amount of the recombinant factor VIII polypeptide of claim 1.

78. The method of claim 77, wherein the subject has hemophilia A.

79-82. (canceled)
